United States Patent Application Publication US 2015/0052636 A1 - sequence listing, part 8

SEQ ID NO: 24807 - DNA, 825 bp, Glycine max
  Intron number 1 from transcript Glyma12g25720.1 (locus Gly ma12g25720) derived from phytozome v7.0 (chr-ID Gm12; pos 28845361 to 28846185 reverse strand)
ggatagctaaatcctctgttggttcttccttgtaggtacttgatgtaaatacttgtatatctatttaatgatgttttatgtgttctctgtgctatcagtacgccatttcagtgtgcttttaccttgatcacgtagatgcatgctttgttaggataattcaacagtggaaattggtttgattcttagaacttgataggacatggctagtttatcgtattatcacgagggatcggggcacggtaacctaattgtttgtatgtttgtcttaatgtgattctgatcgagtttagtccaacaagagcaatctgaggatgatgcttgatcgggattaggctagactttcatgaggaatcagggtttagcatttcaggagacaccatagaacacatgagcattgttaagtagagaatatccttttaacatcaggcacataataggaagaccaatgtgttgtctacttgtctttacacatcattactcacgtgattttccttttaatagttagtttacatacctgtgcatagtcgacacatctcttttcatactagacaccaattcgctgaatatagctttaccaagtaacataagttccctgagagtttgatactcggttcttaccattttatactacttgcgcgatccggtgcacttgccgggttcgaacaagtttttggcaccgttgccggggaacttctttctatttggaaagttagttcagtcctaggtttctattctttattctttgataaactgtgaatatttactttcaattcatatttgttttcctcttgaactggataaccgttgttgttgttagtgttttat

SEQ ID NO: 24808 - DNA, 635 bp, Glycine max
  Intron number 1 from transcript Glyma12g01670.1 (locus Gly ma12g01670) derived from phytozome v7.0 (chr-ID Gm12; pos 1016461 to 1017095 reverse strand)
tgctcttagacctcccaggtactctctctctctctctttctctatctatctatccttctctttgtctcttttgttttttcttctttttttgtgtttctgtttttgttatcgctttttctttgtgtatttgcttttggaaaactggcactgctttccgatggagcgtttctcgattgggtgacgataatgtttgatctaaggctggaaatgggaggaaaaaagacgacaagggtttaaggaacggaaatggttgagatctttgtgggaactgcatgttctgtcttttgagtttttctaatatgccaatgtatctaatgttttaatgttagcagaaaactataatctgtttcaacagtcttttgaagtttaatagggggaaacggtggcagtagatagagccccaaataggggggcaaggaggatttccactttataggagtgggattaatattttcagatgaggaaatatcaatattaatatatggataggtgaatttgttttttatggtatcagaaggtaatatagtaatgaaatttttagaatatattctgtgtgtgtgtcttatggaggtaatgagatattggtaattgtttgtgtaggttcttcgtggacaacccagaagaacaatttgttc

SEQ ID NO: 24809 - DNA, 505 bp, Glycine max
  Intron number 4 from transcript Glyma12g36850.1 (locus Gly ma12g36850) derived from phytozome v7.0 (chr-ID Gm12; pos 39882022 to 39882526)
aagtccaaaatcttgacattggggctgcaattatagttatagaccacattttaataccttggttaaatatcaaacactaagttgaatgattttaattaaattactcggcaactgcaaattagtctgcaatttttttcaacgttgataattgcaatgcaaccgctatttaaaaccatgtaagttgatatagttgtttgattttagttatcgatcatatttgaacatgattatatgttgaaacgaatgggaacatggaaaatttttatgagtttggtctttattggagtctaatttttctttccagtataactgcaggagtttttatagtgtagtttttttttatagtactataatgaaataggaagagtgttttgttcccgtaggtttgaagctgaacttcagaagattgttgaagctgcatcctgtaaattatttcgtgtgcctggacaaatgaaccatgcagttggacttgatgatcactttgaacaggtgaaagcattcatag

SEQ ID NO: 24810 - DNA, 734 bp, Glycine max
  Intron number 1 from transcript Glyma09g00710.1 (locus Gly ma09g00710) derived from phytozome v7.0 (chr-ID Gm09; pos 382466 to 383199)
tggactcgtctttgctctcacgtaaataccatgatctgtgttatttttgtcggattgcttgagttttttatgattctggtgaatctgggaattgaaacttggatctagacaattgataaagatttgagttttaagcgtttctggctatgtgggctgttatgttgtgttgttgttgatgatacaaaatctcttttatttcatttgttttggttgtatgattttccgtatcatatgtcactgccgcgttaaattgatatcatgattcaggttctgaattctacaatgcgttggatagaggttttctaggatactttttaatttgacgtacgatcatctcatggtaattatttcattgtaatagaacatgaactgtgctcacttctggtctaagagaagaaatgaaattattgttctcacaagtgtcacctctgaatctggccagtgcaattagcctcttttgtttgtttgtttgtttgtatctgctaagttttgatcatatctatagcaacatctcgatgaaatggcataaagcagcttgttttgtttcaattatgaccgggaaattttgcgggtagggactagagagagtaacatgatgagtattgatgttatactatagatgacatggattactttgaccccccaattaatcaagtgttattaacttaaagttatgctgtgtgtagattaaactttttgacattgaactcctttcattcatcagataacagaaa

SEQ ID NO: 24811 - DNA, 919 bp, Glycine max
  Intron number 1 from transcript Glyma12g28790.2 (locus Gly ma12g28790) derived from phytozome v7.0 (chr-ID Gm12; pos 32152951 to 32153869 reverse strand)
acaaagacaaattgaaaggtgagttcccttcagttaatttgaattatttctgtttacctactgcacaatgacacttagtctatagacatggattggagccccactgagccaatcttcctcttactgtctcaatggcatttctaaatgctttaatattacaacctgttctgttgcatttttggggtaatttcaactctttgcatcgttcctatatgtttttgaagagctgctgtttgaatttatcatgtcctttgaaactaatcaatttgtctggcctggcctttatgcaatttgttttcatatggtaaaatttcttttcaatatcactattactgggccatacatgtgcttgtagcatttaatataattacctcaggctagccatttttttttcattaaacttgtttacttgaagtattcatcttatcatgccttttaaaacttctcatggttacttctattagtccagtgtcaatgacttgctataaatgcctttaaaattgaccggttggtagctttacatatgtggttttcatttctctccactcttgttttgagtcatctcatatctgtagatgctaaataatgcattaactgttgcaaaggttggatgccagattcatacatataattgggatctcctgatgttgtacgttgttttggcatttagtcttagccgtagacctagccacttgatgatttatttactgaagcactgtggttatactgtgcttggtgatgtttgtatcttccctttgatgattttaaccgtggcatagaatgttttgatgctactgtgcatgttaaaaaaaggaaaaaccatttctacaatgaacttctctatttagtggactactgatgctttctattttcccttgtttcaggatagaatttctcttgagattatctttagatacgg

SEQ ID NO: 24812 - DNA, 672 bp, Glycine max
  Intron number 1 from transcript Glyma12g33280.1 (locus Gly ma12g33280) derived from phytozome v7.0 (chr-ID Gm12; pos 36619194 to 36619865 reverse strand)
ggaagacaccaatcttctctccacgcccttcttgggtactactcttccactttcactaactacgctacttcaacttcttcttcctctttaagatctgcattcttttattttcgatctgctgcatgttttgctaccaaccttactacatcactgttttttctttctgttactttctacaattttagttagttcgttcatctttagttacttatttataactgttatttatcatttctattttagttttgacttgatttgaagtatcagagtctgacagtgagctaaattgtaaactgtaatggattttggatgtatatcaactgctgtagagatgtagaatttatatgtgtgtgtactatctatatatcttagatggatgggttaagtgtatggatcatagcaagtgtattagaaaggataagagtgtgtttgatttctattttcaaaactgctttttggtttttaaaacacttattttggaagaaaaattcaaaatttaatagaatttggatgagaattgctaagtagcataaattgtattaggaaacagttttaaaactaaaaagaggcaagaacatcacccagaccctaagtgttttttttttttttttgctgtcactatcggtaagaattttgtttgaatgttgataggtaaccgtctgaagtgcagca

SEQ ID NO: 24813 - DNA, 940 bp, Glycine max
  Intron number 1 from transcript Glyma09g08480.1 (locus Gly ma09g08480) derived from phytozome v7.0 (chr-ID Gm09; pos 7758871 to 7759810)
ccctcttctattatttcaggtatcttaccaatctcttcatgcatttcgtctttcaagtctttctaagccttttttatttatttttattttttatcaatgaatcttagttgtcagtttgttagtttttttaattaggagaattcgcttttattagtcagaggaattttaattcacatcctctctctcccctcttcacccttcaaccacaaatttctttttgggtcattcatgtttcatttttttttcatattgttatattatgaatgtgaatatatttaatggtcatcgttgtcattgtaaatgcggttatgtgtatcatctttggcatattccattctatgtgataacagattggaggctgattcattattgtatgcgctttatatttttctttggcttaaggatctgtgaggatcttggctaattgggatttggtaatttaaggtttcacaaatgtgattgcattgttattaaaaatcgtgaattatggctgacgtagtcgcaattgcaccaatttccaattcatgagattgataggggcaccagatcatgagcttaatatacataacaacatgatttaaattttaaattcaggcaaggttagctttgaagagattgacaaagttccaacaaaaagggcttaagaagtcattattggattaatgggtcaaaattcgatggcttgtatatcatgaggaaagcatataaattttcaattatccaagaataagagaatttgattgatcttaattgttcagttctgtatttatttaattttatatttgacaattgacactgtttgcattttgtttcatacatgtacattatgcctcatgtagtaaaagaattgttgtgactttttattagtcttgaataggatccactaaattaattttgaccttggattaatagctttgtctgttgtgattaaagtgtaaca

SEQ ID NO: 24814 - DNA, 849 bp, Glycine max
  Intron number 4 from transcript Glyma09g07400.1 (locus Gly ma09g07400) derived from phytozome v7.0 (chr-ID Gm09; pos 6282979 to 6283827 reverse strand)
tggatatagcacttggggttggaggtcttccaaaggtatccgtgtgtctttgtcttctgttgtacctgaaccattttgaactctttttttttttttttataaatatattgaataagtgctcttgctgatgacaaaaagccttttcattttcctttgatttggggtgaggccgttgggttaaatttgttaattttccctccatatttcttttgtgtatttgcctattacaattacacaactttatctgttcctttgaaaatatcagtgtatgtttcagtttataaggccaatatctcttgttaatgttcttaacaggttgtttgggtttcaatagtttactttgcaaagtatgtttctggttatgagatgtggtttcaatagtttagtgtgtgtatattgagaaaaaagcaatgagataaacaatcatatgttcagtcacgataggacctgcagatcacagattgatagggaggaattggatcagttgatggatttgagcccaagggagaattagtttgtgacatggcagtgggtaccacgttagggggaattctgttagaatattggatataggaagatggtgagagaaggagggagtcattgggggtatagtattgggcagttatgagagtttctctctggaggagctataggctctggtttactgtttttccttgtccataagagctgtatcagctccgtttcctaattcaagtagtacaatcagactggaatttttctggggtttctattatatcattatgctactgctatattctgatcattatatgtaacttaactgtgatgtctgtaggggcgtgttgtggaaatatttggtccagaggcttc

SEQ ID NO: 24815 - DNA, 763 bp, Glycine max
  Intron number 2 from transcript Glyma09g09540.1 (locus Gly ma09g09540) derived from phytozome v7.0 (chr-ID Gm09; pos 9390831 to 9391593)
taactcacgtaagattattagggaaagaaagagatttcataatttaaaagtactattgatataggaatattgctggtaattaactttctttgaaaattgtacaatgtgggccatcaataaaatctcaaatacataattgtaaacttttcaacacgcattcattaaccaagggtgttcacaaaatggaactatcgatgagtgtgaagatccaaattaaaccaattaaattagtttgagttaatttgcattattggtttatattctgcattattatatttctgtaagcattaattacatgagaaaaagaaagcatccagggaaaaaatagtaatcgtaaataacaaaagcaaagttgaacagtatgtcacgtagctaggtaggtgagaaactattgcgcgacaattcaaaagtagaggacgagaaagcttatgcttccttcgtgttttacaatcatataagatataaccattttttatcagttatcagtgatttcagagaatccttatcctcctttttgcacataaataaaaagtagggtgatgtacgtggtatattaatataaccttgtgatttgccactctataaatacaaacaactgcatgtgaaagcaaagcactcaaaactaacattagaaattaaaggggttgtttgtttgagagtgttgagagtgaaaaacttgcatatctcattagaagaaaagcgacaatgggagcatgtttctcaagtgggaataggtatgatgagtatttggaaggtagtggca

SEQ ID NO: 24816 - DNA, 874 bp, Glycine max
  Intron number 1 from transcript Glyma10g00920.1 (locus Gly ma10g00920) derived from phytozome v7.0 (chr-ID Gm10; pos 638753 to 639626)
agacccagttcgcgttctcgtcactggagccgcaggtatggctctcatcgccataatctcgtctctatcgtccttaatttctcagattcatcacgattgcttgattttatacccttttgtgtttttaatccgagatctgtgatctgaccgtgtttctggattggtttgatggttttgaattctgggtctgtgccaaaattatgtctcttgttgtgtttgaatcttgatttgcttatgctccagatctgatgctctgatgaacgatgatgatgttttatgtgtgtgtgttgtgattggttttggtgtagatttgtttgtctgtgatttgttttttttaacctggtttggcttaggattcatatgtaattgtttaaggccggtattgttatgattatagataaaaaggcttgtgttttatgttgtattagggagtaatagttgaaactagtgtagttttgggtctttccttaccttttcttctcatccgatgactcttgtaatgtgtcttctctgtgaatgagtgtggaaggttgacttactattatgggaaggatgtaatcagttgtttgtgtgtttatcactgttctttaagaaacgttgttgcaatgattcactttcatttaactgtaaataaaagccatggtcaattgctttttttttcttctcctttattcatattgatctatgtgttgttttaagctttttatttgatttcctcatattacaatgttttctgttgagtgtgtttttctcacatctgagaaatgagttctatggtcgaactgaatatggcctgcttgtggatgcataaaaatttgtttcttatcctgttttgctaataaaatgtttttatcaattgtagggcaaattggat

SEQ ID NO: 24817 - DNA, 881 bp, Glycine max
  Intron number 2 from transcript Glyma09g28980.1 (locus Gly ma09g28980) derived from phytozome v7.0 (chr-ID Gm09; pos 35942787 to 35943667)
gttgcaaaggttagcgcattgattcaccatccgttatgtttttatgtgtggatattaatattcatataatatgtaatttgatacccttttgttagtgtactttattttgctgttctagctaatctaatatatgatcctttgtgtaagaaacccttataattaagggttgtttttaaaatgtttgatggtattttggaattagctgtcatgcatttgcgatatgcccaaaatacagtttctgtgattatttatgagactattctttgattgtcgattgttctattattgttttatgaaaagtgggatagcaactttagaataagctttctagctatgttgcatgttatggttactagcaatggtatgatacaggatctcgatttttcatagataaatgtaactaatatatctccttcagaaggtaggattcgacaaatttctatgtctatgggatggtatatcatttagagaaatctaaaagtataagaaaaaaatattaaaatgagaatgtaaatgcaatttgcataatgttctgagtaaaataagcagaaaattaaacagagaacaaataaagaatgaagtagcagtttgcttcatttctagtaatgaacagaacacctcagcatgaaacttggtgttatggatggacttttgtaccttagcgaggaatccatattgggtacgtaattgtatagctttgtaagtggtttctttgaacttcaccatccctgattaataaatgttgcaaagcagaattttgtaattcttctgtatgtcgttttcaactttcaagcaattttttgtgcaatttgagggattttgctgataacatgccccggcagggatattggcttcctgtattgggtggctgatgcaagcag

SEQ ID NO: 24818 - DNA, 977 bp, Glycine max
  Intron number 1 from transcript Glyma09g39450.1 (locus Gly ma09g39450) derived from phytozome v7.0 (chr-ID Gm09; pos 44531663 to 44532639)
ctgctccttcgcagatcatttcgcgtttagcttccgtgagtcccttctctttctctgttttttttaataatctttgtttgtgttgattttggatataaaaaaaatcgtggatggatgattctggaacctggtgtttatgatgatgatgataccgtgctggttgctgtttcagggtttgagtttgatttggtttttgtgatatgtgattcgtgccgtgtctggatctttgtatggggtgttgttttgtggtttttttgttgcgtaactaactgtgcatgtgttggcgtttgagttcagtggattggtggagcttgttcgatttgttcgacttatgatcagttttgggtgtaaggatggaaaattatcatggaatttgtaattggtgaagagattaggatttcgtttcatggtggttttgaattgaacatgagggggaatgaaaattaaatataataggtggatggaatcttttgcaagaaatttgggctgtttttaagttttgtttatattatgctgttgtctataagtgatagcaaaaattgcatcaagatttttttgttgttgaaaatttgcctttttgttatatatgaagttgatttagaattttggtattgatgtgtttgatgctttagaagttgaacaatgctacctccatgcacatttacacacaaaataataataaataagttatgcttttttgcactcatcattatcaaccctttctagtttctacatacgcaatccaatgactctgcacatggctgcgaattttttagctttttttttttaattattcgggagtgacagttttcttgtagattattttgtttattaaatcatactcttttttccgataaatcgtctcccttgttccccttgtatattatgcttgttgtgtatgtatgtttttgtatccatttaagtttgctctgagttgaattagaattctgatatcattgttctgatgaagacgaaag

SEQ ID NO: 24819 - DNA, 733 bp, Glycine max
  Intron number 2 from transcript Glyma09g39450.1 (locus Gly ma09g39450) derived from phytozome v7.0 (chr-ID Gm09; pos 44533481 to 44534213)
aggtatatccattatcatcagttgttcctcttagaaacattttatattatcatattttagtttatctatggtctaaatatgtgcattcaatgaatggggtaaggttgtcacaagcaattttataaagcactagtgttctataaaagtgaaagtgtaaaagtaaaacataaaccagttcttgaatgtgttatacagaatatacttgattcagttttttagtctcttggttcaaaatttctaatttctaactatgtacaaaggacttgtctataactagtatgtcatgacaccggacaaaatccagtggtggctgtatagtgaatcagtgatgaatgatattgaagattgttcaatgtctttggtaactttacaggaggaaactttctctgaagaccaaatgatcatgtgtattgatttttatacaagaatgaacttattgcactttagaattctattattagattttgaggaatattattagcagtagtaaatttttcaaaaactatatctttgaatttccttatcctgtagagaagcataaatatcactgcaaattaaaggtattttgtgcaaacttgttgccggactacatcggtagaaagatagccatgaatttgtttttggttcaatgatctaactgccctgtttgattcctcttaatacttcaaaaatgattccaattgttaccctttccacaggcgaggagcagggtgcttgctcccatatatcggct

SEQ ID NO: 24820 - DNA, 947 bp, Glycine max
  Intron number 2 from transcript Glyma11g14360.1 (locus Gly ma11g14360) derived from phytozome v7.0 (chr-ID Gm11; pos 10275820 to 10276766)
ctatcggagttgagttcgccaccagaactcttcaggtagttatacttatgcttccttttcctttgctgatttttccgtagtgaacgcatgtgcttgtgctgatcgaccgtttgctttttagatttctggattttgttttgttattttttccttccttctgcttgattttctactagttatttgcatagaaatatgtattcgagtacggtcgggtttttttttttttttttaatctttgatttcaaagtatttattatgattagcttatagctcagatcctcttctgaggagcatccggtatgaattgcaaggttttaagtgccgtttgcagttttctcatgatcttcttgttgcaggtcaaaaacctcgatgttgggatcaaaatcgtggtcacagtgcttttcagaactttgatgaatttggaggaatgattttagctttttaggtgttataatcaagtggagaaggacttggatttatatcttgaaatataattaaaaaaaaataattgaaatcctagcctgaagatgagatggattgcttcttggttaaaaattcagattatcagtaaccaaataattatttttgaacttaggactaatattgtatggtggatgttgagtaaattttttggtcatgtttgaaggttttttgaattggttggatgaatggttgtttaattatgaataaggttttaaattgctgttttagttgtggttttgttgcaatcttttgatattgctgaaaattgtggacaaatgccagtcatgcatgaccgcagttcatgtttcatttgtagactgaaaccttgttgcggccaaaatcatggttgcaggccattttttgaaaccctaattatggatccttgtttgtattacagcattactaatggttgtttctttgtttatacaggtagagggaaagactgtgaaagcacagatctggga

SEQ ID NO: 24821 - DNA, 585 bp, Glycine max
  Intron number 1 from transcript Glyma12g01030.1 (locus Gly ma12g01030) derived from phytozome v7.0 (chr-ID Gm12; pos 567832 to 568416)
ccaatctcaactcgttaacgttaagaataattcaggtacagaataatttaggttttgcacctgaatccgtattctctgcatgccaacctcgtttgcattcataataactcggtagattcatcacacatattggattagttttccttctctttattgtttgaaatatgtgaatattgtggaagctaagaagcatggacacttctagatagtagcagtattgtgttgtagctgtgccacgtatccgtgttgaacactgcatgtacggacgctttgaatgtttctggttgcataataatagtttcatgaatgttggcatttcataacatgaattgtgatttagaaattttgttttgtgttaattttaaattaactttagacttactctaaaataaattaactttatactttatatataactatgcagtgtgccagtgtccttttttttaatgtcatatgcccttgccttgtctgtgtcttgttgcatccatatcatgagttgcatttaaaacactgtataattgattgaattaattgtgtttagcttttatgcgtgtctggagctgaagctgtgctttataggtcagc

SEQ ID NO: 24822 - DNA, 575 bp, Glycine max
  Intron number 1 from transcript Glyma12g35460.1 (locus Gly ma12g35460) derived from phytozome v7.0 (chr-ID Gm12; pos 38585862 to 38586436)
tagcaggtgaagtgtgaatttgtgttgcctttggcattttgcatcacatatatggtagagttgatcgtgcttttccatcatgtgtttatagttttgaaactaagcatggtactacttttgaagtaaaccttcaaatttcaaactaagaacaaactgcttagaattgaagacatgccttgattactgcataaggaatttggtgttctgtcaatgtttcatgcatacatcagaaacacacattaagaatttaacttcagtgcttagaccttttcactaggtatgtttacttctattttcatttcctgtttttatattctgttttcacttttaatttacaagttttttttaccatttcctgtacaaatatttgaaaacagaaaacaaaattgaaaacaaaagtgatcagttttgtaaattaaaagtggaaacagaaaataaaaatagaagtaaacgggccttatctttccatataaaggagcagaagtgtcaactatttcaaaggactgcttccatgcatttgccttattagaaacctgtgatgagtctgtgcaggttccaagagctggcagagtttg

SEQ ID NO: 24823 - DNA, 832 bp, Glycine max
  Intron number 1 from transcript Glyma09g28870.1 (locus Gly ma09g28870) derived from phytozome v7.0 (chr-ID Gm09; pos 35839704 to 35840535 reverse strand)
ggcgcaaagcaaaactctcttttggcactgccgtgagtcttcccccctttttttgccttaacaagttactatatgtggtctttggtagctagatatgcgttaaaatatatataggagtttcatttaatactcttagatatatttttaaaaaatggtttcgttaatcagtggcctaaagggaaaaagatcatagataatataatttattctctaaaaaaaaattctactactttaagtttattaactgatgtctttaaaatactgactaacatttacccttaaaaatggaaactttatgtatcatgcgaaatttgaggattttgatgttgttactcagaaagtttctttttgttgctttctttgtgtgtccacacttgttcaattattgacccaaaaaacaactaaatctaagctctttggattttctgggaaccataacaacataatttttttttaaatgatagatttctaatttcaagaatggatcaaaatgtttcattctcttctggctatgtactaaatgctctatactaattaaatgctacctgtccgtgtctatgcttgattggaagaatataaagttagttggtgatagcgcttaatgttactttcgtcatctttgttcactttaagatgtgtttggtttttgaactttttgagagtaactatggtctatggtttgtcttaattatatatgcctaatagactattccatatgttatgtttgcacatttaagcatattataaacttctcatgctacttttgccaaatggtacataatttgttcctaacttggttcattatgtgatgtaaacataattaattaggcct

SEQ ID NO: 24824 - DNA, 410 bp, Glycine max
  Intron number 1 from transcript Glyma09g15770.1 (locus Gly ma09g15770) derived from phytozome v7.0 (chr-ID Gm09; pos 18646693 to 18647102)
ctgcaacagagtgtctcttgatttttaggtaaagtttggttaaaagagaggaggagagggattttaaggagggaaaggaaagggaagagaagagagaaaaaaacaatacttttcttattcagttaagaaaaaagagagaagagatttgtgaaggggaatctaatttagttgcctaataacattatgcttaaattattttaaattctctattctcacttccaaatctctcaaatgtgagatagagacaaaaatcagatgaggaatttaattagctcctctctattttgctcctcccctcctaaaaatcaaaggcaagctttttataaaaatttcttccttctcctttgttttaatactacagtatatatgttattataatttgatgctgatttgtgtgcaggtaagttctc

SEQ ID NO: 24825 - DNA, 746 bp, Glycine max
  Intron number 1 from transcript Glyma11g00280.1 (locus Gly ma11g00280) derived from phytozome v7.0 (chr-ID Gm11; pos 46779 to 47524 reverse strand)
acgtaacttctctcctctcactgctactgcatacttactttctttatcatctactattttaaaattaagaccaactctaactatgacctcatcttagatttctagtatatactatcgactttaatttttaacatccataatcttcttaattaacttcaaaccaaaaacactttcgacttttaaagcttcacagctaggaggcacaattttgaattttacatcacttttgtttttatttaaaaatgaaatgacaggatattgtagctaagataatgcagagtaatatcaaccatcattttgtcgtttttgtattaaatttaactataaaaattaagagtttaagaccattaaatgttcaaaccgaatcttatattcctagtcatgatatggtatagttaaatgtggatctgaatgtgttgtgttgtttgatgttaagcgtgtctgtgattgagtggtaaattacctaaatatgatcgatatgatgatgcatgcctcaagcaaaagcaatatatatacctaaatgtcattaaaggtcgcttgagcatgcaaattgaatgtaggatgtgttgcttactcttttccacgtgcgttttcacttgtacaagaaggaattaaacattatttgcacagcttttgccagattgtcatttcatgaattaatattttaaaagtaagctgctaaattaacgaacttaatttgtggcattgcagagtggggctcaaaacttgtggtcctttcagaagat

SEQ ID NO: 24826 - DNA, 558 bp, Glycine max
  Intron number 1 from transcript Glyma09g04870.1 (locus Gly ma09g04870) derived from phytozome v7.0 (chr-ID Gm09; pos 3670643 to 3671200 reverse strand)
ccagccaaacgcgcccttgcctttgcccttcaacggttctttccatttcatcctcatgcaaaacgcccttattctctttcttgcatgccacaatttcactaacatgttatgttcagttagcatcacatgtcccccctaatgatattcttttttttattattattttgttctgggtgatacctgggttattcgttaaccactggatttcttcacatttgaaatttataccgttagatttcatcttaaaattaattgacattaaaattattcaacagatgtataagctgcactccgagaagtaccggaggacaaggtcccagaataacagatatataagttgtactccaaggagtgagtaagcaaatgtggaacttgggtatctccgaacaacatgtataaaataaagctagcaatttacaagtttgttaatttatatatttttaaatttgtcaaaaatattttaaaatgaaatagggaattaattttcatcacccaccaccacaattgttgttcttactatataatgcaattaatttgagtgtaacatttgtgtggcat

SEQ ID NO: 24827 - DNA, 647 bp, Glycine max
  Intron number 2 from transcript Glyma09g28350.1 (locus Gly ma09g28350) derived from phytozome v7.0 (chr-ID Gm09; pos 35342067 to 35342713)
agattccaccacctgatacaagctagaaaacagaggtatgattctgaaatattgaaaactattatcttatggttgagatttttttatttcattccaccacctgtgttacatctgaatggtttttctttacaaaatgaaatgcctgtggatcgttattataattgacattgactaactgcttttttctagttgtgagttggtgttttctttccaatatttatattctgttttctgcaattgtaatgtgtgctgtgattttttatcttcatgcagtctcatttgcaagttgttcttgctactttcgcttcttctttttattacaaaaaattatttgattgcactattttgaattttcaataaataattatgaatatagttgtgaaacatatttttaaatttttaacctatccaaacatgtttcttgagaaataatttttaatgtcatttattgtaattctatgctattatatccaaacaaccttaaatgacttttcaaggtaaagtataaattttataattataaccaaatgtaaacttctgctttacataaatctctagaagaatcactttgttttacataattttacaatcactttttataaacttaagcaaatgggcattgaatccctatgcattacaggtttgaa

SEQ ID NO: 24828 - DNA, 557 bp, Glycine max
  Intron number 1 from transcript Glyma10g27010.1 (locus Gly ma10g27010) derived from phytozome v7.0 (chr-ID Gm10; pos 35547837 to 35548393)
tcgaagcgaggtcagatttcttccatgctcacgcgttacaccagcactcgttttttctgttactttccaatgcatgaattttgcattctcaatttctttgttttgcacttttgctttctgctaacccagattcactgattgtgtagctcgcaataattaaaccaaaataaaaaagaagcaaaaacaaaactttttttcttctcttttgggttctttattttatttttttataatccaatgcgtgaaatgaggttggggtaaaatgaatttttctctaatgttctcttacattgtagagttagtgggtcataataatttggcaaaacaaagaggaaaaatcatgcctttccccctcatttgggttgcattgttcacaatctaaataacgcatggaatgaagttggttggagtgacatgattattttgtttttcatatcatttcacttcgctgattattacaacatcttttagcctgtggtcacttggttgtagaaaaaatgttaatactttgagttcatgtctcagggagtggtggttctgctggtaacaagttcagg

SEQ ID NO: 24829 - DNA, 791 bp, Glycine max
  Intron number 1 from transcript Glyma11g33220.1 (locus Gly ma11g33220) derived from phytozome v7.0 (chr-ID Gm11; pos 35014100 to 35014890)
gccagagctaccttcttctccaggtgagtatggagatatactttttttttactatctttgaattcttaagtaaggcagggtactaatagccataggtccttaggttttctttggttttttgttatataagaaaattatgaaatggaaaaatgatagggacttgtgtctttattttttagcttacatgagtataagaaaattaagggtgtgtatgacatttttataagttgattcaaaataattttagaaattgtttttcataagttatggctttatatctgatatcaaaataatatgactatctttagcactttctccaactgaaaaaaaaaaaaaagagagacgatgatgtcttctgtgaagataacaaattgatcaatttttaaggcaaaagacaacaaattgatcgttatgtttaatacatttgtatgatcaacctatctagctgcccagatcgtatttttttaacaatttgattagggacagtagctacctgtattagctaagtgccaaagtcatttctaatgaaagataggggaattttaaaatagatcttatattagtataccagttaataataataataataacctgtaaaggaagataccacgttctgtttacttaaattgactctgtcgtttcttctgttggaaatatggaatcaaacatacaaattactatttttcatgtttgctgaatttttcatgctatgctgtgtttctagcctactcaattttcttccatcaattctggcagaataattcaaggattgcatcaaggactaaatattg

SEQ ID NO: 24830 - DNA, 801 bp, Glycine max
  Intron number 2 from transcript Glyma10g42920.1 (locus Gly ma10g42920) derived from phytozome v7.0 (chr-ID Gm10; pos 49773444 to 49774244)
aaataaaaggtgggcccctatcttcttcaagttgtaatcttggaaagatttttgagctattattaatttgcaaatatcaaattcatgtttgtggttgaatttcatgaattattagtaactagtagaaataataataattactgtgtgatgtaattgattcatgaaaacttgtacattgttgtgttgtgttggttctgcttcatattattagcctcaacattcggcatgtgcaaggtatggttatcatgccccgttaacttgtttctatttccattatggactgtccttttctccgtcctactttagatattttcgtatatacttgaatcttggacatcttagttcatcttgtaaatgttgcagtatttaaattttctgatatctatgcaaaggtcatcttctgacactctacgtgttgatccatgtgacaataggcacttgagtttctaagtagttaatattgtgggtatggtctactctaggttctcaaatcaacggttgacacttgtaaagccttttttttacttgattgctgtatttcttacatagcccacacaaccttaaatatgttaactatttatttgaatgactctggtataattgctaagtttatttgaaccctcaaaggaagtgctattatgtttatttggtgtgtgtttgaacactgaactggtttcttttaggttcaaaatagcttattataattaaaagcttaatgagaaagctctataagataaaataaataaaaatgatttcgccctgaaaatttaatcaaagtcatgctttaagtgttatttttgc

SEQ ID NO: 24831 - DNA, 486 bp, Glycine max
  Intron number 1 from transcript Glyma11g03960.1 (locus Gly ma11g03960) derived from phytozome v7.0 (chr-ID Gm11; pos 2651134 to 2651619 reverse strand)
tgtacaatattctctaccgccgcgctcttcaaaatgtaatataataaatacattttttttcttgctgaattgagtttgtgctgtgttgtcatatttcaaatcttcaatttactctcctacttttcataattagaacaatccaatttaggtcaaaaccttttactatcattttttttttatgattaccttttactatcatctgagtgtgcgtgtctttttttttcttttcttcttttaactattgttgtgagcgaagcttgctaagaatcctattgaatatccaagggggatacggatgtacgatttttctgatactttttaacacataaaattgtcttatatttgttgttgggcacacctcctccacatttgaattttgttctcgaaattagcttagattccagcatttgttttctgaaaagtattcaaagcttgattgattctactttataattgatttctcttgcagccttcttttcttaggag

SEQ ID NO: 24832 - DNA, 587 bp, Glycine max; identical to SEQ ID NO: 18015
  Intron number 1 from transcript Glyma10g05660.2 (locus Gly ma10g05660) derived from phytozome v7.0 (chr-ID Gm10; pos 4432271 to 4432857 reverse strand)

SEQ ID NO: 24833 - DNA, 591 bp, Glycine max
  Intron number 2 from transcript Glyma12g02760.1 (locus Gly ma12g02760) derived from phytozome v7.0 (chr-ID Gm12; pos 1779240 to 1779830)
tagtttcccagagcaagtatgttcagtcgccatctactatcctttaattttgcatgattatattagattggtagttaacttgtgtttggtatgtgatcctcacataactttgatgcaattactttaatttatgtgcatgctgtagcattaatagctgagtcttgttgtatagcattgccttcttgccctattttttcatgttcttgattaatgtattatgtatctccaagccataggatgttgtaactgtatattctcaaatggatcaagtgaatttttgaattaaaaatttattgcttgatgactcaacatgtgtgaattgtggaatgcttgaaggatgttgatctttttactctgtgggctgaggagactctaattgaagacaacttggttttagatatccttttcctagcatattatgattcgttttgtacctgtagcagtgaaatgtggaagaagtttatttctctttacaaggtataatgttatacttctgctcggacctgtgatattttcttgaatcaaatccttgcttaaaatcatctttttgatccaggggatcttagctggtgattataatttgggaaagct

SEQ ID NO: 24834 - DNA, 357 bp, Glycine max
  Intron number 1 from transcript Glyma12g10670.1 (locus Gly ma12g10670) derived from phytozome v7.0 (chr-ID Gm12; pos 8621172 to 8621528)
tgggggattgtcaaattggaaaaaccagctttttggttggttcatcactttttttttaatatttataatttataatttaaccaacatggatattttcttatattttcgttctattgggtttaatctgaaatgggttgagtcaattttatttttttagaatttggtttcctcgaagatcagcttgttgggtgattgccaaattggaaaaaccagctttttggtttaaccaacatggatattttttcatattttggttctattgggcttaatctgaaatgggttgagtcaaaaatatgtttcttttgttttgattttattgttagtttattttttttaattttgtttttcaggcgaaat

SEQ ID NO: 24835 - DNA, 743 bp, Glycine max
  Intron number 2 from transcript Glyma09g18900.3 (locus Gly ma09g18900) derived from phytozome v7.0 (chr-ID Gm09; pos 23458676 to 23459418)
aagttccattctttcagtttcatcatcaggttttagtatgtatttgctgttgtgatctgctattgattctgctatatatgctcctcatttctgattctgcttcatgtattcgtggccaagaggatatttgcactgaaattaacaatctcttttttttttttttttacttctgggaagtgtatggaagattttgtaaaattgagggggagcaaagtgattcgggctgaaagtgcccttgtcattttaagttatcatatctcacataagtttgttatgattttctttttgctataatttgacaacctagtagtttgaatgttagtttgactagcagcctttttcccgtcaagtagagagagagagagagagagagagagagtgagattatgttcactgattactaagattgacaggtgaagttaaattgaatactaaatttgttcaacgtgtatcaatatgtaaggttttttgtttttccccgttaaaaatagtgcattaatcaaatctgaaggtatctttaattggattttcctctatcaatttatcttataaaactacgttatttaacttttaaaatgagcaaatgagttggttgtcttcagaaaaggaaggaacggcaaaatcttagcttagcacccagttttctgttcttattaactgaagatgtgaacataaacagatgatgcttgtgcttacatgtttgctgcatgcaggtactttgctggtgttccctatagggaaag

SEQ ID NO: 24836 - DNA, 725 bp, Glycine max; identical to SEQ ID NO: 23707
  Intron number 1 from transcript Glyma08g45720.2 (locus Gly ma08g45720) derived from phytozome v7.0 (chr-ID Gm08; pos 45006040 to 45006764 reverse strand)

SEQ ID NO: 24837 - DNA, 868 bp, Glycine max
  Intron number 1 from transcript Glyma09g41600.1 (locus Gly ma09g41600) derived from phytozome v7.0 (chr-ID Gm09; pos 46272023 to 46272890)
tcaattctgctagatcagttcttgatcacttgcaggtacacattcgttttgggaattctctcagaatttcatttccatttaagttttaatcaatactctagatataactttttttaataattattatcataaaacccttggagaggtgccagaaatttaagtgggattaagtcgttcctaatttgcccaaaggaccgaagctcctgggatatctcggactcttaccttagagtcaaataccttaaagccttaattacgatgatggttaaaaaaaatagttataaaagtcaatagtcctatcattataggtgttactcaattatatatatatatatattaatcaatcagaaatcaccttagctatgatttgtaaaataattattacaaaagtcaacaatctgggtatctgagagaccttgacattgtggctgaaactgtagttgcagacagatttttgaaaccttgatccattgaccttttgcattataattaaattcattttattaagccttgtattattaaaatttaaagctcaaaaagttaattatgctctttctttatttactttcaagttctaaatttatactatgggtatattgtgttttaaaagctgttgagaagaaacagtggtaatttaagtatattagctggtactatattgcaattctcagagaaattgtcacttgggtttactctgtttctccatttctttctttctttttctttgcttcttgtgacagtatgttgtgagctgttttttttttcacccttaagaaacaaaaaagttatgcatgtagggtgttttctgttttctttatttctttcttattattagtttcattcttttttcttgttatctgacaggggg

SEQ ID NO: 24838 - DNA, 721 bp, Glycine max
  Intron number 1 from transcript Glyma12g02740.1 (locus Gly ma12g02740) derived from phytozome v7.0 (chr-ID Gm12; pos 1764951 to 1765671 reverse strand)
ggcaaaattggagatcatcgaccatagatatcaaggtaaaatctctgatcttagtttctccatcttccatttttttcatcatcaaacattctgaattccttccaataattggagttcctagtcatcgttttcaacccaattacggatacaatttttttgtcttactttctgagaaacttagagggctcaagtaactacataatcgtgctttggtcataagggtatataattgtattagtttccttagaagtaagcttgtcattgttttgtactgcctgataataacttcaaagatttatcttgtcattagagaattttattagcttttagcagtaatagattacgttgatatgacaattttgccttgttcttacgaccctattcctccttaagcagtaacagaacgacacaaacattaaaataaatggagagaaataaaagctctggagagtttttaaacaggaaagactctataggataaattattatagtaccaccttacatagttactgagagtttaggtttatattctatgaaattgaatatccccatgtagaaaatgtgtcgaaataatcttttaagtcaaagattactgcttattattttgataatgttggtttttcttattctacaaagctgaaaccaatgatctaaactttgattaaactattattctttccggaactcatgtatgtattatcaaaggtctgaagttgaacca

SEQ ID NO: 24839 - DNA, 620 bp, Glycine max
  Intron number 2 from transcript Glyma10g43050.1 (locus Gly ma10g43050) derived from phytozome v7.0 (chr-ID Gm10; pos 49870228 to 49870847 reverse strand)
ggaaaatcagcaaatcagccttgaagaactgggtggtgagaattaactaacataacatatggagcttcatttgaagaactggaaagatatatttactctagtgtctgaaatgtgtcctttttctattcattgtctgatttagttactttatgtttttgtttcattttcaatatggttctatgacattatttacttgtgacaaaccttgacctatatataatagtgtatttaacaaagctcagctggaaggtgttgtagaagccaattcacttcttagaatctgtctgtcagttgtgcaaatggcacagtagtgcgcacaagattgattgcatataatttaacttgccgttgatgtttttatacttctgatcatttctaattttgaattcttaattcatgcatgtactcacatgctttgaaagatctttttgttattaagaatacatcagagtcaatatttttatccttgactggtttcaattgatgtttacatgcaactgtttttgtttgcttgcttttatagcatttacataacggttttaattgatgtttacatgcaactgtttatgtttgcttatatagtatttacaacagttccttgcatttaacttcccaggtta

SEQ ID NO: 24840 - DNA, 299 bp, Glycine max
  Intron number 1 from transcript Glyma10g33130.1 (locus Gly ma10g33130) derived from phytozome v7.0 (chr-ID Gm10; pos 41522092 to 41522390 reverse strand)
ttcccttttgcatactttttggagaggtacacatgcattaatttctcttcaagagttggtattcctttgcatgactctcttttttgtgccatgcatcagcttgatttaatttgattcatggattcttaaaagtgtgcattatcaatgcttgatttatccatctctggttgcattttaatatcaaatttagcatttgcactcttgataaatttattttatcttaacaattattgaatttggcatgatcatataattttttatcatgtatttgacaagaaactttatgttttcttgcagaa

SEQ ID NO: 24841 - DNA, 999 bp, Glycine max
  Intron number 1 from transcript Glyma10g29500.1 (locus Gly ma10g29500) derived from phytozome v7.0 (chr-ID Gm10; pos 38363756 to 38364754 reverse strand)
ccgttgccagtctcgccgtcaagtactccgttcaggtaaggctttaacttttcattattaattcaagtctatatagtctataagtgctgtatttagaaatttaggattagagtttcggactatacataatcccttaatgcaagccttttttaattggagaacaacacatacagcacttatagaactgcatgtaagttttgtcctttctttttttcacccatcctgcattgcaatcctaggctgctagtttttcacttgttaattgaaaaaccgcaatgcacggttactgtttgtgacttgtgaggctagtatactttcaagaatttgcctattctcaagtgacacgagcatttctgaaacgcaatttactgaattataagtttataaccaatgattcctttaatttttcaatcaatacttgtatgaacctcttgaaagccaaaacctattttcaaataccatttttgctgtgaaatatttccaagcaaatagtctatgtagtatgtactaactggcaaaagttaactctcatcctcctcatggatgtggattcgattccatgatgccactaaaatctcacttggtggacaattcttttcagggaaatccctagataccaagtagctgcaagtgggtaaatctgcattcgtgcagtaattctctaggtaggtctttgctggcagacctgaatgccattgacaccctactcagtagtattggggctgcctccccattctaccacattttattcacccaagaacagttcaaagtttttacattatcatcctattacaagttgacatgtatgataattgataagtttgtcgaattttataattactaccttcaaaatatatctaacatgatttctgattggtggagaccggagagtgtaaactttggcagggcatagaaattaaacttaatattttccatttttttctcaaggcttttgctggttaactgcattggatgatatcttttatgttttgacaggta

SEQ ID NO: 24842 - DNA, 823 bp, Glycine max
  Intron number 2 from transcript Glyma10g25480.1 (locus Gly ma10g25480) derived from phytozome v7.0 (chr-ID Gm10; pos 33375895 to 33376717 reverse strand)
cattggtccaggttgatccaaaccattcattttctgtaagtttgatattcccattttcacctttttaggaataattatgaggccttgagaaaatagagaatattgatttttgaatgagttatgacttgttagtgcttctgtgattacagtaagagaaacaataagaaaaacatttgtgaattatggcttggttggaaacatctgaaattggaatttgaactgggctggcttgggtgagtgaattgaagaagatatatggggtatcttttagtgagaataaattctaattggctttcaacttgttttataagggtgcagcttttgttgcaggagaagtttgcctggtagactcttattgtggtgatcatatactagtgctatttatctgaatagctctgggttctctgaaattttaaaacagttagtgaaacttaagtttttctctgtgcatgttcactgaagatggggacattgtcctcttatatttaatgttgctgacagattcttacttatttttctattggcatcaatgtattggaaatcctagttttgtaaatggacagtatattctgctttttcatacacttgtgatgatcactatggttccaaggtttccatattgtggaaccatgcattcctcagttcagaagaaaattaaacagtgtggacattatttttttgatccataggttgttcatccatgactagttgtatggatctgatgcttgtgttgacttgaaaaccccttttttctttactatacttacaaagtttaacatgcccctattttcatgttccaggagtttgcagaagaggagcttga

SEQ ID NO: 24843 - DNA, 986 bp, Glycine max
  Intron number 1 from transcript Glyma12g05310.1 (locus Gly ma12g05310) derived from phytozome v7.0 (chr-ID Gm12; pos 3528134 to 3529119)
agctgcttttgctcatttcacctaccaatctcgacgttagtattacttactactactctttcattaatttctccatatccatacacttatattcacattggatgcagttgttgtttaggtgttttaggctttaaatatttgtcactgttacgttgcaatttcgttggatttgttaatatcatgaacaaatgcgatccatgaagtttcaattgccgtcacaaacaattaaagaatcttgaagttacaatcaaaatcatggtcttcaggactattttttaaaacttttcttcaataagcattcaagttgtatttcaacaatatgcgttataaaagtatacactcaagaattaggcaaattatggagatgtaattctaattcttattagaaaataacaccaacgaagggtatatctaagttttagtttttgattaaaaaaaaaggttgttctaatcatacaaaagtgcgataaataaatcttcatgctatatgaatgattaaaactaaaaatcaattatcaataacgatgattcagttagtaacatacacttagtttataagagagaatatatatttggttctcataactaattaaaaaactgaaatttacgcaaatattttgggattctcttgaggaggaaaagaccctataattgtgatagttaaaaaaaactaaaaattacttaaaatcttattatcatttaaattgttacatgacttctcagggtcacataattaatttcatgtcttatgataaaatttaatggtctatatttatcctccttcttgcataaaaaagactttctcatttgaaatcctcatcggttggattgtccgtggattccattatcaagaagtgtatccacgatttctttcaccaatttctcctaacatatatatatatataaactttgattgatgaatcattaattagtgtggccatgtgcatgcagatttttgctacatagaagagattgaaggtgcatca

SEQ ID NO: 24844 - DNA, 680 bp, Glycine max
  Intron number 3 from transcript Glyma12g01410.1 (locus Gly ma12g01410) derived from phytozome v7.0 (chr-ID Gm12; pos 844390 to 845069 reverse strand)
ccatcaaaattcaaactgcatttcggggttacctggtgagtttgtccaacccattctctttgatttgtgtcaccttaagaccgctttgcatgaactttacattcactgctaaattcctcactcgtggatttatattaattatatataaaaaacaatatatttaggtcataaaattctccttaggtacttgtataggagtaaaaaaaaagatataatgaatttaacttctctcatgagacaaaaccaatgcatgcatctcattttttgggaagttagatgagagagcttctacaaaatcaagtgtatcaaatgattttaatttatggaaattcatctcttttcctataagtgctcatacataattttatctaaacatgacttcaatggcagacacactaaatgtgaaccaagtataagctgaaatttgttagaaattaaaagatttcttacagcatttagtgatttcaaaaattcaactcaaagagagtaaaagaaataacgaaaattggcacaaaaagagagagagagagagagcaagtactaatagtaatagaaattagtaagtggaagaaaaaaccaaagtcaacttactctattcttggtcattgttttctattgatcactgactgatataagacattacaggcaaggaaggctttgagggcgttgaagggaatagt

SEQ ID NO: 24845 - DNA, 712 bp, Glycine max
  Intron number 5 from transcript Glyma10g08040.1 (locus Gly ma10g08040) derived from phytozome v7.0 (chr-ID Gm10; pos 6841013 to 6841724 reverse strand)
cgaggtacccaaaattgttgttcaactttgtgtaacattatgtatcaaaataatattagatcaattattagacttcttacacacgtagggatgttgttgaaccaggtgaataaacctttagtattagacatggttgaacatttttgttaaatagttaaattagaggaataatctgaaagaatatgtacggcatataatctgaaatagtctctcatggaaatccatttgatttttttatgctctagcataatctgcactatccttttgaggcttttattataattttattacacaaataccgtaggctaatatgtagtgaagtcttttgatattgtaccattgattttgcatagtgttctttatactactttggttaggtgctacagtgcattataaaaggataactatttagtggtaataattcaaatattgaaaatgtaacattaagaggttactttgtattgccatattctatggtactccttgttataatgtcatgttctgtggcataccttgctacctcggtgtttgacttagatgtagctgtttgtattttcaatttatgaagatagtttttttgtaattttaattctttcataatggtgcttctttcttattgttgaacctctattttcttttcttttatcctatttgattctagttggacagatgaaataactgatatcttagcaatgcagtaaatcagacttgg

SEQ ID NO: 24846 - DNA, 745 bp, Glycine max
  Intron number 2 from transcript Glyma12g07590.1 (locus Gly ma12g07590) derived from phytozome v7.0 (chr-ID Gm12; pos 5226497 to 5227241 reverse strand)
gatttggtaccgagcgtcaaggtatacgattcgatacatccttgattttttaagtttagtgtctcttacgcacgctcgttctgaattgacttatagatgaacaattaagcactttccctccgctgggggattctttgtaacgcgttgattttgcatgtgttgctaattaactttgctttgtacttttcataaaaataaacacttatgatttatttggtaatcagaagtacacgatgaagcaaattgtgtatgttattaaaattggatttgcacggatgatgaaggggcttttcttactggaaaattatacatgagccttgttgattggttggacttctagctctttttttttgttctttatatagtttttggtttgtatcctgtaactgattttattttttcctgcgattttaactactcagtacttactattttgacattatttatgttgtgattgataatgatattattggatactctgtggacaatgtgattccatggttagatactttttagttattcaattttgatcctgcactactttttagctacacttgaatttcatttgcattacttctgcaaacggtggtatttttgttttcttcttttgcttttaatgttttctatttgagtattggattttgtgtactgttgtattaatcattggggtatactattcattttcctgatttattgacatctctttgtaggaaaaattaaactattttcgtataaaagagctcaa

SEQ ID NO: 24847 - DNA, 672 bp, Glycine max
  Intron number 2 from transcript Glyma09g34140.1 (locus Gly ma09g34140) derived from phytozome v7.0 (chr-ID Gm09; pos 40587294 to 40587965 reverse strand)
cgaattatagtgctggtatttgcgtggccttttatgtaagtaaacgaattctttttcttctgttcaagcaaattgtgaagaaaattttgattcacataaatgtttttctcaatttttttctataattaatgattttctggaaaacaaagatcctataaattaaaaaaaaaacacgagttacaggtttttagtgcttcttcttcatgaaattctttccttgctatatatacatacatacatatatatatatatatatatatatatatatatatatatatatatataaaagatcagtgaaacatgctaaatattagtcaaacttccctttaattttgcgaaaaaacttccggactagtagcgaagtcaaattacagattcaaggtcggtgaacttcatttaatttacgttagatttttcaaagaataaagattaaagaactgtccaaacggttaacctacaagttattattggccaatattgtgtttttttgatattgagaaaaattggaaaaaaaacgtgcactctaaaacctttgaaatgttcaggtcaaagttgtgatcctagacacagtcttttaaaatttcgtcttatggaggataggtttcatggttatttcgagggtggcatagttgatttttttttttcgtttcttcgtacagacatcaaacggtg

SEQ ID NO: 24848 - DNA, 1013 bp, Glycine max
  Intron number 1 from transcript Glyma09g09790.2 (locus Gly ma09g09790) derived from phytozome v7.0 (chr-ID Gm09; pos 9693283 to 9694295)
caaagaggctgtttccggattcgaacccatgaccaacaagtcaccaaggcacaactttaccactgcaccagggctcgccctccaacatagtcttgtatatatttaaaaaaaaactttggcttataaaataaaaatgttattaatcaaacattcaaaatgtaaattgaataaatactgttcaatattttttcattaaaatttgtaataatgagattaaagataataaaacgtataaatattgtgttgtaatggaaaattatatcaattatttaaggaatgttatgatttcttttataacattcattatgtatgccataatttttattattttatcatctaatttaataatatttttgaatttattgctaaaaagattgaagaaaataatatatctaatttatatatttgatgaaaatggaaaaaaagaaatactaatatttattatgtgattaatatttgttttaatgtaaggtaagtatctttttgaattcttaaattgtctttttagtcttttaaatatgtatttaattttgttatacaaataaataaatataactattattgattgattgttcaagcaacatgtaatcctgaataaattttagaaaataacttttcacattttttgaagtatatatattttgagagaagaaaaaaatggaagaaaaaacataataaatttaatgggtaatttggtgaaaagaaagaaagagataaacatgaagtatttaagaaagaggtaaaaagtaataaatatagtagatattggctttgaaaatttaagtgttaatgatacaattgaagaatatatcagttcttgccaaatggaactgtcaaaatccacatggcaaaagattagagaccatgctagacaatttctcttgtatattcatagaattgggaagggaagaagatccatgttctggattttgtttactgcaattggaccagaagttaatccattccttttgatttcaggttgctctgtgcacttgaagggaagtatctggtac

SEQ ID NO: 24849 - DNA, 280 bp, Glycine max
  Intron number 1 from transcript Glyma10g31440.1 (locus Gly ma10g31440) derived from phytozome v7.0 (chr-ID Gm10; pos 39938828 to 39939107 reverse strand)
ctttgatctctcttcatttgccttagtagaagcacccaacagaaacaatactcatcatataactcctctaggttccatttctttcttctcaaaatcataactcattatgctttaccattttttccattaattgttgaatttcattaaatccactacatcgtcacgaatatatcaccaaactaatattttttttttaaaaaaaaatgtatatatataggattacatgtcccgtttttgttttatatttgaactttattcttgttttggttagaagaagtac

SEQ ID NO: 24850 - DNA, 922 bp, Glycine max
  Intron number 1 from transcript Glyma10g30800.1 (locus Gly ma10g30800) derived from phytozome v7.0 (chr-ID Gm10; pos 39394910 to 39395831 reverse strand)
gccacaaggtatcttcttagcattgactttttaaacaaccttctggatttgattgatgggcttttctttttcttctctctctctctctctctcttcttaatagaattgcaacgattaggcactgttttttcattcaatcaaacgagaaaccaaactactttatatattatatcatttttgagaaaaactgttttcggtctattaatttcaagctacagaggtaattggatcagaattgagatgggttgctacttgctatttatacgtcattttcttttatcaatctcgcggtatattttgaaaacaattagttgtttgcgaatattccatcactatgagcacagagaagatagatgccttgtttatttattataattttttttggatgtgaagtagtggcattaattccatggttctctcgtttaccgtgttccatcacgtattgcttcacttcaatagaccgttaaaagaaaatgtttttatagtaggaaaagggtttatgatgttaccttttttgtaactctccaactggaatttcttatcttgacttaacactataaatgttttgtcaaatgttgtgcagcttattgatggatgtttgtttgccttagagaattgaacaatattaattcattactgcagcactttgtgtagaacttccagtcatccacatttttcactcataaaatgctaagcttagtttgttcttttgcttgatagttgagcaattgtgcatcaagtaagcacttttattgtagtatacatcaaaattgaatcctttctaccgataatcatttattctgtttggttcaaactatatgatcttctgtggctatgctgtcaaatatttgtggcttaattatctgatttatctaagcctgtgagtgatctggtcaggtggtagttttgcaagtggaagaat

SEQ ID NO: 24851 - DNA, 327 bp, Glycine max
  Intron number 2 from transcript Glyma10g41700.1 (locus Gly ma10g41700) derived from phytozome v7.0 (chr-ID Gm10; pos 48726233 to 48726559 reverse strand)
gccacctccgccgtcatctccttcatcctctcgtatcactcaattaatcacacgcactgctaagttcacctttaaataatcaaatccctacgaatttatcttgtaattattttagtaacaaaaaactgaacataatttagagtcatagattactagatagacttttactttcacttcagctacaccagttatgaaatgattgtgcgttttgctgtcagaagacgaaattgaattgaaaaattggaaatattttattaatttgttgtttcaataattactactgtgaaatcaggattagttttttggcggcagaggcgtgtctgttag

SEQ ID NO: 24852 - DNA, 642 bp, Glycine max
  Intron number 2 from transcript Glyma13g40400.1 (locus Gly ma13g40400) derived from phytozome v7.0 (chr-ID Gm13; pos 40900921 to 40901562)
tgtttatcctggtatgttttgttttgtcaattactactactccatttttttttcaatggctaaatatataaatcatatataaattaagaaatataattaactaatacatttttatttttgcatttactaacaaactcatttcagttgagccttatcaaaaataaattctatttgacttctcactacttttattcactttctaattgataaaaaaaaatttgcacaatcgagtaacaaaacatgtaaaaaaattgtttttttttctccatagatttttaatatatagctggtgttttatcaaattttatactcttcgtaaataagaagagagataaatacaattttttaaatgaaaaaaaattatgtaaaaatctaacacgagagaattcattttacacaaatacatatactcaaatgcatttatgtgtaattagcccatgtataataatactttttgcaactatagtgtggcttctaatgatttttttcttacattagatatatttatatttattttaattatataacaggcttcacatacatggtttattattgtatttctcaaatgtttagatgttaaggtttaaaattaatcttttttatgcaggttctatcttattaccacccccgccaccacccccg

SEQ ID NO: 24853 - DNA, 368 bp, Glycine max
  Intron number 2 from transcript Glyma14g09470.2 (locus Gly ma14g09470) derived from phytozome v7.0 (chr-ID Gm14; pos 7549575 to 7549942)
aagataagatcggaagtgggctgaactcaattgtaagtgaagttaataatgtgcatgattaatttgatttgtaggttcttattctttatcgtgataatgctatttgaagtgaataatatgcttgttttgatcactttgatatgtagtatgtatgtgtgtatgatattggttgctttaccttgttcggattaatttgcaacttctgattgcatttgccctaaattatgtgaactgataaacaacaaactgcttgtagtctgctctgaagttactgttacaatttttatagcgagtaaaaagttctcaaaaggttcaaattcttttcatttgtttgtagtctgctttgaagttatcaaccagggatagca

SEQ ID NO: 24854 - DNA, 987 bp, Glycine max
  Intron number 3 from transcript Glyma13g19500.3 (locus Gly ma13g19500) derived from phytozome v7.0 (chr-ID Gm13; pos 22982798 to 22983784 reverse strand)
caggacccgaagctccaaagatcttcaactgtgtaagcatatatacttaaaacttacaatcctaaacattgaatgacttgtcatgcaatttccatgccaaatcattaaaggatcactaaatgttttgctgagattttatctattaatggctatgatgcacggatataatatgcatgtttgtttgatggaatggtaaagtaaaagatatacaatgtaattcacaccaaaaaaacagatatacgatgtattttattttttttacaatagtcactgaattttgattcatgacctcatgtatactactctaggcccaacattaagccgaccctggacggttgatactgtgttactatataggaaacaatgcttgcaatgtgtgtgtgggtgtgtaaagaggacatcaaataagtatgaagtatccaaatattcatattggatagtgaagcaaatgcaagtattggtgctttgtagactgatggttagaacagggatcatattggataatggcgattccattttcatctcaaatttttccagttagtctgtcttcttattggaaatgactatcctgttacctgactgacttgttggaagggcataatttgattatttgtatgggattctggctgaatttgttctaaacttgtactataggtttaagcatatctagcattgcgggacaatttgttgtcaagtacccaaaatatttcctatattatgtttctcatgctttctttttcttttcatctaattcttaaatgctatagaatgataagcctaagctttttaagaattgcagtgtttgacctataacattttctaatcagcatggctactctaatctcaagttttcatatcatgttgttcctgtgaccttaaattgttatgatttttattgcctctattgagaaattagacttgaatacttgtgaaatattgctgaatcttgcaggtggtcgaaatagggaaaggaagcaaggtgaaata

SEQ ID NO: 24855 - DNA, 783 bp, Glycine max
  Intron number 1 from transcript Glyma13g19500.3 (locus Gly ma13g19500) derived from phytozome v7.0 (chr-ID Gm13; pos 22984025 to 22984807 reverse strand)
cttcgtttcaccaccacacttacattactttgtcggtgagttcccgtttttcctccttccactcccaccgctagggttgcgatgctcctaaacttttttttttcttaattaattcttatttctgcttaattttcttgaagcgccgtttcttaaactccacgtttctttgtaacctctgtttttaagtagtagcaatatgcttgccctggaatatctcagatctgtcgccgttttggcctttccctgccgtttagttacgtttttttttttttttttgtgtaattccctatgctctgccgtttcgcttgcaaaaatggcttctgaatcagagaatgtcaaatgagttataggaaaacgtgttttttaaagtcgtaattgcaattgtgacggtgcttttggtgagattggaaaagaaaaaactaggtgtctctgcatataacatttattgaaattaaaatagattttgtcaaatggattgattatttgagtttttaattcgtaattgcagacattcatcttttatgacggtgcttttggtgaaattagaatagattttgtttttgcaattcttgcctaagtttacgcgtcaaatggattgattattgttgattttgtatggtattaattttcggacactgttcttttgggtgattattgaaaggtcaaaggtcaaaggtcaaatttggtacattgtttttttttttttttaaaggttggtaaataatgtgaaaatacaactatggatctagtgaaaaatattatttattatttcggagtgcagaa

SEQ ID NO: 24856 - DNA, 463 bp, Glycine max
  Intron number 1 from transcript Glyma14g03750.1 (locus Gly ma14g03750) derived from phytozome v7.0 (chr-ID Gm14; pos 2415944 to 2416406)
gtttaggaaaagctgcaatcttgtactttttttggtttgagttgttaaatgtctttaaaaggtacatacttgtgataggattttctatctggcattctaaagaagttttggcaacagtatttttgtctttagatgtgccttttttgttatctccactctttgctctctcccttatttcacaataatgaatttcttattttaaccatcctcctctcctcaaaaaaactaaatttgctgataacttatgtttgttgtctggaacatctgtagcatctccattggctcgtttttgtgtgttaaatttgtgcataaacaacaaacaaattttgatgtcttaaacagttttaaagaattatacctgtcataatagagtgaagatcttatttcaaggatattgttcttattagttgttacattaatcacttctacagaaattgctgcaagggaaacgatagagcaggtt

SEQ ID NO: 24857 - DNA, 841 bp, Glycine max
  Intron number 2 from transcript Glyma13g37630.1 (locus Gly ma13g37630) derived from phytozome v7.0 (chr-ID Gm13; pos 38667974 to 38668814 reverse strand)
ggttctactctgcaaggttagtggtatcagtaaatattgtatggctttcggggtcttcgaatttgcttaacttgtatttatgctgtatcacaagtttgaaaacactcttattagcatttagaaagataaaagggtaatgtgtatatgcttaaaagggtgatgttagtagttgaataatattcacttaattgagagtgttagaaataatgcgcaacagagataaagaaagaataatgaacacacagatgtaacgcagaaaatccatgaccaaaaaaaaaaaaaacatggcagaagagaagcaaattcgctatatagaaaatttgtacaagaaaaataacggttgtaggattctaacataagcccaccacactcccaaacatgaccagtggtgagctctagttacctatcgacttgagactttgctaccaccatagactgccaataaaaaattgtagatattttttcaccaaattactcgcactgggagctttttgtgcagggccaagaatttgggtcaccagctctaatatagagttaatcttgtagattactattgtattatacatgggaaaatcaaataacttcttcaggtctatgcagaaatgaatttcttgaacctcattctgtttgaatgttggttaagaatcatgtcttcatgatatattcttcttagctccctggtttcaatttgtttggatatttccttgtccgtacatgattagttttaaaactactactttactcactgataaggtgattatagagctgtcaaccatctctgtaatttttatgtttgcatgtcagtgatcattaaaattatgtgcagttcccacttatctat

SEQ ID NO: 24858 - DNA, 496 bp, Glycine max
  Intron number 1 from transcript Glyma13g37630.1 (locus Gly ma13g37630) derived from phytozome v7.0 (chr-ID Gm13; pos 38669116 to 38669611 reverse strand)
cctctgtttcgtccccaggcttgaactgaaaacaggtattttaactaatttattgcaattctcattaatttcccctcctccctttcataatatcttgttcggttaagaaaactctaaatttccattttggatggatacgattttgtgattctactgcatctatgttggagattatcagattaccgttacctcgtaccatatccaccaagattagctgttatataggtttcttcacacttcacatctcttaattcatgtttaaaaatataaaataattgattaattaataatatttgagatgatgatttgtttttgttattggacttgtggtctaaaatggattgtgaccacatgttttaaggtaagtgatttttgttgtctcacttactcactccctccacataggttgtgattgtaatttgtaaagaaacatgctgaagtccatagtgggttgctgcaaggtgtacatatcagagagcagaaacagaactgcatt

SEQ ID NO: 24859 - DNA, 520 bp, Glycine max
  Intron number 4 from transcript Glyma13g19450.1 (locus Gly ma13g19450) derived from phytozome v7.0 (chr-ID Gm13; pos 22958144 to 22958663)
tatactgcaaaaggacgttggatatttccaacactgtaagagacttttttgtttctttcttagtttgtgctacgtagttttctttacaagccgttttcattgtccatggttttgtatggttaaacttctctataagcagttaagcacttataagaggagaaaataattagtcaaaataaattgagtttcttctataagttaaaatcaacttatgcatccacacttataaaagaaaataaaaagttaaaataaattaaatttcttctataagctaaaatcaacttatacatctcagattttgctgaagttaggtgagaggggttgtataaatgtatagtgatttctttgattctctctttctgcttgtttgatcgggtttgtgtcagggaatgggtgtttgctcatccttcagttaagattcctatagcataacgtgttttcattgaagtcaatagttcttgcttggttgctcgctaattaatcagttttgtaacatttcaggcacgtgctgtgttaacta

SEQ ID NO: 24860 - DNA, 497 bp, Glycine max
  Intron number 1 from transcript Glyma16g34310.1 (locus Gly ma16g34310) derived from phytozome v7.0 (chr-ID Gm16; pos 36957510 to 36958006)
ggaattagcaggttttcttcttccctttaacaacccttcaattcttccaaatactttgtttctcatatttgtcattcatccatttatttacctatattggcttgcacattcacatttttttctctcacatagaaacacattcaaacagaataattttcattttccaatatcatgctagaaattgtgttttccatttatggagttataatatattaagtgccacattaggataggtaatctatatggaaaaactctagccccccaaaatgggaccaaactagctacatctttggtggaccatgtatgtgctttatttactattttcgttttcatcatatatattactattattttgatgtactatatatattaactacattattttcaattaggcaaagttgtttgactaattggcagattttggtggaacatttttttgattgtttaattttgcatggttagagaaatcatttttgccaagtagagacccagagtgg

SEQ ID NO: 24861 - DNA, 671 bp, Glycine max
  Intron number 1 from transcript Glyma16g26360.1 (locus Gly ma16g26360) derived from phytozome v7.0 (chr-ID Gm16; pos 30497516 to 30498186)
gcattggccaaccttattagtatgtttttctgaaacttttttttctctcatgcccatgttgaaaagtctctatcctcttatttcaattctttgggtgtaatttatatatttgttgaataattttacttaatgttaattgattttaagatgaaatatgatatgatattaaaaaaatttcatctttagttggtcttaaaatgactttcttttcatttctcatactaaattttaatggatgataggttgaaaaaaattaaattttaattttgaaatcagtataattaaatgtggtcacctaacttttttattttgcgtgaattaatttttttttctcattcaaaatttgttagataacttccctgtgaattgattttaaaatgaagtctaatgctctctacttgcgacttattacaaaagttaacaactgtatcaaagacatgattggataacaatataaatctttaggtggaatctaattaaattcttatttttgatttggtgcagttatggtgataaaattttgtagttttgatacagatgaaataacatagaaacagctttctcccaacacccacaccctcttccaaaagctgctattttctttgtagacttgagtcgtttgggtattatgtgcagaacatagtgctgaccgagttgaatttttgaagctc

SEQ ID NO: 24862 - DNA, 286 bp, Glycine max
  Intron number 1 from transcript Glyma16g07540.1 (locus Gly ma16g07540) derived from phytozome v7.0 (chr-ID Gm16; pos 6832971 to 6833256)
ataaaggaagtcccatcgtcactctatacaagaaggtttgttactgatcgaggaggcatcttatactcatttttttttgaattttttttctattaattaaattaactaaattggtattatatattcttaatttttgttttttatcagcaaatattaattattaattttattagttttttttagtaaaaaaaaaattgaatctataacctctctttttccttcttcctttatctatcaaatcaatcttataattatttggtattcttaatttttgtttatatgtaga

SEQ ID NO: 24863 - DNA, 875 bp, Glycine max
  Intron number 1 from transcript Glyma15g10360.1 (locus Gly ma15g10360) derived from phytozome v7.0 (chr-ID Gm15; pos 7504765 to 7505639)
tcctcagtctcaccaccccagcagggttaattcaggtctgcctcctaattttggcaactttctttctcaaacttctcatgccctctttgattggatgatggcttccttggcttggtttcaattgtcctcaattcccccttttctgtactttttcttggtttttctggccatgtttttcaatccaagttgttggctgctttgatctggttcatctgaggctgtgcttgtactggtgcagccagtgaagtgatttgatgggtagttgatgtgttttagcttctcttaattgaattgtgttcctactaagggctcctagtaacatctttggggatctgtccttgcctttggatatgacaagtacatcacattgtttcataacgttttccatttatttttttgacagttctgggatgcagggtccaatccaattgctgcattttctgtagattcttcaatgtagtagtcttgtagataatttattgattttaaccaagatgatttgtgcagaatgcccttatctaattaaacatttagttcattcagaagataggtactgaaaattttacaatccggcctggaatttgtgttgccggacaattggaattgttaaaactacttgaatcacattctaactgacaacggggtgtgatatatgatttaacaatgaaaatcttgtcattgagcaatttaaaccaacatagctcaagctgtgttaaagtattacgtgtaattatgtatcaacgttgtgatatcaccttctgtacatatttttgttctctagtttatcagatatgtttctctttagctttgactccttcttgtctttgattatccatttagataaatcaaaatcacgaagtggcgcagatactaag

SEQ ID NO: 24864 - DNA, 689 bp, Glycine max
  Intron number 2 from transcript Glyma14g13940.1 (locus Gly ma14g13940) derived from phytozome v7.0 (chr-ID Gm14; pos 13572490 to 13573178)
atgtacctctttctacttaaaaagtgacttgaaagaaggggaggagagagatagaacatgggaggagagagagggtggggaacaaggaaacagaaaaaagctaggttttatttagggatgattaatgttcacccatttttgggtgggttggagtggaaagagaagatacataggaagggaaagtgagtatacatttctctgttttctttctaaaataatttcactgaacattcctatgagtgctattttttccctttatttttataaaaaataagctgcataatgttttaataatttttcagaaaatgaatttggattggctcctcctaaattcctttaaaggagaagagaagtccagaaaaagctgggttaaattttacttgacaaaataattctaaacccccctgtaaggctctaacatcttcgtgcaaatcatcctgcatactagatacagaaactattgaatgcatattattttcttaaaagatattagatagcttttccaattcgtttaattattatcttgtagggaattatgaggattaacaatagaatataacattactgggttaatgttacacaaagtaatatgctttcaaatgatcactgcattgacaacgtctactactcttttgattaaggtttttgagtactttgcatctgatcgtagttcagaaggagaagttctg

SEQ ID NO: 24865 - DNA, 740 bp, Glycine max
  Intron number 1 from transcript Glyma13g35620.1 (locus Gly ma13g35620) derived from phytozome v7.0 (chr-ID Gm13; pos 37043192 to 37043931 reverse strand)
ccaaacttctcaccattgatagtgattactggcacgtaagtcaaaacgctcaacgaagatcaatgcttatcttatcttcaattgaatttgtattattctcagaaaacatagttaatggtttttttttaactttttactgacaaaacttacttacagttatataggcactgtttgtgctattctccgatcagagttgaagttttatttcagtcatccacgtaataaagatttgtatgaaaggattatgcagattatcaaggggaaacttagtgagaatgtttattatgttgtctgtactatatagttaataggtaattcagttctgattggagaacaacacaaacaatatcttttgaattgtatctaagttttgtcttttagattaaggctctgtttggatagattcctctgcgagtacttataggtgaaggaaataagaaaataaaatctgttttttccataagctataatcaatttatgcacctcaacttttagaaaatttagatgagggagcatgtatgaaatttaagtgcattagttgattttagctttttggataagctcaattcattttatctttttattttcttatcctatatgtgtttatgaacaattttatccaaacaagacagaactcaatactcgggttgaaatttgtttaattatttattttgtagagagttgaggacttgaggtttactttatttgctatggtttgtgattttcaataccatacaggg

SEQ ID NO: 24866 - DNA, 1011 bp, Glycine max
  Intron number 1 from transcript Glyma14g39310.1 (locus Gly ma14g39310) derived from phytozome v7.0 (chr-ID Gm14; pos 48431765 to 48432775 reverse strand)
ttcccaccccttctgcgatcactgccgctgcgtaggttcgtttccgatttcgccttgttgggttcggtttggtttggttgctgattcttgaaatggggtttgctcaagtttgggtttttagtttgatttttgaaatgcgtgtgattgcattttgttgcgtgtttctgaaaaggtttttttttttttttacgtgttttgtggtttgttttcgtcgtgattgagttatatctgtttcgggtgccaatgtggatcgtgatttttacatggatggtgatgtgggctgtttccaatttaggatttttttttctatcgtagggtagacttagctgatgtttgttgagaagggtcgcttagtggtttgggttgtttgagaaaatgtttattttaatttttggttatcattttgagttacaaaacggatacttttttttatttaatttatggtttttaagagtttggaaaggaaaaacacttttcattgatttctgattattgtttggtatagactatagagacttttgaaaatagaaacaatgtgacattttgtgattaaaaatgaaaacagaagcattttcttctgacaagttttccaaaatgttgatttactctgaaaacgtttggtacgaagtttgatgattttgatcacttctgattctgcttgggttttagaaactgaataggtatagggttattatcgatactgatactaatatgtggctttgtttgtacaggaacaactcttctcatttgatcagatgattgtttgatacagacttttgaaaatagaaacagtgaatatttgaattctgtgattagaaatgaaaacagaaacatttttttatgactagttttccaaaaatattgattttttataaaaaagggttggtagaatgtttgatgattttgaatttttggataatgggttactattgatgccgatattaatatttggctttttatggtcaataattgataggttggagtggacattttgtaccaaagagaaggtat

SEQ ID NO: 24867 - DNA, 681 bp, Glycine max
  Intron number 2 from transcript Glyma13g17380.1 (locus Gly ma13g17380) derived from phytozome v7.0 (chr-ID Gm13; pos 21140132 to 21140812)
acagctccagtaagttaattatgttactttattatcatttagtgtagtctgtctcttgcaaatgaattccaattaggctgaattatcatgtcaatgttccagtgtgtcaccatcatcaataatatagattaagccaaaaaagcttatgaaatgcaatttttttaaaatagttttagaacggtataggtgtggttttgtgagcatgaattatttggatggggagtgaggtcttatcaactaagattagtttcatgccaaaggccatcaagatcaccctaacctgttattgtgttttatgtccatttagcatcttaattgacccaaattatttttgtttgctttcaccattatcataatgcttataaatgaatttgcactttaccatggtagagggggagaaaaagagaggaagaatatttgtcttgttgtttgttcttttcacctttttccaataataataattctacaccatttttattataccattcctacacaggaacaataaaacaagaaaacaacactcattaattcaaaggcattctttccatttttctttttacaaaacaagtgtgaaaaatgatgtgcaatgtggtattagtaaccctttactttttaactaactttcagactcttggtggaattgcagctgaaaatacaggaactgtggaagaataactaatt

SEQ ID NO: 24868 - DNA, 887 bp, Glycine max
  Intron number 3 from transcript Glyma14g30490.2 (locus Gly ma14g30490) derived from phytozome v7.0 (chr-ID Gm14; pos 37230601 to 37231487 reverse strand)
tcttacacttggtaagtgattgcatgtgtgccttagctatatatgctgaaattgtcatcatgtgtggatgctggttgtttagttttgttattaggtttttctttgtcaggctatggaaaaattgttgacatgtatgtaaatgaatcagcaggccaatgtcaaggcaatatctttgatggcagcaatctagcttagtgctatgggagaaagagcacattgtgtttgtctcctttctccttcccttaacgctgcctctttcttcctattctgcccttgactcttaccatggttgtagtttaggatgttgcaattcttttttcatttgtgcatctatgtttcatatctgtgttggcattttgcttgtactgtgtttggatttagattttgtctctgctttttaaagtttttttatttagtgtatcactattgtttggttgtgttgtataccttttggggtcttatttgaagtaggttaatccccttctgaacatggcaatcatatgctgagttttcagagcttatgtttgaatacaagtgggaaagaaaataaaaccattaccttcaaaatcttaaatattaatgttatttatttcagttatatattttagcagttattcagttaaggaaaattatctaattgaattcactcagttaaactatctccttttacccccctttaagcctgcttccaattttttgtatactgaattatctttgaaattgtatatttgttaatgctccctgttctctacattataccatagatgacaccagacattgttcatttcctgttcaattagtaagattcatgttgttaaatatcattctgaaagttattgtacacttatgtaggtcttttcagcctttgggtttgtgcataagattac

SEQ ID NO: 24869 - DNA, 608 bp, Glycine max
  Intron number 2 from transcript Glyma13g09660.1 (locus Gly ma13g09660) derived from phytozome v7.0 (chr-ID Gm13; pos 11221621 to 11222228 reverse strand)
aggttggttaaatttatgggcttttgctatatagctcctattttctgtttgatttcgatttgtccaaaggaaaatgacctacttcatcttttgctaaaaatatgctgaggaacatgaactatgaattctgagtggatctaaatttgggtcgtaccttctccctatgcatgtgtgagtattatattattttttattgttttgaaaaagagaagcaggaactacaagaaatgcaacatctatgaacagatctggcaataaaacgctactcacttgcttattttccttgcaaaaaatatgaaacaactgaacacaacaagtaggaatgaaagattttgttttatatatataaaagaagaaaataacgtctttcatacttgatggatctctctattgactgacattaaaacaagcatagagagtcagatctactccaaatagctctttctttttgaggatttcttgcttttaaacatcgtaccctccaatattctattttctatgtgtttttttttattttaagaaaagacaattatgtgtgttagggtttgtaacagtgaatgttgttgaactcagaacctaaacggcgaaattgagagactcaagaaaga

SEQ ID NO: 24870 - DNA, 460 bp, Glycine max
  Intron number 1 from transcript Glyma13g09660.1 (locus Gly ma13g09660) derived from phytozome v7.0 (chr-ID Gm13; pos 11222259 to 11222718 reverse strand)
actacatcagcccttctaccacgtaaggatcttgatttttttgtattttcatcttcttttgtgtttctcctctcaagttttttcttcttaagaatttgtattcttgattagttcataaagggaaattttatcaagagggtatggccaagtgcaagaaaaatagtactatttgattgatctacaaattaaaacttttcattattatttttttttttgtttcccggattttgatcttttgttggtgaaggttgattcacattaaaaaaacaaaaaaaactattcctgattaattcataactggcagttttatcaagagggtatgaccaagtgcaagaaaatagtactatttgattgatctacaaattgaaactcttatttttatttttatttttgtttattagaatttgagctttttgttggtgaaggttgattgacatattggagaggtaccacaagacct

SEQ ID NO: 24871 - DNA, 373 bp, Glycine max
  Intron number 1 from transcript Glyma16g24200.1 (locus Gly ma16g24200) derived from phytozome v7.0 (chr-ID Gm16; pos 27991529 to 27991901 reverse strand)
ggatctccaaggtatgcacacataattaaacatatattaatttacgtatagtactacgaagtatgcataatatatatgcttcatgtttacttcaatttattctaaaagaaattatcttctagttgtatcagctttagtatgttttaaaagaaattaaacaattactaccatgtatagcttcttcactcctttccaaatcaaattagggttttgagtgtaaaattgataatatagacttttgttaaagaaatatggtcaagctagatcttaattagtttatggtttttatttcttttaaatttggagatgcatggttgtgaatgatttgagttttgcagagacatacaggattgggtacgaggagcagaacgag

SEQ ID NO: 24872 - DNA, 687 bp, Glycine max
  Intron number 2 from transcript Glyma14g04180.1 (locus Gly ma14g04180) derived from phytozome v7.0 (chr-ID Gm14; pos 2809970 to 2810656)
aggtatgttaatctatatatcctgttttcccctttctctagaaaatgacaaggtattggtatgcaactatgcatatcagcatataagtgcaggtgaatgaattgaatgcatttgcatgtacaatcattaatcataaataacaaaatgtcatcttttttatttgttgttgtatatgcatatatatgtttataaggtaaactgcatggaagtttcttttaaacgctggtggcaatatcttcctctatcccaggcttcacagtctgagtggaactttagataccgaaacaatcattccctactagacatatgagtgttgttacattgctttggggagcttgctttgaattaacatatatggccattgccaatgcatgtcttgcatattttcaatataatagaaatgcttcagaatcaagtattgtaaaacttaatctccacttagttggaaagctgagaatagatttagtgaacaatttcttgtcttaaattttctatatatatgcaagaaagtttttatctgaagtcgttgctgtgcttccctaaactaactcttagtaatgtgactgagcaggtcaatctattttctttatcttcttgtataagttgtatttggttgtgccataacttatgtctattatctttttctcttcaggattgaagaattgtagcaggttattactagctatt

SEQ ID NO: 24873 - DNA, 987 bp, Glycine max
  Intron number 1 from transcript Glyma15g42330.1 (locus Gly ma15g42330) derived from phytozome v7.0 (chr-ID Gm15; pos 49732205 to 49733191)
agtagaggctagcaataaaagagttggttatctctgtaagttgctgttttgtgcgtgtgtactttgtatggtgtatgttatttcacaagtttggttagataactgcagaataaatttaggttttataaggatttgcaaaattcgaagtcctatattctttagaaactatgattttagaagattcaacatgttgctaataatcattgacaaaggaaaacaaatattgttctaagctctcattgatgaattgactaatcagattcttggtttgattggaaatgttctcaatcccaagggtaaaaatggtcaagtactaaagatcattgaaaaatttatagtttagggggtggggagtttcctgttatgttccagaccagtctttgcatgaatcatgaatgcttaattttatttgtaaaatactagagttcgttgtgtttttcttaattctttaaaatttattactggtaccaaatgttttttttttcctgtagaaaatcatgtaggtgagagagaatgagagaaaactaactaactcttatgccgagtcagcaatgactcagctgtatctactatatactattatttccgaatagaacttgtaccaaatgttaatgattggtaatttctggttctttaacaactcaaagaatcaaaactacttgatatctgaacttcattgcttctttcctttatattggttaagtcatctggtaaatgctctttatatagctcttaatttgtcacttctattaaattattgggtgtttgtaaccaaaaaaaattactgtgtgtttacttcctttgtatccgaaactactctgttgcaatttctttttgttatttttaccttgtcactcttttttttattattctatttggatattatgttagcctcatagaatggcacaacaatgagatactttctgaactttgatatgaatgttttttatctaaagctcatgtctttattgtcattaggtcggtttt

SEQ ID NO: 24874 - DNA, 856 bp, Glycine max
  Intron number 2 from transcript Glyma13g06570.1 (locus Gly ma13g06570) derived from phytozome v7.0 (chr-ID Gm13; pos 6768541 to 6769396 reverse strand)
cggcttgttccttgttctccataatgtgatagcagacagttgtgtagctgtaaatgaatggatccagtatctgactgcacatacggctatggacgatatttttccctgtgtggacaatgccactgcacaagaaacattgtcacgaagcaaagaagtaacttctgaactagtaaatttgatcaaacaggttatctccaatgtttccaacttaaatttcgcctccaatttcactacactatactacaatcaatctagcgcaggtgtgtagtctctaagattcctcaaacttttactttcgttgttttgttagcattttcaagtgttagagggaaggagaaaagattggagtctcaatttcacggttaccgtacaaggggcatttctccctctacatacagcattttgcaaatcccaacaaatggaaatgtgtgcaaatgggtttcaaaggttaacgagtccaaaatcctagtcttacttggacaagtttagatgtatgcggggaaagagaaggttttaggagagaaataaggaaaaacgaatttgagaagaaaagaagttaggatactttcaacctattatttactctatttttctttattttattattttataaaaaaaacaaactctatcttaccctttcattaaataaataaccaattaaaatatctctttattttttaaaatatcattttactttatttattttttaatactataaaactgttattttaattaacaaaaactattttttctcatttatataatttctaaaaaaatctattaatttttttaaaaaaattctttttatttatttttttaaaaaaatgggatgttagaactggcacccgtatattat

SEQ ID NO: 24875 - DNA, 1011 bp, Glycine max
  Intron number 2 from transcript Glyma17g04510.1 (locus Gly ma17g04510) derived from phytozome v7.0 (chr-ID Gm17; pos 3004924 to 3005934)
tactactactaccacttttttttttatctgcagaggttaatggttagtttattagtaggaaggatccaacctcttttcttctttttttaaccgctcaatccaccttatatgcttatatctcctgctactacttactaaccactcttttcaacaaaactcttttcatcttcattctaaatgttactagtacattagcttaaaggatagatcattgatgtttgttttttatataattaaaattattaatggttaatgtgtaattgttgacactttcttttaaaaatatactgaaattcaatttagatatagtgataaacgtagggtagattgagagagataaaataatcaatggatcaaatgtacttataaagataaaaaaaaaaatgaaattttttggctagttatgggttagtgtgtataatacatttctaaataaaagaaaaagaaagaacattggtaatgtgtgattgagagtaagtgtggaaacttatttttaaattatttattctaatttataacatgggattatatttaatttaattaattttaaatcatatagtatttccctaattttgagcatctctaatacaaaaactcaatttgggttcttaactgtcttttagtgtcctctcaaaaaaaaaaaaaaaccctctttcagtctgtcccttgttgtcgtgtatagaatttaataatactcactaatttttacttcaatgatagaattccactttagcttttattttacgtctccacttacacaagaattctcatttttactttaaaaattgtttttaatgcttaagcaaccttgctgctcatataaacaacttccttaagaactctttatttgttccgaagatactctaaaattgtttaattttaagacccaatataagcaattacatctgagttgctcttatagttctgttgttcctttttggttgtcttgtatgggacattttattattttcgttgccgtttattgtttgtttatagtaaatctgaatggag

SEQ ID NO: 24876 - DNA, 788 bp, Glycine max
  Intron number 4 from transcript Glyma13g10860.1 (locus Gly ma13g10860) derived from phytozome v7.0 (chr-ID Gm13; pos 13179056 to 13179843)
ctttgggatcagagattggtaaatcttcataatatacggaatctatattactttcgtctaggtatcccttttaaatttcttgatcaagagtatgagatctgaaacagtgaggtgttttggcaagcaaggtttttttaatatcagttgctgaaccatacataaagttagcaatgtgaaggagttccttcagatactccgtagaggaaggaaaagagaggagttataacttaatttcaagtactttgcagttgaagcaaaagtatgagtgggattctcaagaaagtggccatgcttatatctgtcaaatttcttcatatttttgtcccttgtttaatgaagaatactttttatgaaccttttctttttctagttcttgtttgtttgggtgaaaactcagcattttacatggtggaattgttatgaactttgaatttattctgttccatttctttattctttacttttgttttatgttctgtcactgtagtggtgtacctcattgagcatttcttgcatacatggatgttgtcgattcctcttttcctcaatatgttcatataaaagatggggacaaattatactttcttccttttagttttaatatgttgaaagccattgtatgtgcattcccaagaggatttatttcttttgactatttgaacatgacttatgcttcaaaggaaaattgaaactgtatattttttttttgatgaatagtatacaggggaattacatatactatatactagttctaacctagtattttctcaccgcttcatttccagtca

SEQ ID NO: 24877 - DNA, 583 bp, Glycine max
  Intron number 3 from transcript Glyma15g17640.2 (locus Gly ma15g17640) derived from phytozome v7.0 (chr-ID Gm15; pos 14042504 to 14043086 reverse strand)
taatcttaaaggtaagccatattttgaaagtgattattcattcatacaatgttagcctcatgttggtatattctgtttcaggatgtttctatttctgtttattattgcattgcaatgacttcgtaattaaaagcaattgttgttcccagaatgacaaaaatcacaatattggtatgcaagggcatgtggatcaagttctgtcttcatttttctttggaaaacattcattatggagcttctaaacatctttcagttttgatgcaccgtgtattctcaaaataataaagttgatgcatgtatttatgaaatatattattttctcttaatcatattgagcatgagtcagttaagacactgttgacctctttcccatgagctttgttttcccttgctgatattgtatgaggtttttgattcaaatctcaagattttcctcaatagaacttatattggctaggtttacattaagttacttgtgcatactgcattgcatatgaaacaaagtttttcgctagtatgaatattatcttatttttgatcctttgtttctagacaactgcatcaaaaagtggtgctctgcgcc

SEQ ID NO: 24878 - DNA, 585 bp, Glycine max
  Intron number 1 from transcript Glyma14g05590.1 (locus Gly ma14g05590) derived from phytozome v7.0 (chr-ID Gm14; pos 4017518 to 4018102 reverse strand)
ttaagatctctgacagaggtagagcagaagttcaggtatgaaatttttcctttattttgtttgtgtatataaagagagaagatttaattagaatgcaatttcaaagttattttacactgtcctccaattaaagattgtcagtaagtttgttgatttttataataattattttaaaagtcaattcaagatggtttctgattagttcacaatggcatgcatgtgttgcttgttgtttgttgtttgattggaacttataagtgttgcttgttgtttcattggaatttgtatcttaacttgtttaatttatgttgtggattttggtatctaacgatgttaacttgtttaattataaataaactgcgctatgggctatggcattcagtatggaatttgtatgtggtattgttgttttacttattttatggaaagttcatattcttatattggtatatgattattcttgtttgtatgggatgaaaatgatgttttttttttactattatttctgtttatatctgttcatcttcttcacaactgtaatcagaaaggaatttgattagtgctactgctggaaaggttgaaggc

SEQ ID NO: 24879 - DNA, 777 bp, Glycine max
  Intron number 1 from transcript Glyma15g04690.2 (locus Gly ma15g04690) derived from phytozome v7.0 (chr-ID Gm15; pos 3253461 to 3254237)
gtgtcttgcaggtttcattttctttagttcattcatttacttgtcgcatctatctcttcatttgtcataacagtgctaggatctctttatttttttcttcaatctcgttattattattgttattatagaaatgcagattctggggggcactgtggtagttcaaaaccgagtgaaattagtgatctctaatcgtttctgcacatttccttcactgggtctaactcttcttaatgagtcaaatcttgagcttttaacaatggctgcaattaacttagtaaatatactcttggtttgataaattagaataccattgctaggcatccctggacaatacgttgttgtacataaaaagagacgggggggggggggggggggggggggggggaaaaaaataaaaaaaaaaacccccccccgggggaaaagggtttttttgttgtaaaaaaaaaaaaaaaaagggggggggaaaaaccctgggggggggggggaggaatagtattaacaacaaacgttcacctagtgagataaggcttttgttgttgtacaagcaacaaacatgatcgggttgctaatactcttggttggagtagtcatacttagtaatttgatgcttattttgctgtataatttgcatacaaggtacgagtgggttcatacaaattagaccaggatttctttcttttgaatggatagttcatagtagtatcaaagttctgtcagagtccaacatttatccaggaatttacattagaaatttctttcttgcaacaggaaaagatc

SEQ ID NO: 24880 - DNA, 784 bp, Glycine max
  Intron number 5 from transcript Glyma14g22250.2 (locus Gly ma14g22250) derived from phytozome v7.0 (chr-ID Gm14; pos 26410343 to 26411126)
gtggtatcaaagcagttgtctgacaccatttcaaggcatattataatcttcgctgtcactttgttaggttcaattatttcagatgatgcaagaaactaatctatcaaagtcacttcacctacctttggtgaataaaaagggaattttatgtttggttcttagatatcaagataaaatttgtttgtgatttatttctttgaattcttccaaagccacttcaccctccttttcctagagtatgttttatactcaatgcaaatgtcccctttttgaatgaggatgctcatcttttgatatattcttactgtaatgtacatagaattatgaatgctaattgtgatcatgtatgaacatttaactgaaagtatgccgtttaaagtggttggcagattagacaagatttcccccctctatttaaaatcttttcaatggttttccccacctgttgtctttatggacttgtatttgtatcatttagttgtatgttagggatgggatgatttttttagtgaaaagcaagatggataaaattgtattgaagtatatattctctaatataattttcttagaataattgatataaaatgatggattatcatgaaaccttctaacaaaaactgaagactttaccctcccttccctgcccctccatccaaacatacagggtctttgtcaaccttcatggtgatcgataatctggattacttgtttgatctgtaaaattggactccagtagatattaacctttttttttccgacctatacttgtttttgcagttctaga

SEQ ID NO: 24881 - DNA, 468 bp, Glycine max
  Intron number 4 from transcript Glyma14g21540.1 (locus Gly ma14g21540) derived from phytozome v7.0 (chr-ID Gm14; pos 25173632 to 25174099 reverse strand)
ccaaggtaatattttaggattggtgccatgtttactttacaacattttagctagagagcattatagtaacctctctctattgttgttggttttgatgcatgttatgtgacaactggcatgaaaaccgtataaaagttcacttgatctcttgatatgaaattggagcacaatcactatgctttttataaacaaatgtcttcagcatttaaagagatatgaaattggagcacaattgctatgcttcttataaacaggttgtcttgatattttaaaaataaaatctgaaatttgattccacggattaatctttacatgcttcagattatgtattaatttaatgataaatttttttgtcagatagtcctggcggtatgaagtacttttgatgatttattttactttttatgtaacaaaaatgaaaaattcttgtttttctgtttcaggttaacagtgttcggttgcctcgcc

SEQ ID NO: 24882 - DNA, 606 bp, Glycine max
  Intron number 1 from transcript Glyma13g16730.1 (locus Gly ma13g16730) derived from phytozome v7.0 (chr-ID Gm13; pos 20652490 to 20653095)
gtatgttttcaattcctttctcgtttcttctttccatccccacctctcaatctctctccttttggaatcaaatttggattttattttattattttggttgcagagttcgaattttgaatttcgcgtccaacttctttttgtgatgttttcgatcattttctacgctacccggtaatctatgcatcaacccatcatttccttgttcctttatgtgtgtgtatatatatatatatatatatatgaaattcattaatatgctatatttgattgcattttctttttctgggttatgttctgttccgtgacatttaaattaacgttatttattttgttttctggtttttagacaaaatataatgtcgaaaactgaaggtgggcaaaagagtgctgaagaggagaacgacgtgttattaaaagacgtcgaaaccataacaaagctttgtacagggagaaaagctcttccatgaattcatcatcttcaaaatctgagttaaatgatctcaaatcaaagcctaaagctagcaaagaagatactttgcgaaaggataagaagttcatgtagaattggaagccattgaaggcactttgcctcactcgcaataagag

SEQ ID NO: 24883 - DNA, 352 bp, Glycine max; identical to SEQ ID NO: 19197
  Intron number 1 from transcript Glyma17g00670.4 (locus Gly ma17g00670) derived from phytozome v7.0 (chr-ID Gm17; pos 350727 to 351078)

SEQ ID NO: 24884 - DNA, 620 bp, Glycine max
  Intron number 2 from transcript Glyma13g35410.1 (locus Gly ma13g35410) derived from phytozome v7.0 (chr-ID Gm13; pos 36833306 to 36833925 reverse strand)
ctacaacaagattatagacaatctgctgcttagaggtaaagtagcaatgtcaatgatcacttgggtcattatattacatagtgctactttgtttgacttctttcatggctaaagacatgaaataacttaagaagtaataactaaagctgttaagtgaaatctcataaatggtttaacattatatgaagagtctcaccaatattttctttaatattctcttcgaaactaaaaattatttagtggtcctagatcattatagtctccgtaaatattcacaggacacataatcaaatgttttatttctttttttgtatattgtaaaatttaaatgttatgtaaacataggtgtggatcattgacaagtgatggtccaaagtcacctaataatttttcattctcaacatactttttactattggttacatttatgtggtcgtactaatttctgaatgaaacccacatatagtctcactctcacatgtatttcacctaacagaagagagtgtgtcgttaacatttgtcatcttatatttaaacagcttgacattgtcctaagatgtacctaaatcttaacagtgtacttaatccagggattgagccatttgtgacaattcatcatc

SEQ ID NO: 24885 - DNA, 688 bp, Glycine max
  Intron number 2 from transcript Glyma15g34750.1 (locus Gly ma15g34750) derived from phytozome v7.0 (chr-ID Gm15; pos 39244212 to 39244899)
gtgctatttctgagattcagattgaccttgaaagtgtttgtttcatgaactcttatctttttcattgtcaactggctctatttgaattgatttagcccatggtgattgatacaatatgtcattatttaatgaaaacatttctctctatgagtgtgtgtgtctgtctaagactaataattaaaatcatgcattataaatatttagaaagccgtcaaagaaaaaggttggataagacccctactagtcattattataacagaataagcaaagaagcagggcatggcagattggcagttcattctctgtgattgtatcataaacttgtagctgataaaaatttgaggaaaatttcttcaggtcttttcattttagaagttgaaaattcaactggtccaggaatacaacaccacggcattatacatgaagtgtagcaattcctgcatgtcttgtgattttcagttatatttccagggtagtgcatactcacattattcattatatttctttccttatatcttgtactaaaaaatttgggtgctcatcacatcttacaaagtctgaatagttgagtactatttgttgttgatgcatgaatgcttaatttttaattgtaatataattagaaaaggaagttttgtgctattttctaacttgtttctgacggaattttaggctatccaaaggagta

SEQ ID NO: 24886 - DNA, 960 bp, Glycine max
  Intron number 2 from transcript Glyma14g06120.1 (locus Gly ma14g06120) derived from phytozome v7.0 (chr-ID Gm14; pos 4417403 to 4418362)
agcttgctgttaatttaggctttgacgggtggctggtaattaatttttccttttctgtttggtactattagagtttatataaatatctattgattcctttttttctcgtctaagttgataactgaatattgatttctgttcacatcacgatatccatcctatattaaagttatgagtttcagaatgagcataaacagtttaagatctttttggataaacagcttaagatcttattgaatagatacttttggtacttatgtatatataagttatttttataatcaaacaaaaaataaggttaaattgttttcatataagttattagttgttttcataaattatctctagagcttattgaaatcagctaaaagtaccttatgcacatatcataaaatattttcataagctttcccaaacaattacacaagtgcttatgtgactctctcttttgggttggactctcctcttttttttaagtcatgtcaatgaactgctaacttgcactaacaaagcagcaccaatgcacatatagtgccacatttattcttctagaatggttagtgcaggttctatgaaattgggatcgtaaaactgaagtggcatgaagagtttgtgttgcttaaatactacccaaaacagaaaaagaaataaatttggaagaaaataaaggaaattataatattgtgaaggaacacacaagggaaatttagtgtttatgctgtaaataaagcttgtaataactaaatttttaaaataagaattatctaaccattggaagttttgtgagtggccactgatatatacgtaatttagaaatttgacgttacgaagagaatcataataggatcatcaagcatatttatgctaaaaatagatacataattaatcataccttaaagcatgccatttttttttattcctttcaatgattcaaatagcagcactcaattgcagttgaat

SEQ ID NO: 24887 - DNA, 660 bp, Glycine max
  Intron number 1 from transcript Glyma14g05480.1 (locus Gly ma14g05480) derived from phytozome v7.0 (chr-ID Gm14; pos 3926539 to 3927198)
gaaactccatcaactctcctaccaacaacaaaactgtaacccctttttctccctctacatgattgtgtatccatgtgtttatatatgttcttcgttcttctatctcaatgttgtcctgtgttccgttgatgatcttgttctgaattttagtgaaatgtgaaattgggtgtgtaattggattctctgagctttttggtctcgtgggcacaaaatgaattgcctctttagttctggggtagtgttgttttagataaaattttgatctttatgagaagggggtggcagtttgattgtgcttagtgccaacttattgctgagtgctgactgggctatgaagagtagcaaggttcgattttgatgtcttgtgattccttgcattgtgtcatgctttcatgtcattgagagtctttcatttaaaagatggatgtatattttgaaaatgaaaaatttagatgcgcaaggttttttatgagctttgaggtgcttgactagagtttgtggtaaaaaaatgtttggtttcttgtttatcatcacaacaactctttctttgtggcataatttttttttcaatgttagtttttaattagttttaattatgtaacggggaatgatatgctccctccaggctgacgcaggagtcttacagttccagaatcagca

SEQ ID NO: 24888 - DNA, 430 bp, Glycine max
  Intron number 3 from transcript Glyma13g38260.1 (locus Gly ma13g38260) derived from phytozome v7.0 (chr-ID Gm13; pos 39089735 to 39090164)
ccatcgcccattttgttgtggagattcaaggtttttttgcattgctttaccttttagaaagtgttaggaactttgctttagttttaaaatttaaaatgataatgtatttcatgctttcattttaataaatgcaaaatttgttctgacttgatgatggaatgtaatgtttctttcattctggtggagctgctttctatttgattctgttggggagaaaaatgtggttaatttacattatttatttgagtacagacgatgacatttgtttaacttatttctgagtttcataatgagcagtaatatgatgttgacccaatcgtgtgcctcctgctgtttttattttctttttccttttactttctttcttcaagaatctaattgagatggatgtctaggtactattgttcttcatttggggcttcatctgttg

SEQ ID NO: 24889 - DNA, 416 bp, Glycine max
  Intron number 1 from transcript Glyma15g01100.1 (locus Gly ma15g01100) derived from phytozome v7.0 (chr-ID Gm15; pos 670115 to 670530 reverse strand)
taacaaacccaccttgcgctcttgcttgtattcaggtaaattcctttcatttttctctctctagaaactagaaactgtttgctaaaacaattaattctacactattcaacgattaatttcttatccaaaattcattagattttgattattgttttcaaaataactattacaaatgctctctctcttcttccttttttttttaaaaaaaaatcatgttattcaacatttctctcaattttacattatgttgtatgcgttatatgtaccattttttcatcaactgtttaaacaatcttatttagttgcatattgaaaactcaaaacagcagtttttaaaacacaccttccattctgactgcggtatggtttacttacatacagaggaaaagaaaagggagagaaagaagaagaaaaag

SEQ ID NO: 24890 - DNA, 603 bp, Glycine max
  Intron number 2 from transcript Glyma15g02410.1 (locus Gly ma15g02410) derived from phytozome v7.0 (chr-ID Gm15; pos 1624584 to 1625186 reverse strand)
agtttctacagtgcttggtggaggtcttgtaccaggttcagtccagtttcattattgacattgatatgcctgtgagactgcaactattgaaactactgatttgtattttgcttctcatgtttgcctggtcaaagatatcaatgcattgtttgacattatgcgtgtgcttcaaatcataaaatttagttatgcattagctgctaaaaccatatcaattacttctcaattttagttcacctgctatgattgtgtgaattaattacaactaatattgttgaagggtcatgcattgagatttttttccccttaactatgcttgtttgttttgtgggtcagattagttcaaaagagttactgcttttggtgattgatcttggtgaatgaatcactattgaaaccttatttctgtttccctcccttatgatcttgaatattgaattttcataaaaatgcttctagttgattgtctgataatgatatctttcttaattcaagttttcttgatgcttcagcaaaaattaaatttggttatccatggctaactttatcttcaattgtggttttgaaggttctttaactttagttggtggtgatcctggtatt

SEQ ID NO: 24891 - DNA, 583 bp, Glycine max
  Intron number 1 from transcript Glyma15g42820.1 (locus Gly ma15g42820) derived from phytozome v7.0 (chr-ID Gm15; pos 50254924 to 50255506 reverse strand)
tccaacaggtactcatttttgttttttttttttttatccttccaccaattctcgcttcgatctcttcgatttctcccgtgagcctcttttcgatttttcctttttttttgtctggttcgtatgttttggtgccggaaaacatacaggccgtgtgtcttgtgcttcttttttattttattttatttatcttttcattttactgattgtaaatgtttgtttattaaaaacaaaatgtgatcggttttctgttaagttgggtttgggatcgttggtctttgatatgtacaaggtggattttaaatttgaagtttaggtttttttttttttgttatggtaacgattcatttgaagtgacttgaaaattgtatgttggtatgctcgaatgtttgtaataatgaggattttgatttttgatgtatggactccttggatgttgttaatttttctattgagtttttgtggactctttcttcatttatttatcaattaatttaggggtctacttatttattggtttttttgtagactttttcttgattaatttatttgaaattaatgaattgtcttagggtttgcaagttct

SEQ ID NO: 24892 - DNA, 814 bp, Glycine max
  Intron number 1 from transcript Glyma16g07720.1 (locus Gly ma16g07720) derived from phytozome v7.0 (chr-ID Gm16; pos 6977392 to 6978205 reverse strand)
ccaatccaaagctttgctctgcaacaaatttcagtgtaaaactttctctcacatctcggcaataacatcacttactcaatctccgtctatttataattattattattgggaaaaatgtgtttgtatcctccatactttccctttcggcgagtgaatgtactctctaactataacttccaccaaaccttccttctctccctctattcaattccctctttgctttcaaattttaaatctacacgattttaggggaactcaactctcgcttcgttgttccagaatctcttcttctgcttttgatttgaacttgtggtggtagttagctatgaagcacacaccggacacaacaccgacacagaccctttgacacgactaatgtctagacagggggacaccgcatgcacaccgaaagagagattctaattaaatgaaatatggataatataataaaatatctaaatcaatcatatatttatttttttaaaatcggccttctatgttttttcatgtgtattagatgtgtgtgaaggtgacagcttaagttttctagccaaccaaaagtaatttttgaatcggataactaataagaagtgtcgaacaagtgtttaagtgggtcagtgttggaaacgacaacacttcgaaagagaggtgtttgtgcttcaagttatttttagaggttattgggatttgggattttagtaacttgatcttttttaatcccaatagttgtagttgaatacattggttaaactattgtattccatgatatgtctttgcagttcccacttttgcatctaggtgataaagaatttgt

SEQ ID NO: 24893 - DNA, 711 bp, Glycine max
  Intron number 2 from transcript Glyma15g10200.1 (locus Gly ma15g10200) derived from phytozome v7.0 (chr-ID Gm15; pos 7415126 to 7415836)
cttccttgctgtggacttagtctgggttggttcttgtgagtttgctttgtcttacttgctagtatttttatttttgaaagtgctttttttttaatccaatatatctccgccaagcttttagagattcattagtatttctttaaaggattgacatatctcaacattcttcatggacacacacttgaggttccaaaccctaagtacatgcataacaaacatgataatctatcaagcataccacgccatgttttgagagtgttaagggcaacgcaaatactgcaaagcttcaacctagctagctaaactataaatgccaagcttgtaatacacgtacgtggtttgctatttgattaaaatttgaagtggctttatctttgtattgctaatgactaaagtctacaatcgcatgcctaataacaattactaaactttaggggcgcctacttatttcattgtcctaagagctaaagttgtaagaagttttgccgtctttgtgtatgtttttggattaaccaaataattcaagcatacaaatttttagagatcagattaaaactggatcccaatgagcgtgaatgtgttggaggttcaatcctctaataaaacccccctccccgtttaggtgcttgctccttcgattatttgaaagcaaccgttattttctctgatgatattgatggttgcaactttatttgtatttcaaggtttata

SEQ ID NO: 24894 - DNA, 639 bp, Glycine max
  Intron number 2 from transcript Glyma14g02460.1 (locus Gly ma14g02460) derived from phytozome v7.0 (chr-ID Gm14; pos 1508362 to 1509000 reverse strand)
aagatcgagtgacatccttaaagttatccataaaggtgaactttgatgtatttaatgatttcttttcaacattatagtttgtatgagtgaaatcaccttttggctttttaaatgaaaaaagagacatttttgttttagttattccatttagctggagagagagatggaaacaattgtgaaggtggggggttgagagggtgtcgagtaaattgttgaagaaatattgggtgggctgattgaagaagctcttcatcagaaaagtgggagagacctgggataatccctttttctgggataatctattttcccctttatcagatagtgtagggattaacgagccctttaaaatggatatgccattttgtattttcttttccgcctgtactttctttactcttagtaatatttatatgccagaatacaaatgttgtttaatttggtttaacaagattttaaaatactagggacttagagagatgggcctacccatttaaaatataactcgtttttatacttagtttcggagtgggagtgaaatcatactgatttattttcatttcttgtctaagtttgtcttgattatgattgattacgagggtctgaaactgattattctgtttgcaggttgctaagcttctg

SEQ ID NO: 24895 - DNA, 936 bp, Glycine max
  Intron number 2 from transcript Glyma14g07340.1 (locus Gly ma14g07340) derived from phytozome v7.0 (chr-ID Gm14; pos 5566922 to 5567857)
tgattccggtatatttttgttatttactgaattatagtattatatatgtcaatgaaatgagtttgtcatttctggggtagattattgtaatatcatccacctgcacatggttaaatttgtaaataggatcttgttttttattatcatcattgtaattatagtaattaatactattaatctgcttaaagttactcttgagcctgacagattgttgtctttatgagcaaaggttgataatgtgatgaagacaattattttattttgcacattatatgcctttattaagtaacagttgcatgtgttgtatcaatgttgtttttttgaaagggtatttttgtatcaatgattcaatgtacctcatttcctctttgctatagtagctgactacccagtcttatgtcagcaataatagtgttaatctgtataattatttttcaagatagcttggtaattaataaaaattattcattcatatgtgctgcataatacacataaaggaacttctccttatggtctttttagaagtttgaagtagataaagtaaaacaattgtaaatgtatccttgtaaaatagagtgcggctgttgaaaccaaaagttgttgctacttttatagaggatatgcccgtataggaaaaaaaattaagtattaaaatttaaaaataccataaaaataaatgtagaaatttaatttcttttaaatattgaaataaataaaaagaaatccaccgtacatgtgattgtgcatattggggaggcctgtatgtaataatggcaagttgtgatcagttctgacaactggaatattcaaatctatattgtctttagcaaccttgtcttctagataatattagagttgcaaaaataggatcaaaataaaatcaaccaagtgtgttggagtgttgaacttatttgtttcggtatttccagtttgtag

SEQ ID NO: 24896 - DNA, 835 bp, Glycine max
  Intron number 1 from transcript Glyma13g39820.1 (locus Gly ma13g39820) derived from phytozome v7.0 (chr-ID Gm13; pos 40359799 to 40360633 reverse strand)
ctttgctagatcacaggtatgtaccatgttgtttcctctcaatttctttccttgtttcttttaactaaggtttgatctttttggccttcattaaagattgaagcttttgtggggttttgttttgttggttgctcagtttaacttggcaataacagcggagtcttcatttttttttcttaccctctttgtttatttgggtttttatgtttagtgtgttctgtgaagtttgttttttgttgtgctaaatggtaaacgagtaatgtcaaagagttgtatatggcaaagttgagagaaggggttatcttaatgggaaatctcgggtgcaaggtttgattttgaggttacttgtctcacttttcgtaggtaatagatatgggttttgtgtttatggagatgaggagtgaggaatagggcatgcctgcattctttgcatacctcaatctcccttttacttgttaaggttctgtcaatttttttctggaattttatcccattttgccttttctttctcctattgttcattttgccttgcatgattaatcattaattttatccctttttgcttcttggtttttgcctattgtttcattttgccttgcattattaatcattaatagtgagtttctatctatttcgtgaaaagatagtgacactttagttcattgcattgtccaggttgtcattgtggtgtctgcgttttgattcatatacgagacttgatgaaatttgtgatttggccttaattttgtaccttttatttatttttctttcttttttaatattgatttgggatttaaatggcaggttgttggttaatagtgttctgtgtcagaaa

SEQ ID NO: 24897 - DNA, 786 bp, Glycine max
  Intron number 2 from transcript Glyma15g01800.2 (locus Gly ma15g01800) derived from phytozome v7.0 (chr-ID Gm15; pos 1188305 to 1189090 reverse strand)
tcaagttattgcattagaacttggcgctggaactggtatgttgctaattaattactttcccttttttgtcatttcttcttacgttttgcaatcatttccttaagtcttcatttctgacttctaatgaactataattataagatgacaagtgccagggatatcctctttctctttttctaacacttcctcttagtatatgatgaggccagcataggatttcatccaataatatagtgttaaagatacggtgttgttaggacttaggcgttagcattcttctaatgagatagatatttcagcagcacagaaacacatatattaagagatttagggctagtttgaataaacttctaaacaaagagtaatatgagaaggaaataaaaatgaatcaaacttgcaagagtaaaaatcagcttatgcaccttaacttttttagaagttccctcatcttacttctatataaacacctaaatcaacctaacagagtttgtcattcttgcgatagaaaagtcttaacagcagcatgttacaatcgaaaagctatcataagtttgagactagttgttattgttacaaaaagaaaaacaattaatgtgttttcttattcaactgctgattgtttaataaaacactttgaggcactcctaataactgctttgatgtctatgaagaggaataataataaaatctgtatttgaagaacagcatgttatttatcaagaaatgtatttgatttcaagttttcaaccaggcttggtgggtttattacttgcacgtgttgcaaat

SEQ ID NO: 24898 - DNA, 896 bp, Glycine max
  Intron number 1 from transcript Glyma15g40440.1 (locus Gly ma15g40440) derived from phytozome v7.0 (chr-ID Gm15; pos 47429676 to 47430571 reverse strand)
tcacttgtttcctcgtccaccttctgacttctgaggtttgtttcattcatgttcctttctttctttctttctttcttttttattgttttttgggtaccctttgatctcgggtttgtggtatgttttgtttctcctatgtccttgggaaagttgcaatctttcttcctttttggtttgtgggaagtggtagttctgaacatttttttaagaagttcttttggttttttggggttgagttctggtttcttaatgttgtttctgccactggtgaatttagttcagtttttcattattgatcttctttgagctgtgaaaaagctgcacaaaattgaatttgtgtgaagatattaacatttggtccctaagtgtagtttgagatgcaaaggatagcacttagaggttagagcatgagaagttgtggaattgtcaaaagcacggttttcatttgaaatattgaactattaagtgttgagcaacaatatttgtgaaaattctgaattccgaggttgagatggatttataattcatatggttaatggaacgttattaaatgagtgaggatagaaggcatgatttgagttgataactgagagagaacgtttgtgcttttgatcaattttatcagtttgcatctttttttcatttttttatttgtgtcttacggtatggctttgagaacacttgtggcaaaacttgagttatcaattatgtatgtcagacctgctatggaaaactatgaatgtactttgttatgctcttgcaaggcctgagatttttgcattatcttttatcatcaattaattgtatgtactttccactttattgttcgtcaaaatgttaacacttttatgattcaaccaggtgatcttggaagtgatttcattagaagcaattga

SEQ ID NO: 24899 - DNA, 991 bp, Glycine max
  Intron number 1 from transcript Glyma13g11270.1 (locus Gly ma13g11270) derived from phytozome v7.0 (chr-ID Gm13; pos 13664484 to 13665474)
tgtgttctctgcggagggtgtctctgttgtcccaggtatgtaacaaatttccactttcaacctgaattgtttctatcaatttggtaatgttattctgtaagttatctcatgtgggcatgtgatttttccttgcaaatttgattaaacttaatctttctgggagtctcattcaaagggttaagttacaacgttgtgattccagttgctttgaatttctgagcaaaatttgttcatgtccaatggagtataggtttctctattgctttatacgatgttcttatgttttgtgttgggagtatatgaaactctaacttttgtatatgggttggggtactccatttaatgaatttcttttagctgataaaaaaaactgataaaactctaaccttttcctagttggctttaggattttctttttcttatttaagtttgatatatgacaacaaattgtgtctaacaaagtggctagtctataccggaagatatgctcacatttagtacttgaccgtgaaaagagcaagattggctccattgaaggatatctgtcagaaacgaaacaaaaagtttatatctgagatggagttcattacctttatgttttattggttggtttcctgtatgaagaacattttctttctttcaaccccaaaaattgtgttggccctgtttaactacacaacatcacatgtttgctgtcttactgattctcttaaacctggtgaagagaaagatatggcattggcacatggaggtgttgccaaattaattgaatttcatttatttcttgtttaccatctgaaattcttaacacttttctggaattttttcctgatccttcaacctcaatcgaccctctctttagtctcctttatgccttgttcttttgtgcttccatatatcttgatttttttttcttgtgttaagaactaactggacatttattgttctttttctttttgtattgatgtttttcaaggtaacatcatcttga

SEQ ID NO: 24900 - DNA, 662 bp, Glycine max
  Intron number 2 from transcript Glyma15g18610.1 (locus Gly ma15g18610) derived from phytozome v7.0 (chr-ID Gm15; pos 15512519 to 15513180)
ggtctcaacttcgacagagtgaagtaagtgtgactctttctatgtcaatttgggggtaatcaataggtgaccgttgctatcgtatattttaaacatttgcttttgttatcattgaattatatctaagtagatatttcgtccaagtgaaatgggttcggtctcttgaagtaaagtttcacttttgagttttgtggatagaaatgtggttgggaggggaggccccttaaaagtggtcagccagactccttcctttttgtttttttttttaatggaatatcggcaaatgttagtttcttagaatgttaatttttgtgagcagaggtgattgaacccacgatcttttccgtctttccttctctcttagccatccaacccaccttatatctaccggtcagccaggctccctagtggattggcaatgccggtggataatatggttaatgaaaagtaattgtaagattggaattaatttagttgtttatgaggaagatatgtaagtgtttctggttggatgatctgatactgttaattaatccctagggtcttctttgtgaatttaatgggacagagatgagaaacatctgctcatttttttctgatagtgttggtttctcttttgttctttaggtattggctttctgttggagctcagccttcggagc

SEQ ID NO: 24901 - DNA, 541 bp, Glycine max
  Intron number 1 from transcript Glyma13g06880.1 (locus Gly ma13g06880) derived from phytozome v7.0 (chr-ID Gm13; pos 7044230 to 7044770 reverse strand)
cacaaattatagtaatatattttactcctctcttagtttgtttttcgtacttatattaacacttgcactcaaacacaaaccatattcatgaggatttttttcttctaataatcatatatgcatttattttctcttccatatcatttccatctcattttttttttctcatatatcattttttaagtggaaagacaaggggaagatccaaaacatgcatgaagaaaatattaattatatggttaagtttaagattatcgggtgtccatgatctttgtcaaattttataagacacatagcaaagttttattcattttttagtaaattaaaaaaatttaactatatgtgtcacgtataaattggttgagaccatagatacatgatggacccgtatcatacaataattagtttctccaaaacaaattatttttaatccatttcatgtgttgtcaaaaaaaaaaagttccatttcatgcatgtttgaaaacataaaaatttgaaatcagcaattaaactgatcaaataaaactccttgtaggaattg

SEQ ID NO: 24902 - DNA, 684 bp, Glycine max
  Intron number 1 from transcript Glyma16g17670.1 (locus Gly ma16g17670) derived from phytozome v7.0 (chr-ID Gm16; pos 19255011 to 19255694 reverse strand)
ccataaataaatcaattataacagtaagtaaagcaaaccccttttgtcttcatcattgttttcttcctttaggactttcttaacccccgtggttcccagtgtaaagtacctaatgattcatacgattttatttagcttataaaaaaatttcaacttgcttgcactaatacagaatctgtgtctgttatgcaaaagaaaagaaaggaaatgtacttcagatttagtcacgaacacaagaaaatgggttagattttgttgggattttgaatataacaagttttccggttatagattgatctacctatcttcttcctccaagtttacagattttggctttggtggcagtttttctttggcttatttgattttctgatcaatcattgttaccgattttggcttgtctacatagttaatttgctccaagaaacttgatttgggtttttcctgaaaatgaaaaattgaagttgacacttgacactgaatattagtatttttacaaggtaatctgtagcagtagaattgggctgggatagcttgaataggaaactacttgctattaagactgatgactactacaagataccgaagcttttacccaaggtgttgttattggaagtttgaaggctgaatgtgcttttattcataacaggattagtttgtaggtttacgaggtggagattttta

SEQ ID NO: 24903 - DNA, 456 bp, Glycine max
  Intron number 1 from transcript Glyma13g05350.1 (locus Gly ma13g05350) derived from phytozome v7.0 (chr-ID Gm13; pos 5638578 to 5639033)
ggatcttccaagtaagaactcttattactcacactcattgtttcttagctttctcttcttttgttgttttgctttatgccacatagacaaatgttacttacaggatcagactaatttgcaaccaagtcttcctatttcactttagttttggtactcattttttaaatgtggtagattttgtcctggattaagtcaaaataaagtataggattaaggacaaaattcatcatatttaaaaaatacaagaaccaaaaccaccatttttaaaataaagggactaaaattaatattaaccaaatcttaagggacctaaaatatattttatccttttctttttctagagtgagtatcaaaggttcaaaacttcacaaatcttttccaagtttaacttggtttcaattttgtttttatgcacactaagagctggcaggtactggggagaaagagtggtatttc

SEQ ID NO: 24904 - DNA, 630 bp, Glycine max
  Intron number 3 from transcript Glyma15g18200.1 (locus Gly ma15g18200) derived from phytozome v7.0 (chr-ID Gm15; pos 14843794 to 14844423)
ggtaaggaaggtttgtgtcaaatgaaagtgttgggttgggtgcatatggccagctacttttgctgttcaaacatttcagtttttttttgggggggagtttaggttctctctcttgctctcacaatgaaaggatgtatattttttcctctttgtagggcaagagaaggctagatgaagatcaagcatcaaagatggtgtctcatggatttgtttcaaattttgggttttgaagctttgagaacttgacctctgtagattagggagagcatggaatttctaaattgattgtataatgagatactgaaaaccatacctcatgaaaactagtttggggctatggtgcaattcaatgctatttctaagtagttccccaattacattaatttatctgcaacaacttctcataacaaagaactttcactttgagttatcgagcaattctcctatttatcactttttctttttcttaaaaagaagtattatggattgtcttatttagtgcatcccattttttaaaatgcgtagacctctatattaattaacattcacttagagataatcacgtgaagatcatactgattgattgtattcactcagattgcaatgatgttcgagcaaggttttatgtag

SEQ ID NO: 24905 - DNA, 860 bp, Glycine max
  Intron number 2 from transcript Glyma16g33570.2 (locus Gly ma16g33570) derived from phytozome v7.0 (chr-ID Gm16; pos 36447258 to 36448117)
gttgcaaaggttagcgcattggttcaccatccgttctgtttttatatgtgtggacgttaatattaatataatatgtactttggtacccctttgcaagtgtactttatttttctgttcaaactaatctaatatatgatcctttgtgtaactaatccttataattaagggtttttaatttgtaatgtttgatggtattttggaattagctttcatgcatttgcgatatgcccaaaatacagtttctgtgattatttatgagactattctttgattgttgtatggactttgggatggctactttagaataagctttttagctgtggtgcacgatttggttactagcgttggtatggtacgggtactaggatttgacaaaatttctacattgatggtacggatatgggatggtatatcgtttagagaattctataagtataagaaaaaagtattaaaggctaatgtaaatacaatttgcataatgtcctgactaagataagcagaaaaatcaaacattgaacaaattttgaatgaagtagcagtttgcttcatttctagtaatggacagaacaactcagcatgaaacttggtgttatggatggactgatttgtacctaagtgaggaatctgtattgggtacgtaatagtatagttttgtaggtggtttctttaaacttcaccatccctgattaataagtgttgcaaagcagaattttgtaattcttctgtgttggttttctctcttggttatgtactgcctgtttttgctgttttcaactttcaagcaattttttgtgcaatttgagggattttgctgataacatgccccggcagggatattggcttcctgtattgggtggctg

SEQ ID NO: 24906 - DNA, 998 bp, Glycine max
  Intron number 1 from transcript Glyma13g38510.1 (locus Gly ma13g38510) derived from phytozome v7.0 (chr-ID Gm13; pos 39294418 to 39295415)
tatctcagtataataaggtgaattggggctatgtatgagttgttataaacttcctatagaaaaagaaaaattacactgataattggtaataatagacctacttttaacataatttttaacatatttataaactaaaatatttttaaaaaaataagggatcaaaataaatcttaaacaaataaccaacttattaagtataaaaatatcattaattacaagaagatacttttttagttattatcaagaaacatatcaatatatgatatacatgataataatatatattgtaagatattaatatgtaactattgcttaataaaatcagttgcaaaaacacaaatttttttggttattatcaagaaacatatcaatatatgataataatataaattcccattatcaagatacttttttaaaattagtattatcatttttaaatgaatgcataaaaatcaatgaatacatgaattcaaatacttattaaatacactatcaaaatccattatccttcccctaatacttgataatagatgtgcattataacaattttttttattaaatatttattaattaagctcttcatttctttttatttgtcttttaagatccaataaattttttgattctaataaaatagttgtttatttttctattttaccttttcttattctactgcatgtgtaaataaattacatatcaggtgaccagtaaggatatacttactgttaaaagaataactaatgtgattttgaaatttgcaagagacaaataaaataattatattaagatgagcacctattaattatattttataatggaaataaaataatggatacgtagacttttacctcccttttcccagaaagtatttcatattttgtacgtgggggagagggaccaatcttgtatgagcgttacgtgagaatcatatttcattataaaaggagcttgtgctcataccagattggcataatcagagatagaaaaaagagagagag

SEQ ID NO: 24907 - DNA, 1006 bp, Glycine max
  Intron number 3 from transcript Glyma13g34030.2 (locus Gly ma13g34030) derived from phytozome v7.0 (chr-ID Gm13; pos 35690779 to 35691784)
tgactgtaaacttcctggagacgactgcccgctgagtaagctactgataattttacatggcgatagacattgttattttacttgaatccatttgtcttggttaaatttcttgattgatcattgtgttttgggaattttccagtaaagtagtagtgaagtcaacaacacattgtgtaaatgtttgtgattttatttgttctcttatttgaaatgaatttgtgtggatagtggtcctattgtgaggccttaaggtagcgcctcaaaaaccgtttttaagtggttgatatcacaatatggaccttatttaactagccatcaacatggtgtgaatgaatcaatgaagtttccaagctttgtttaaaagttattttttggctctccacatgtaggacattgaatcaccctgtcttctctctctctctctctctcaattttctaattacctctaaattttatcacttgtagttccacatttataatgataatatgtaagttcaaagtctttacctaaaatatataagttccaagttctatagttcccctgctttgaatgtgttgtactgctgcaaagatactgttgttgctgacatatatggtgacttgttctaaacctttaaaagaatgctagctatgtattttggtaatactctttctaacactctagtattaggtgaaattcatgtgagtttcgtttgttatttaataagattcacacaaatttccctcaatggtagaggagtgtgtaagagtgttagtgtgttgctggtatttctggtttatgcccaaggagtctcactggattgagaacttcttaagaaagcagtaagatgacattataggatataaatttatgctccacacaacaacaaatgcttgaattaatatatcgataatctgtctttttcttggtaacaggatttgcttatcaaattgctggattctgtaaatcgttataccagaaatgagtaaaaacttatattcttctatttcttgcagtttggggtgt

SEQ ID NO: 24908 - DNA, 218 bp, Glycine max
  Intron number 3 from transcript Glyma13g29410.3 (locus Gly ma13g29410) derived from phytozome v7.0 (chr-ID Gm13; pos 32312336 to 32312553)
acaaacaagtactcagaaggattgccgggtaaaaggtaaaaatgtctctttgatttaagaaaatgtttttcatttccatatcttcaagatttagaaaacatgtttgttttggtatccagtttttgttcttggaaaatgagaatttagaaatgtgttgatttattcattttcaaatataattaaaatttcacaaaacctcattgtacatgtaaggtact

SEQ ID NO: 24909 - DNA, 831 bp, Glycine max
  Intron number 5 from transcript Glyma13g38770.1 (locus Gly ma13g38770) derived from phytozome v7.0 (chr-ID Gm13; pos 39506080 to 39506910 reverse strand)
tttgtgcagtgtcttcgtgcttaatagttttagcagtttgtctcactccatagacagagtcaaataaccatgttgcctgctgaacttaaagaaattcaagccttggacatagttatcattgatttttctgtttctgtggcaaaagaattctaccttttttttttaatgcttgaatttttagaatacgagtccattaattatttgagcaaattgtttttttttttacttgaagatatgccagattttatgcaagatagtcagaatttttgagtgtttgcaagattttgggaagctagtttgcaccttgtatagtcttgtcaataacttttggggacgcctaaacatacttttcatattagtgatggactttttttttgaaggtgcaagatcaagtaaacttactgccacatgaagaggtttcttgttaactagatttgcatctttagggatggatgatatgaatgagagggccagtggtgttaattattatcttttgcatcaattcttgaaataattttggtattcattcttctatcttagctgttatacaataaccattaggtatcattgtatcagtagctcactccacaacttcttaatgaaagctgctcacttgatcattaatatctaattatatgctaaatgagtcccccttgatggtgccatatgttatatctcatatatactacatgtaaacctggaacttaaaaacaactagcatattaatgattcataatttggtgcattggttcataattttaggtcatattactgtctttgttttattagcatatttatacttcctgtataggatttcaagtagttaattgc

SEQ ID NO: 24910 - DNA, 395 bp, Glycine max
  Intron number 1 from transcript Glyma13g28330.1 (locus Gly ma13g28330) derived from phytozome v7.0 (chr-ID Gm13; pos 31374322 to 31374716)
ttacctttgattgatacaaattttgcttcaatcgggtacgtctgaatcgttagatagtgttataactgttttttcttccgcgtctattggggatcttctgtctattcaggggctgccaataatattgaaaacataattttctttcatcacttttctgatctgtgactgtgtgtagagtattgatatgttattgaatgcatttgggtactttctattttctctccttttcatctgggtatgttcttaatgctgtgagcactgggtacatgtttcttggtagcttttgattattttttttttatttctcttatttttttctgttcgattattcattgattggttggttttctcaatctaaaggtttcaggaagtcatatattctaggctgcaatact

SEQ ID NO: 24911 - DNA, 669 bp, Glycine max
  Intron number 2 from transcript Glyma13g33080.1 (locus Gly ma13g33080) derived from phytozome v7.0 (chr-ID Gm13; pos 35045696 to 35046364)
gagcaaacccatttcggaattttcacggctttaaggttggtgcctatctttctctgcttaccttgcttcaatcgtgttggattcgcttactgtctgatcttacgttaattttcatgtctggggtgttcgttcctagctagtgtaattatctgaaaacttcaaagttccaatctttactttgtttctaagtttcgcagttaatttataaatattgatgtaacaaagataaatgaaaatggttataaaccttgaatctcccctaattattgaggaaaaggcgtatttaagggaggaaactgagggttctgaattctgatccctagctgatttgggttgcagatttgcagattcataatgcttaattgcatattgatattgcaatcttcccttgtttgataactccaaagtacctattctataaataagtctgcagctgtaattttctttctttgtaatttgtatgtatggaccctgatttgaatatttgtctagctagattacagtttctgctgctaattcttagaattcagaacagttaattatttgaattattcttattgtgacgaaacccattggaggctcctttatttattttttccccctcacgaggcttctataacttgctctaatgtttgcaggagaaatcaaggtttcactttaaaggcttca

SEQ ID NO: 24912 - DNA, 806 bp, Glycine max
  Intron number 1 from transcript Glyma15g06740.1 (locus Gly ma15g06740) derived from phytozome v7.0 (chr-ID Gm15; pos 4751402 to 4752207)
cgcgcacttcaactctctttcagcaaaaaaaattggtactttctgctgcatccatcatcatatattttttaattgtacacctttgttcattgtattggaatcccatcgtgtagatgactttgctttatttcactttttgtgtcatcatgtttccccaatgtggtgagatgaaacagacaacattgtttttattgtttagtgcattttagggacccaacgtttatgataatttgagtgctaccttctatgccctaaaacctctttgggattgggaatgttggattcaatttgaaatggagaaagcttttcttcagggtttttttcactcaataaaaaagactgaatggtgcttgtggttgtaaccacaagattttaggtcctttggataatattttgcattaatagggcctagggaactttgtaatgtctgtaatatttgaattcatttgtttacttcgtctttatgttttagtccctacacctagaaattgcttgttttagtccctattcatacacctttttaattctttgacagagattataattaaaaagtgtacacgtagggactaaagcaagtagtttttaggtatggggactgaaacgtaaagattgtgcatgtgtagggaccaaatgagcaataaaacctttcaatttttgctttttgctgcttatttggtgtcttgccccttcccaatacaaaacagctcagcatcctagagtcgtttcattaattgtttatgttattcattcaattaaagtctcattcctattgttctttcttttgtgtaatatgttcagtcactcaa

SEQ ID NO: 24913 - DNA, 973 bp, Glycine max
  Intron number 1 from transcript Glyma13g34830.1 (locus Gly ma13g34830) derived from phytozome v7.0 (chr-ID Gm13; pos 36361047 to 36362019 reverse strand)
ccctccgccgcagggctcaacgtgtcaaacaatcagtaaccacactcttctctcttgtttttttcttcattccaagattatctgaaagaaaaaaattatactttttgaaggttgttttgttattcataacataattgccacttgggtttcaatttgacttaggattatgtgccatgctaagtttctgtgtattttcgtttaaaaaaaactgtaaaaatgtcaattttgacttataaagtggttactgggaaaattaataacgtatcatatagtctatgatactattgtaaagtgcatttcaactaaattctagatgttggcgatcttagattgactagtgatatggccaaaatagtttatataggtgggaggcaatcctaacttcacaagttagcttttgggttgagtcaaagcctaacagagtctatcctaattgttgttgttgggctatcaggccgttattgaaccatcctacagttgttcaatcttacaaatttcatattcaagagatgtttagtcttcagtgtgagggaggtgttggagatctgatatgaccaaaatagtgtatacaagtggggggtaaccctcactccatgagttagttttttgagttgatttgggctcaagctcaaattctaagactagaaaaaaaaaattaaaggttatttgattgtgtataattgtcactatttgtgttttgctgcttttggcattttcaatttgtctgtaggataatgtgtgtagttacccttttctttataaatgttttggtgagaaatgatttcgaagaatggatttttggctttaaaaaatgaaattggatgtattgggttgattttgttgttatgctgttcacattaagttttgctgtgattttacttatttgtgctgttatgatgcagtctatgtattcattgaaataggttttgtggttttagcaattcaggtcttcaggagagaagtcaataaagga

SEQ ID NO: 24914 - DNA, 746 bp, Glycine max
  Intron number 1 from transcript Glyma13g22300.1 (locus Gly ma13g22300) derived from phytozome v7.0 (chr-ID Gm13; pos 25857164 to 25857909 reverse strand)
ctgtcattggccaaccttccaggaattatctttgggtatgccagcctatatatatctccattttacttctttttttatattattttttgtttgttagagggaggatttgaacccacccaaacatcaatccaaccttatatcttcgttttacttaaacatgatcatttttccttccttccaaaatgtataaacaaggttttaaattgtgattgtggtcatagttttgttgttgtgttcgttgatactatgagaagttgtcgataaatgtgaccgatgccctcacaatttcggttgcacacaccccaaaaaaagactttgatgttgccgccaaaattgcgatcaaaaaccaatttttataacattgtctatagatatagatatatagatgaaacatatatggtgtgtggaatgcttgatataaccatgtccctaaaacatgtaccgaggagttttgtctctagagacatagcatatgtttggagatgtaacaccttaaatggatatcagtatttggaagaattagttcctgactcttggatggaaataccttaggttcacaaaagaaaaaaaatatatagattgatggtgaagtctgaagatgaaaattgatgatgatgttgttttgttggttagctagaaattgttgcatgtgtttggtttgtgaatgtcttctttatgatttgttcatttcctatcttataatttggggtcattttggtcactagatattgtccaggaagaaccat

SEQ ID NO: 24915 - DNA, 581 bp, Glycine max
  Intron number 3 from transcript Glyma15g17840.2 (locus Gly ma15g17840) derived from phytozome v7.0 (chr-ID Gm15; pos 14317595 to 14318175)
gttctgctaaagccagctcatcaagtagaaggtgaatttgggttttgggaactttgtgtttgtgccctttttttaatgttaatcgggaatgcaaatcttatataactctttgacagtgaatgcttcaagttttatgaattgggccaggagtttaagcttttacattgataatggataaaaatgatcagcttaaagtttttgacaccaccatgctattatatcaaaatgcatgattaatgatggtagtgtataactcatagtggatgaaaattaaatctcacgcgattctgttttgtagacaactagtccttatatgagtattgatagatgaactagttttagtgtgattaaagattttggaggatttgtgtgcagcttcctgtttttcatattgtaagaatttcatgtgagaaaatgtttcccttccatttgttttaattttgggttgttatatcggacaactgtggcattgcccttatatgaaggttttatgctataatgttttatgaactggggatcctctttgaaaacttgtcttctatacagctcggaaacaagtgacagaactagacaagagatac

SEQ ID NO: 24916 - DNA, 801 bp, Glycine max
  Intron number 1 from transcript Glyma13g27360.1 (locus Gly ma13g27360) derived from phytozome v7.0 (chr-ID Gm13; pos 30542759 to 30543559 reverse strand)
tccctgctcacgtaacttaattaggtcctactcacgtaagttatgttggttttgtcccttttgattttgaataaataaaaaggtttaattgttattttattcctttaatataatttttagattaaatttgattcttttattattaaaaagttaaatttgatccctttaaaggattcatttaggtccttaatttattttaaaaaaaataataattcaatttgtaaaatttttttcttttattaatttgctccaaaaattttgaaaaatggaatccaacttagtttataaggtgaccaaaattaatccattaaaaaagtaagagacttcatgggagcttttaaaaataaaataatctaattaaatcatttttaaaaattatagtacctaattgaatctttcaataataagaagattaaattgaacttaaaattaaattagagaactaaaataataattaaacctaaataatagatctttgataaactaaaaagttaaaacaaaaaaaatctaaataatatatacatggataatttaaaaatatatatatatatattatctttcaatcacaaattcatacgtgtgataagctgattgatttttataataactattttaaaaattagccttaacgatgatagaataaaaatatttacgttgaccgtacatatggctattaaaaccgtttcatttttagctgggctatttccaactctgttggtttattgaatgtgggtgccagctttggaatttgaattctacaagctaggtcttgaagtttcatttgaacggctacttcaatag

SEQ ID NO: 24917 - DNA, 817 bp, Glycine max
  Intron number 1 from transcript Glyma14g21790.1 (locus Gly ma14g21790) derived from phytozome v7.0 (chr-ID Gm14; pos 25481892 to 25482708 reverse strand)
tcgaagaagatttgcctgacgatcctgaaattttggtactgcacaccgaaattttatggtttctgattcctttttaattaatctgaatcggaaactttgagttgatagggataactaatatcaagcttgcttggttgtttacatgcatgattagttttcactaaatgaaatcttgtgaaattgcttgagttttggacttaattagacacttattcaataaagagctaattacatttaagcttattgcttgctagagcatctcaaacggaagttcttgtgagcagggtttttacatgtctgcggccgaaactgcaattaaaaaccttgcttgtgaggtttttttgtttaaagaactggtttttactcaggatcaccattggaggaggttgacactacttatataagcaactggctcttatgattgaaaaataaatatcatgtgagatgattaaatttgggaatgaccaatttcgtgttcttagatgattgtattattggtgtaaaaagttgttaaaattcttaaatctgatgtatcatggtaggatccattaaaagtgagttaataatcttcattttaagtgtatcattggtgattctcctagaagattacatgacagcttgatgaaacacttgcttaagtactagtatgataagttcaaataaactcaacataaactcttgtgtatcctctagaattttttttcaagagattttttttgtgaaaaagagatatttgtattggagttctgcattattcattctttttggtctctttgtttttactgggtacagagcattgcagagttgcttcgactaa

SEQ ID NO: 24918 - DNA, 797 bp, Glycine max
  Intron number 1 from transcript Glyma15g37490.1 (locus Gly ma15g37490) derived from phytozome v7.0 (chr-ID Gm15; pos 43351741 to 43352537 reverse strand)
tctctctctctctctctcactcttacaaagcaaaggtgcatttttttctcttttttttttttgtctttactattgtatttcattcagttttgcaattattctgaatacccttttgagtttttctggtagtattgccgttacttcttcaaatttagcgttgacccatttttcattatcttggttttgattcaccactttgctgggattggtgtttctatgtgtaatttgatccaattccttgaaaatcaccatgcaccctttattattgttgttgttattttcccaaaaaaaaaagaatttttttacctaccaatattgattctgggaatcctcaatgggaaataaaaggaatgaaaatgaaaatggaatcttggttgcttctgtttctgtttgttactttaggtaatgttagttaaatgtggctctttacccttttttttgtagtgtttcccaagttttgaatttttatcctgaacagtgtcttttcttcattttcaagatttttatgctttattacatgcagtgctaaaattctatcctttctgcttatctagcgtgttttcttctttatattggctgctaagagcagtgaaatcttaagaggtagtaattgaagtggttgattaggaccacataatgtaatatgttgcaatcgcctgttggtgtaagtaaattgatggatttgtttcaaaatctctggttgaattataatctgatctgaccatttaaacattgatcctacttttatgaagttgcaatctgatttgttctttaacttgtcttagtttggtaattgg

SEQ ID NO: 24919 - DNA, 850 bp, Glycine max
  Intron number 1 from transcript Glyma16g25390.1 (locus Gly ma16g25390) derived from phytozome v7.0 (chr-ID Gm16; pos 29347639 to 29348488)
ctcaggcttatccaaggtcttaatgttttcttgccatattgtgtgccaatcaaatgtgtctttggattcgagttccatgataaaatgaaagataaaatatgattttagtgcatgtactttcggtgtaaaaattgatattacttgaacttcgatcaatttggtcgctcaacttttgaaaaacagtgattttcgtccatcatcacaacagttttcaccacgaggagacacggacacaactgtatttttaaagttcaggaccaaattgatcaaagttgaagttccgtaaaaagtttcacgaaaaatacaggaactgaaaaagttgcatgcatttttttaaggtatttttgttattgttctttaatcaaaattgaagtttgactttggcagtccgtgtactgccaaagatcaattagaattaaagtttgactttggtaatctgcattaacataggttttcgaggtgaaatttcaattctgaatttaaaataacaccataaacacggaagaaactacatctaaattttgttttgaagagttagagtttgatatagagtagaataatgctgtagagtagaaatcacgatttaaatggtccaaaagctttgaatagatcattagaaaagtttaaaatgttatatgtttagtaaaaagtaaatttacttgatgcaatttgctcaaatatgtgttggtctttgttgaatttgttcgttgacctcttcaaggatgtgtatttgaccactttatgttcaacttgcattgactgtatgtttgcgatttgacaagattattgtctgtcttttcacctgtcttttcatttcattttcttcatactttgtttttatctttcagat

SEQ ID NO: 24920 - DNA, 862 bp, Glycine max
  Intron number 1 from transcript Glyma14g02030.3 (locus Gly ma14g02030) derived from phytozome v7.0 (chr-ID Gm14; pos 1197095 to 1197956 reverse strand)
ccgctttgactttggaggctaagggcctaaggcaggtatgttaaaccacaacaacttaatcatctgtgtttttaatcaaagtctctccttttttttttgtttgtttcctgtttctctttgaattcttgtgtgtgtctatttttgctttaactgtttccctcccttggattctgctggtattttttctgcatagagcagtagaaaagaaaaagctagtagctttattagaatctcctcaaatctggcactaccctttattcttattgataacttataagttttggccggctctgggtatcttagtatttatctagaaagcggaaagtttcaattttgaagctgaggttctggttcctgggaatttgttttactctacttgggttttgtggaccttgatcctcaattccgtgtttctctgctcttagctataaagttaaggtttgaactggggttgttgtttctgaattgccttctttcctgttagttgacaactcaaatgacagtccttaggagaaattcaaattgaagcttcctacttctctttcacatttgggggttgagtgttgcctttcctttttctatttttttgttcttcacaattcacatactaaaaattttctctttttttttatctgcttaagccttcctaggctgcaacttgtatggaagtattttcaagctgagttttagcagttttggtcttggaatagtgaatttttagttcttcctgttcctgtttgaagtttgggtttaagttcaaataatcatttgttgtgttggtttgaagctttgcttaacatagagtgacttgaatttgttgaaggtttttttgctttgtcaggttcccaatcactgtgatatc

SEQ ID NO: 24921 - DNA, 847 bp, Glycine max
  Intron number 2 from transcript Glyma15g20530.1 (locus Gly ma15g20530) derived from phytozome v7.0 (chr-ID Gm15; pos 18389334 to 18390180 reverse strand)
tgaaaatttgaccacattcaagaccgctacctttggtaaggacacttaactcctttttttttaaccatgcgggactttccttctatactttatttcatacctaaagatatcaggattcgaactctacaccatttgattaagagatacttaacttataataataaaaagaggaatactagtgacaccagtgacactctctcctacagtattcttttaactctctatgtgataagttagaatttattaaaattaaccgagagaaaatcattaaatgaataagtaggacatgtcaaaattaataatttttaacaaatttaaaaaagagtgtaaaagagtttcattaacatttcttatagaagaaaaaaaaataacttttatacaatgaatctaataaattttagactctcaacttattaaaaattgtttaatgtattacatcattatgatatgagtcgatagtttttgtcatatatgataatatatattcaattaacagtgtaaaaactgtaaatatattcttcctttaaaaaaatcaagtatattttaattaaattaaagaataatattattcctttggtaatttatcataatatcttttattgtttttattaattgcatcactccttttgtctcattttgtattgtaaaaaaaagttgtgatatattattatgaaaataggcacaaaacaatatttcactttattctttttgcatttttagtaaaactttaaatcaacttaaatataaaaagaaattaaaaaaaaacagtaattgcctctttcaatattgctgaaatttctgattcaattaattcttattctcatacacttttactgtgaagctgtga

SEQ ID NO: 24922 - DNA, 566 bp, Glycine max
  Intron number 1 from transcript Glyma16g02200.1 (locus Gly ma16g02200) derived from phytozome v7.0 (chr-ID Gm16; pos 1709264 to 1709829)
ggacatacaaggtgtgatagatattcagttattcaccactctttcatatagcgtgtttggcttcagattctagatgtgttttttgatgtttattggagaaagttaatagttatagctttcacgtctcagtctctcaaacatgatttcttacttctcaacgagttttcaaacattcatatggtgtgtaatacaaggctattcatgtttctttgacaaacagcttaatctctagggatggttgttttcgtgcttataaaaaaaaaaagggacggttgttttcgtgatatatgtgttggttcatcactcactcgtgaacacaacatgtgcatataactagctaccttttatttttggtgttcatggctggcaagctagttatagtcttttggtgcttttcattttctactcacttttttctagtttctttgttttgcctctcacatggggggtaataatatgttggaatattcaaatattgcatcatgggtcatgcatgacatgaatcacggcactaatgcaccattttgaggggtttcttttttcttttctttattttttgcagagaa

SEQ ID NO: 24923 - DNA, 819 bp, Glycine max
  Intron number 1 from transcript Glyma14g23830.1 (locus Gly ma14g23830) derived from phytozome v7.0 (chr-ID Gm14; pos 28305675 to 28306493 reverse strand)
ggttggctggttgtggtggattattgagagatagtagtggtgcttggatttgcgggtttgcaatgaaaattggaagagcttctgcgattgtggccgagatttggggagtctttgaaggtttgaagcttgctagagagaagggttaccgatatgtggaggtttaagttgattctgatgtggtggttaaggtattgtcaggaagcaagaacgataatactgttggtccgggtttgattcaagggattaaatctcttctgagtgtggattcgagagtcagaatttttcatgtttattgagaaagaaactcttgtgcggatgatttagctaatttggcacataagttagaggatgactttgtgatatatgactatatgagcaatcccctttatgtttgaggcaattgctgttagctaatgctcttggagtgactacacgatttattttgatgtaatttctttctttgggtctttggccctttgatattaaaaaaacaataatcctattaaccgttaatcagtcctaaaacggatattaccacgccaataaaataaaattacaaacatgtaaaatccaaaatcaaacaaaaacggcaggtacagattaatcgtataactcagcaacaggatcttcgtttacccacaccgagtcaccgaccgatttaaaaacaaaaaccaatcaattcacagtttcccacagcaataataccaacaaattaacaatctgaacaaaaccatcgaataataaaaaaagaaaataaaaatccaaaaatgtcacttacattcagttaagcttcctctccatcatcgtcattatcttctt

SEQ ID NO: 24924 - DNA, 429 bp, Glycine max
  Intron number 2 from transcript Glyma15g14270.1 (locus Gly ma15g14270) derived from phytozome v7.0 (chr-ID Gm15; pos 10750157 to 10750585)
tgtaaatgtatatatgttggcaaataaattttcttttcattaactttgacaaattctgttgaaaaaacatcataacaaacatgccattcaagttcaaaccacatacaatatgtattattaacaaaatgataacaaatatgagaactgaaggagaggatatatatgtggcggaatttgtagcaaatatagcaccccaaatgtttatattttgttctgcttgacattttatgcataccatcttattcaattttttatttcttttgtttatcatgtttctagctagattaattcttgtttagagtttcaactatttcttaaactttttttgtttctcatacattcacataatcacttaatatttttttgtgtgacttcaaattcagtgcatcaaagggcacataattttttgttctccctgctgtagcaagt

SEQ ID NO: 24925 - DNA, 957 bp, Glycine max
  Intron number 1 from transcript Glyma13g44640.1 (locus Gly ma13g44640) derived from phytozome v7.0 (chr-ID Gm13; pos 44019802 to 44020758)
cacaagctgaatctccaggtgctctacctacaattcctttgtttattttaatccttcttatgagttggcatttgttctaaacactacaaaattttgaacttgaaacaccaaactacaaaacctcactccgctgtttttacttcctattttctctctcatcgtgagttttccttgaattatggttggtgtcatgtcatcatttttcataatatattcaagtgtgatttctgaaaaatgcaatcgtgaaattaaaggatagtaaattttgcattgtttggtgctcatgtccatggaaaataataaaaccttcattggtagacattaacatgttactttggctgaggaaaacttcctcatactctacatgattaatataaatattgaagacatgaatttaatgtgattcaacgcctcttttctatgtctacgagaacatctcaacaaaaattgtatcacccaacaaacctgagtctctcactcaaaagttacagagaagaacgataatcactatctcacttctcttagagtcaggtctcttttgcttgggcacatttccccctcttcaaattgggttgttcttcaaacctcaagaacctctatttataatgtggggcaggacttctgaagatttcttgaataagcactaattgattgcttactacaattccaagagtcacctctcttagaaattgtcatcacacgttcaatttattgtgtctcaaaatcacacttgaattaatggttgagaattttgaattgacattccaaacaacttattgagtcacctccctaccaatttgttcatattaaatttattttcatgagttgtaatcccccatcaacattttatttgatgtgaattcttatataagttcagtatatgctgcttaatgagttgtagttttgtcctatattgaaacaggaattcaggaggttagaacagtgcaccaccagaat

SEQ ID NO: 24926 - DNA, 509 bp, Glycine max
  Intron number 2 from transcript Glyma14g40150.1 (locus Gly ma14g40150) derived from phytozome v7.0 (chr-ID Gm14; pos 49130016 to 49130524)
ctgttgctctggtcagtgtctcaagcaatagcatataatatacttacatagtaatcatagtttttattttaattattaatttgagattatttttttgtcaatctcactaaaacaaaaccatttagagtactcttagataaaatgaaggttaaattatgttttccattctgataaaacaataattttatttttattcttgaccttttttttaatttatggtaaattaataaattttatatttttattagtcttttataaaacaactaataacattgaaattttttatagagaaaaacataaaattcactaattattatagactaaaaaaatatcaaaaataaaaaataaatttttattttatcagaaagtagaaatgaagaaaaaaatatttaaaaataaatataaaatttaaatatttattaggaatcacacgtattttaacaaataaatattagaaatttatttacttactgcctttgtgtggatttagtcgggaggacccacttggg

SEQ ID NO: 24927 - DNA, 1040 bp, Glycine max
  Intron number 2 from transcript Glyma14g00770.1 (locus Gly ma14g00770) derived from phytozome v7.0 (chr-ID Gm14; pos 389426 to 390465)
cgtaaacttttttgggattgaagaccgaatcgttagtgagttttagttttaatgtttgtctgttacaacaaaatctttgttctgttctacagttttcgatcatcgtgctgctgattttgtgatgttcaccctttctaagctctctcttgcagttttactacctctgcatgtacttaaaaacttgttaagatttcaagcatttaagtttgagaagattgtgtctatgagaatggagttgaatggtttccccaagtcaatttcaagtcagttggggattttagcctctattttgggttgtgggatatattggtataccgacctgaactttagtaaatggccttttttgaaaacctattcagttcacattgtttctattggcctaaatttcacataatgggaaaatttgggacttcataggtggaatctcgtgttcaagtgagaagcttgggagatacaaagaaaaagttaggtgaaatggtgaatgacacaagcaataaattactgctatgactcatttgcttctcaatcattttgttcgaagtgatatttttggaggttattaagaaattctacatgtttagttgtccgtgttctcttatttggtttaatctattagaaaataatgaaaatctacatggtgatgctcttcatcttatccgaattatctcaacccttcagcactaatccaattctaatagcctatcatcttactaacgttgtcttatagtccaattgtgtcatgttacaacgtcaataacctcaacacatcccatctcctaatcaataattatttttgtacaaaataatcaagaatctaagataatgaaagaagactgatatatagaaatatcgaatagtatacaaattcatttaaagaatttgatattacacacccacagacattgttgtttactaacctaatactattaagttacacgcaaacctctcatcaaacttcaatcgtatattttagttctgaatattcataaaatttctgtgatctgaattcattttattttttaggaaattttcagggtaca

SEQ ID NO: 24928 - DNA, 210 bp, Glycine max
  Intron number 3 from transcript Glyma14g00770.1 (locus Gly ma14g00770) derived from phytozome v7.0 (chr-ID Gm14; pos 390473 to 390682)
ccaacatctcgcccgctgcctttgataaagaacaggtaggcattcttttctcttcctccaactttggtaaaactgatctggtggttgatgtggttaatttgataccccaatgtggtttcaagtttaaattttcttttttgggtgttatttgattatttagtttttggatgtgtttcaataattcatgtggtcatggagcagatatttgga

SEQ ID NO: 24929 - DNA, 465 bp, Glycine max
  Intron number 4 from transcript Glyma15g14420.1 (locus Gly ma15g14420) derived from phytozome v7.0 (chr-ID Gm15; pos 10887996 to 10888460 reverse strand)
aggggattcaaagtcaggaagagtgggaggtatatttttgttgctaagcttatccatgacttagtattgttaccctaacattaaattgcaaaggtttttgggcatgagtttcgttactaatgtttccttttcttcatcactatctttgccaataatcttatggattgattgccaatatctttgttgtatcaaacctgtgtaacaagtacatttaggcaagtgttgtattactcactatatttgttttgaaattgttgtctattttatgggtcctagtgggtaaaggcttttgttttcatgttgttctctactttatcaatgtgtccttgtgttgggatatgctttctctaatatttttttaactttataacctactagaaaataatggaagagacaatggtgaatggtgcgagttccattgttgaaaaagattgttgatcactacagtggaccagatagggtaac

SEQ ID NO: 24930 - DNA, 450 bp, Glycine max
  Intron number 1 from transcript Glyma15g22820.1 (locus Gly ma15g22820) derived from phytozome v7.0 (chr-ID Gm15; pos 21666700 to 21667149 reverse strand)
acactggtaaataacaacaaaatttgtgttttaatttatcatagtccattttaattaaccattttcttttctcagttttttctctctctctgattataactcctatatggaatgacccttttctctgcttctcaccctctcctccataatgatacttttttttttttttttgtgtacaatggttacactgagattataacagattataacatatgacaccgtgcataatatcaaaatcctccaacacttggccgatcttggtcagttaaattgtattaattttaaattgtaaatattatcatattacagaaaagggtacatgaggtttatttttatgcacatatttttattaatatatgttattattattttatttgcaattgggtttataaattagtggggtataaatgtgcaggagttatttctggggctcttttgtatatcaaagat

SEQ ID NO: 24931 - DNA, 996 bp, Glycine max
  Intron number 1 from transcript Glyma15g40860.1 (locus Gly ma15g40860) derived from phytozome v7.0 (chr-ID Gm15; pos 47872082 to 47873077 reverse strand)
cttcgccgcttgctcgctctctctcgctctttcaggtttggttcctcactgcatctaattttctcattcgcttttccttcgcttctttgtttccgaacagatcggcaccgtttgtttttctcgcttccgtttatttgcttcagatctgtgcattactcgaatattccgattccgtttcggtgtttttcttcgtgttttggattctgctcctttcttttttaatacttataggtaattcggtgtagttttgttcatttgcttgttgtctgggtgtggttttacttttgcttactttttttcagaataataatcgattgttctgcatttcttatttgtttagtgaggtatgatatgaattgattgaacatgatattaggtaatcaaaatctgaacactgattttttttttaattcgtctttgttcggttggtttgctgtctgtatgtgatagatggatcttggttcacacacactgacgcatatgcatgttgagatgttttagacttagacgggtgttattgttttgtgttaatctgctggatgtaattggcgtattttgaaactgataatttaaggttttaaacaaattgcattctgagttgagccgtttgctactgtttttagaagtttgaagattttttgaaacaatcgaaactttttatcctgaattaatttgggtacttaaaattgagggattttctttggtgcaaaaaggaaggaattataactgttccaagagaaaattgtaggtgtatattaaaacgaatggtttatatgttatggctatgttgaatttgtggtattttttactttttttatttttaatttgtttttgaccgagttttgacaacaaatcctttatatccccttttctccttcaataactccttttctttttctatatttttgttgcctgcatgataccttgctatttagctaacgttggtgttttaatgtttcagctttgactttggtggaaactaaagactagtcaaaa

SEQ ID NO: 24932 - DNA, 880 bp, Glycine max
  Intron number 3 from transcript Glyma15g14130.1 (locus Gly ma15g14130) derived from phytozome v7.0 (chr-ID Gm15; pos 10656282 to 10657161 reverse strand)
gtttacaccagtggaactttttaaggtacactctatgggataaaaaagtttctagtccttaatatataaaatcaataatatgactcagaatgtgatttttatggttctcagtttgctatgaagaaaattgttatgttttatttaatcaagaatttatagtttccatgaacgtctattctttaagagatattatcatgggcaagctcaaccttattgtcaacaggggctgcaaacaatagaaatagatttaaagggatcaattggtgtcttttttggggctgtgagcattacctgcaaatttggggtgctaagatggatgcatctagggaaagtcttgcgagaattgactaggttttcaagaaaatggatattttatcctgtctggctacataatgagacatttgaatttgtaggttaacactaaagaaatctaagttaaaattgatagtaagaaaaattaagctaggtatcacacaaacaataggactgaaggaccaagtctgaattcaattccccataactacaaaacccacaaggaataattggatgttgaaattatagttacaaaattctctcagccatcctgtgtattgcctaccaaattctccctaccatgttcagttcacccaattcatcattggaatctaaatgcaaaatcaggcacatgttggacatgggatggtgtgcaatttttcagaatttgtacagtatttttggtaagcacatcaaattataatgaaattactttctggtgcttgaaacatctgtagaatcataaataatatatttatttttcaaaaattttgaatcatgtgtgtcaatgcagtgttatagctcttttatgtttatttatttatatatttgcttttgtagccttggt

SEQ ID NO: 24933 - DNA, 764 bp, Glycine max
  Intron number 1 from transcript Glyma15g13180.1 (locus Gly ma15g13180) derived from phytozome v7.0 (chr-ID Gm15; pos 9809076 to 9809839)
cgcactccacgccttcaagtcttcaacctccactggtcagttcatttaattaaacctaacctaatccatttttttgtaaactttgatcttcctcgttattatgaaactcctactcctattactaatggaatatttcattggtaatttgttcttattctgaaagtaacctaacctatatggcatgtattattctgtactctgaaatgtcactgctcaataggttccttctcttctgttcacttataattttgtctatacttaagctcttgggcagttgggctcactcataaattgtgtttatacttttcagggaagattctagtacatgtatcacaagcacctttaattttttcttttattcataaagatataagtcacagttgatctgatgatttcatggtcctcatgttttcttaatattaatgtcccaccattagcatttaaaactccttccatgcctccattcatacataatgccattgaatacaaatttcatggtggatctgatgatttcgtggtcctcgtgttttcttaatctcactgtcccaccatcagcattttttttaaaaaaaaaatcatgcctactttcatatataacattgaatacaaaatttctaaagaaaatataaattttgggcttgttcaagtgattgtttgtttgataagtcaatagattggcaagttatttgcctggaacttccttttctcacacaaatatatttgttgctgtttcataagtcaagcgagaaaactcacctagagaa

SEQ ID NO: 24934 - DNA, 1029 bp, Glycine max
  Intron number 1 from transcript Glyma15g00700.1 (locus Gly ma15g00700) derived from phytozome v7.0 (chr-ID Gm15; pos 408476 to 409504 reverse strand)
cacaagctgaatctccaggtactctacctacaattcctttgtttattttaattctttttatgagttagcattggttgtaaacactacaatattttgaacttgaaacaccaaactacaaaacctcactctgctgtttttacttcctattttctctctcatcgtgaattttccttgaattatggttggtgtcatcattttcatgatatattcaagtgtggtttctgaaaagtgcaatcctgaaattaaaggatactaaattttgtattgtttggtgctcaagtccatggaaaataataaaactttcattggtagtggtaaattctgataaaaataagattgtttcctcagttttgcattcttaatagacattaacatgctactttggctgaggaaaacctcctcatacactacatgattaatagaaatagctgaagacatgaatttaacattattcaacacatcttgtctatgtcttcgagaacatctcaacaaatatgtatctccctacaaacctgagtctctcactcaaaagttacaaagaatgagaatcactatctcacttctcctagagtgacgtctgttttgcttggacatatgaccccctcttcaaattgggtagttcttctcacctcaagaacctctatttttaatgtggtgaaggacttctaaagatatttcttgaagaagcactaattgattgcttactataattccaagagtcacctctcttagaaattgtcatcacacacattccagtagtctctaccttttacttttcaatttactgtgtctcaaaatcacacctgaattaatggttgagaattttgaattgacattccaaacaacttattgagtcacctcctaccaatttgttcatattaaatttattttcatgatttgtaatcccccatcaacattttatttgatgtgaattcttatataagttcagtatatgctgcttaatgagttgtagtgttgtcctatattgaaacaggaattcaggaggttagaacagtgcatcaccagaat

SEQ ID NO: 24935 - DNA, 550 bp, Glycine max
  Intron number 1 from transcript Glyma16g07330.1 (locus Gly ma16g07330) derived from phytozome v7.0 (chr-ID Gm16; pos 6574384 to 6574933)
atctatctggaacagtaattttctcaaacttcttcctgtgtgttcaaagctatgatcatcatctttagggggtgtttggtatatggactcttttttcatcattgggaatcatgattcctgagaattatatttcttgggaataatgtttcctgaaaatgtcataaatatgtttggtatgtctaaaatatttctaggaacgagagaactaaaaacttttcctcttaatgggaatcttggatttccaccctctcccatggaaaagtattagtaagaaaattaaaaaaacaattcctggaaatgttagattcctaaaagtgatttttagaaatgttgtaccaaacataggaacttaatatttccaatctaagattcccgagaaacttaaaagacttcccttaccaaacacccccttaatgtcttatatgtgagtatcaaaatcatagtaattaatgtatgatttctattagaaagtaatgatactgaagcctttgttttatgatatgatatgtttatctaattggtgttcaatgttgactcttagctagggtat

SEQ ID NO: 24936 - DNA, 958 bp, Glycine max
  Intron number 2 from transcript Glyma13g23010.1 (locus Gly ma13g23010) derived from phytozome v7.0 (chr-ID Gm13; pos 26481022 to 26481979 reverse strand)
cacgcgcgtttcatcagttaagtttgtgaacatttctgaaacccatcgttttctagactatttgtgttcaagttttggagttccatgcaaattttgtactcaaattctagtttattttatcaatcttcattttatacactggttttgtcctattttgtttcactgttaagttttggcagaggaatttcttaattgagaaatgtaataattataattttctaatatatttgatgttaattagatcatattcttcttctctctctgcctctttttacccaaaacagattagattctctttttctttttcttttttgtttttttttcttttactcctgattaaagttcctttttggtataaaagaaagaaagaaaaaggtgacaaatgtgtagaaattgaatttttttatcatagaaatagaagtgttcctaggaaaaatataaatatatgcatgtaaataagtaagaaatagaactaacaagttgtttatatgattgattctaaacttcgcttcttatataaggtattacgatgaaataaatcaaatgtgattgaattaaattttgttagatacatttactttgcacatatttctttcctctccttaatttttccttccaaacaaaagctaagaatagaataaaaatatattgaatactttattgatatactaaaaagagataatttttttttctagaacatcaaataaaacggaatggagaaagtattcttttaatttttttacgctgtcaaattgttggtcaaaattttataatttaacaattttaatgtttcatttatattcattataatgtcaccgtgtgcatctactcttgctttgactcaaaatgcatgtattggagtttgtgacaagaagaaatcgtacgtagtgggtttcctaacaatatatatttttttctttttttcaaaacaccttaattaaacaggagccagaaagag

SEQ ID NO: 24937 - DNA, 728 bp, Glycine max
  Intron number 2 from transcript Glyma16g01560.1 (locus Gly ma16g01560) derived from phytozome v7.0 (chr-ID Gm16; pos 1126670 to 1127397)
taacagagctctttggttccacattgccaacggctgtatgtgttctgaattttgagctactcttttagctatatgtgttttgttgatggcgctcaatgttacacatataatggctggtgaaggaatcgagagcatggaaaattgctagttgctgtgttgttaattgctgagagagaaggagaagtataggaagtacagctagagctgcatactgtgtagaatgttagaatttgaaaccagcgtctatattccctagattagttgtattgcatagacatttggggtcacgggtattgaaccagttaatgtgatacttagaaatggtagggtatggagacttggcgttatttggagacattttgatggggacttgggtagtatgggatgcctaagtcccacatcacgtagtatgggatgctcggcggagtacataattggcttggttcttcccccttaattgctagcttttaagggagggttccccaagtgcttgggtgcctatcacattcctcatggaatttacatatgtttttcaaaattttgatgtctaatcttgtgttgtgaaattcctaacttttgattttttagcttaagtatctgttttttttcttatctaaactaatatggcttatctgatttgcattttcccccctcaatcgtcgttgtgggtatggtattttgtctgatgtaatttcaataatttctgcaggtttatttagaaataccaa

SEQ ID NO: 24938 - DNA, 859 bp, Glycine max
  Intron number 1 from transcript Glyma15g40140.1 (locus Gly ma15g40140) derived from phytozome v7.0 (chr-ID Gm15; pos 47106625 to 47107483 reverse strand)
cacacagttgcatagttttggaaaccaaggtccactttttgttgctcatcagttatgtagtttgtttccatgctcaaacatgccatcacttcatgtggcctttataatcattcttcaatgctcaatatgtcatcagactctagcaggattggatagtagtgtttgtgttgtgtgtatgaatggatttcaatctcagttgtgtttgtcaaactgattttgtgtatgaatttaaggctgaactaagttttgtgattggatagctcatagcatcaatcttcttttgcatctgtttttttcttttttttttgttactcctttttatgtatatatatacatgctgttcttcccttttatgtatcatgcttttgtagattttttagaaatcttcagccatgtaatgatggggggaatactgtgttgaaatgttagtaaaaaaccgtagcatgtaactttgtttttcttgttgccagagtttttcatcatgtaacttgtttccatcttatactgccactattttttcttttaagttttgatttccttttgaaattcaacattgtagcatatccaaagtgtttattttttttctctttaatccaaaatctgggaaattttaggaaaatttttcaacttctaattatttatttatttgaaaattttcacagctgaatctgccacaaaattgattatttagatttttccgaagattttggattggcatagtagttctcttcctatatcaacacatactaggaatatcttaaactttgtagctacagattgtgatgaaagaattgatagctgatgatatatgtctttttatctagaattcctgaagaagggtagcatcaacaagcagttc

SEQ ID NO: 24939 - DNA, 462 bp, Glycine max
  Intron number 1 from transcript Glyma16g34700.1 (locus Gly ma16g34700) derived from phytozome v7.0 (chr-ID Gm16; pos 37283639 to 37284100)
ggtatgtatacattttaattaagttgtgtgtgtgtgtttgcttttagtcgtagacctctaatctaacacacctttttttcttctcttggtccaatatgaaataagagcccctttttttgcacaaaattagttcctcgactctctcttgattgagtccatcttcactccatcctccatttttatttattggttttcttgttaatccaaaggctagtaaaacacaatttatcccatcccgttttttttataaaaaaaaaacattctactttgtaatattgttctaataataatgaaatttgaatttgacaactaacataggtatacttttattttttttacaagaatgctcttcatttttattttcccaaaattttgtttgtagtaaataaaaaattctgaaatttgtgaatttgtatgggtaattataattgggtgtatatataatatgcaggtgtgatccgt

SEQ ID NO: 24940 - DNA, 916 bp, Glycine max
  Intron number 1 from transcript Glyma13g32950.1 (locus Gly ma13g32950) derived from phytozome v7.0 (chr-ID Gm13; pos 34955532 to 34956447)
cgaggcagagtacgtcctctcctcttcgagattacgcattgatttaatttaatttcatcaattattcaacgtcgatttacgaattcataaactgtttttcgagcgtaagctttgttggatataagaagaaaaaaaaccatatccattgtgtaatgtacctaattcatcttgtattgcagataataaataaataaatagcttaataaaatctatttcactattggatttggtttcttctcaaatgaataaaataaaccactaatttcgtctccgaaatattaatctctctaattaaatagtctgtgataaaaccatttaaataattttagtcttgaaattaatgtatttaagtaaaattcagcgactaatttgaatgattctttaatattttgagaattacttaacatgatttttaatacctgtaagaactaagattgtttgagtattttttttcttttactataaagacaatttaggaaaaaagataatctaatgaaattggtttttttactagtctaatcatccaacaaaactgtttatttatagttattacaatatataagtttttatcaaaaaaattattaggtgattcaaacttattgtgtatctatgattttcactaatttctaagtaatatatatttaatttttttaatttaggatagacaattaactaacacttaattatatgttagataaatattaatggagatcatgatcacctactaacttctcttttgcttaaaaattaaattctttataaagtagcaatagattcttgaatactatttctccttggtgtatgtttgtgtgtatgacattcaagtgttatatagtcgtggtggcagctgcctagcatagtttccgatgtgaattgtaatgcacatatgaatatgcaggggttgactaacgagcgt

SEQ ID NO: 24941 - DNA, 339 bp, Glycine max
  Intron number 2 from transcript Glyma16g02420.1 (locus Gly ma16g02420) derived from phytozome v7.0 (chr-ID Gm16; pos 1998536 to 1998874 reverse strand)
tcacaagaggtttcatcatcacaacactctgaaaggtttgattgacctctatgtataacttatctcatttgcaatttaataaaccacatccttcacaagctccatatatggtggcattaaacaaattaatcttcatgatatacacataggtgttagttctttttctttttttcaagagaatgacattttttttttttttttttttgttgaaactttgatatttaaccgagtcaaatggagtcatctgatccatgtagcagacctgagctaatgagataaggatttgtttttgttttagtgtcatattttcttctaatgaatcttttggttttcactcag

SEQ ID NO: 24942 - DNA, 257 bp, Glycine max
  Intron number 1 from transcript Glyma15g39380.1 (locus Gly ma15g39380) derived from phytozome v7.0 (chr-ID Gm15; pos 46026517 to 46026773)
ttgcttattttgtggctttgatctatctttttctggtaaggatcatggttggagttttaccaacttttggatacttttttttttgtgccttttatctttgttttttttctttttttgattgaatagttggtgatggggaaaagaaagaaaaaatggccggggggggggggggggggggggtgggaaatggaaaaaagattggaatattattgtgtttctgactttgatgtttttattttttttctttgggaaggttc

SEQ ID NO: 24943 - DNA, 501 bp, Glycine max
  Intron number 2 from transcript Glyma15g39380.1 (locus Gly ma15g39380) derived from phytozome v7.0 (chr-ID Gm15; pos 46026810 to 46027310)
agtttgaggagtggaagcaagctaatcaaagaagggtaatgctgctggttttagtgtggttatttgattttgtagatcatgaaaagtaaatcaaatgaactgtagtcaatgaaaaaaaaactgctaatgagtaaattcctctttgaagttagtccaagattcttttctttatgctctttgaaaacaatgtttttcatttgatgatgaaaataaaattatatggcttaattaaaggaggatgaaatgactaaaactaagagaataagaaaaaatacgctccagtaggaaattaatgtattaatatgtattttatgttttttttttctattgtaagttaattttcagttctttgattatctttcattttatcactgcaagtttaaattttgagatgccatattctaatggccaaggattctgctatgatgatttactgatacatcttggataatgtcttgtgcttcaggtgctttcagattctgaaacagtccggtggttgaa

SEQ ID NO: 24944 - DNA, 1011 bp, Glycine max
  Intron number 1 from transcript Glyma15g09520.1 (locus Gly ma15g09520) derived from phytozome v7.0 (chr-ID Gm15; pos 6823924 to 6824934 reverse strand)
tgatttgagtatgtatttacattacaattccatcacattggttttttaaccaaaataaaattcaatattttatctgattgtcattgtactgctgaaaaatcttagccacatgttttatacaaaataagagaagtatactgtcaaatttcatgtactttctacaaacattgcaatactggagccagactggtaacttaataaaaatatatgctttcattgccgtagacctttgttgctatttgcagtacatgtttagttgtttagttgccatttgctagagccaaaccaatcattcttcatttgatctctgtgtctttactttgattcaaaggctacaagacttcacaactacctttagttttgttctttgctcttgttcctcatttcctggatcataacccaacctcttcaatttgcctcatcaattcctcttctaagagatgacttgtgaaaccaagacatggttggttatgcttcttttcttggttgctaactacatgatgcaacattgtgtccatggggtatcccaagttccttgccttttcatctttggggactctttatctgatagtggaaacaacaatgaacttccaacctctgcaaaatctaatttcagaccatatgggatcgactttccattaggaccaactggaagatttaccaatggcagaacagaaattgacataattagtaacgtttctttacacttattcagacctgtatctatctcttgttttttttcttcttaaaataattgagtattcagtgctgcaaccaaagattctaaatttatgtctcgttatgaattttaggggtcaaatttatgagttggtgtggactaccttctgttatctgatcaaatttttcggtagtgctgaaagaataaaaacaatattagtatatttgtaaagctaagtgtcttttctcttgcccgaaatgttttggtcaagctcatagtaaagttttacaattgcagctcaacttctgggatttgagaaattcattccaccc

SEQ ID NO: 24945 - DNA, 787 bp, Glycine max
  Intron number 1 from transcript Glyma14g10810.1 (locus Gly ma14g10810) derived from phytozome v7.0 (chr-ID Gm14; pos 9006682 to 9007468 reverse strand)
aattcaacatcccataccctaggcaacggttcaaggtattagggtttttttttttctgtttcttctcaattcagtttcataatattagttcaattggggttagcaaatgaaacatttaagtgattttttattggtttcacattctgtatgccaaatgtattttagtggcttcaggtgggtattacttgtacttagcttaagcatccacaatgataaaattaaaatcttcgcttataaaagaaaaaaaaaagattgatttttaataagattagaggctttgggcttttttcaaagcttagggtttgtagctttcccaaatccatgcatctttcgtatcagctgttacttatctctatgtgtagccattttggggtttcaacttaatagtgggtgatatctgaatctcgtatcgtttttgtgccaaaattggcttggttgttattttgaatttgaagttgtttggttgttagtgttaatcattggtcattacagtgaaaatgtgaactcagatcctgcagtttcatgttcttttgagcaacctattggtcttagtaaatgtgtgttaggaatttgaatctctgattttgtgttttgatttagttatgtgaatgcaatgaattaattttttgttgtagatggagtgctttgtgttaagttttgccaaatgctgcattgtaaagttgtgagtttgagttgttttttggaaacagtggaatgcaccttgttaaccttctctttctctccttttaaaattaaggtatacttgtgagggccaaaggggaggaag

SEQ ID NO: 24946 - DNA, 517 bp, Glycine max
  Intron number 2 from transcript Glyma15g01270.1 (locus Gly ma15g01270) derived from phytozome v7.0 (chr-ID Gm15; pos 768612 to 769128)
actgaagcaccttctcaatctattgctgcaacaaggtactctttggttatgaattttgattgttagtaagttttttttattatgtattcaattacatagagtttagaaattattaaaaatctaaaattatcttatggcttgttggagtgctttgagttgttagtaagttttttacttcttatccaagcgttattgccgccaaatggtgttggctacttggattctagattttcatttcacccaaactcaatcttgtatcatgcattcatgaagccccatggttaacttaatcctctgaaacagtatcccatttcccagttcccattgtgtttcgtttggtctccgtctagggcaagtggagatcgtcttcttacatcccacaatagttgggtttccatcatttttcttaaagcagaaagtgcatgataaaatgattacacatggtaaagtattatggtcattaactcattttcttgtttcttttgcatggacaggctccttgctcgtgaggggataa

SEQ ID NO: 24947 - DNA, 475 bp, Glycine max
  Intron number 4 from transcript Glyma16g32350.1 (locus Gly ma16g32350) derived from phytozome v7.0 (chr-ID Gm16; pos 35550585 to 35551059)
ttgtgcagatagaattttttgacaaatacaacaaggtatgtatatggaattactcacattacatgtgcttttacttttccatgtttgtgatttgtctcttgagatatttgggttgagacactgtgtagataactcatttttctgtcacttttacctgattgttgtgcatgatatctatggtctttgtcttcgttccctccttttagtgcttctgtcttctttctttgtatcccattgattatttccatctattgctgtaataacttatctgaatctctttccaataagatttggtaaataccaataattttttttaaaactataaaactttgattttattaagctatatagtatcagttggttttttgtttctttgcttaatgatagtatactaacagagtaggtgctaaaactattgcacctgggtttggttcttatagattggtgaactcacaggtttgttaacatcagattt

SEQ ID NO: 24948 - DNA, 692 bp, Glycine max
  Intron number 1 from transcript Glyma17g01500.1 (locus Gly ma17g01500) derived from phytozome v7.0 (chr-ID Gm17; pos 917717 to 918408)
gccttctcccctgcgaatctcttctccacgtatcggtaaacctattcctctaacccccattctcattctttcatcgcattttactttattcatcttaaacagccctcagtctctcatctgttttcctaaccgcgtttcattttttatttattttgtttttatgcgcagattgtccctgcaaattgcactttataatataataatcgctttttattttctgtttatgtcaggcgaattcaattttttttcttttgcttcccttgtttcggtggataacaaaaaaaaaataaaatctattatcgaggtctctttttcaaattgcacggatgcgtcgattttttttcgataaaaaaaaatccatatcggtatgatcgaacacatgatattttttttcgttcgtataccattcggtgattttttttttataatttttcacaactcaattttcttgttttgtttgcattggtttttgtggaatagactatttttttgactgaaatggtggaatagactatagagattagaagaactgacacaagattttgaaatgtctcgtttttttttcacgtccccataataatatatttagcattttcacttgttagttaaagcccacatcccctaatttagagtaattatttatgtgctaacaattgcaattaaagtttattaatttggatgaataggagaac

SEQ ID NO: 24949 - DNA, 1027 bp, Glycine max
  Intron number 1 from transcript Glyma16g24450.1 (locus Gly ma16g24450) derived from phytozome v7.0 (chr-ID Gm16; pos 28398239 to 28399265)
ggcttttggaggtgtggtttctctggctctcttgtgtttgaacaaattttgggatttgatttgatttgtaaaagaagttctttgtttgaaagttctgagataaaaattcatttgcttttgaaacccttttgattcaaattgtgtgtataaatctggtttgcttttagttttagtaatctgaatagttaacttttctcttattagtttaactgttgtacatattccaagtaaatgtaataaagcaaataacttcatttatatttttgaaataatcaaatagatatggatatctatttgataaattgatcgaaatttattatattaatattaattattaatccctatcttgcactttatgctatgcactaaaatatcaaataaatattataaataagaaatattggattgttgttccaaacatgaaatttggtttgcaaagtctttttaaattttagtgcaaatttttatttgtactctccaaaaacaatgttactttttttttggtctggtttgatgtgtaatttacttttattgagtgactgggaaatttcctccctgacatgattttgttcctggtttggaatgtaattgtctctttaccaagatacacatggttgcttttgtaattttgtttagttggaatatagtggtactgattagctctttcatgctactgctgcaaaattcttgacaaagctagagcctgatgcaacttatgctctcaggctatattaagtgttaaccgggcaaatagaaaacatttgaagacccttgttgtgtacatatcttattgatttgaactttcaaatttttgtttgtgtttgtttctatgacttaggtgggttttctttagtaataaaaataacacgtttctaagacaattttggatagcaagaagattatttgggatatcttaatgtttcttttaaatgttaaatgaagagttgttttaaatattttgtgaatatgttggtcattcataatatgcgcctttcattattggcagcaattgctgagcttgtggata

SEQ ID NO: 24950 - DNA, 907 bp, Glycine max
  Intron number 3 from transcript Glyma13g05130.1 (locus Gly ma13g05130) derived from phytozome v7.0 (chr-ID Gm13; pos 5394055 to 5394961 reverse strand)
tcaccactgatatcaaattagacactaattccaatgtaagttcactgttgttgcttggaatgttttgttcttctctgtacttttgggcttgcaaaactatgaaaaccaattttgatggttgatatatgttgtaataaccttggaaggtgggattttagttggtttccatttgttggtatttgttcatgttatggtggtgtgtgaaatagtcaccactgactggctttttctggtttcttattgttttgaaacctcatactcttaacattttcaactagtctgttcgagccctgctaaaagggcagtgcggtagatgtgaggtagaactgctattcaatttgctaacatcagattaagagattaactagggaaattggaagtagacaacttcaaaataaattataaagttgataatattgtagaattgaaattggaggggctttagttacatgccggctgtaattgaagagtgtttctatttgccctctcttccttattgtatctgtttgcaaatgcctttgatactcattcaatacggaagggtgttctgattttgatttcagcttcaatgagctgagttggtgaggatccctgttgaacgtcttcgtgtgtgcatatataatggcaattaaaattcataatctacacagatatctaatgcactattcctaaacttgatttgcatgtaagcaatggggcaatggggcaatggggatatttgaaggattttatttgtattaggcttggtgtttgatatttgtgcaatgtcaaccaaaatcatcatatgcttcttgcaactatgtcaatttgcttttatctttaatttacacaggcctattctattgcatgagtttcactaaagttgataatgcatttgcactccagcttctcacaactatcactgtca

SEQ ID NO: 24951 - DNA, 378 bp, Glycine max
  Intron number 2 from transcript Glyma15g19260.1 (locus Gly ma15g19260) derived from phytozome v7.0 (chr-ID Gm15; pos 16462733 to 16463110)
tttccacagtaacgaaacttcaagaacataagaaggtacttgactcttgaacctccatttagtatttaacacaccaaaattatatttaaagttctttcatagttcatttttagcataatgattaaatcaaaattgatatctgacttaataattgactaatgttttaacaattattgattacagtcatagagttttataatgtaactatatgctagaataacggaataagtgttttttgaaaaagcattctcttccctagtttactaggaaatgctagaatttgtgagcctccgcatcatgctaatattttttgtagtagttaaattaaagcttttgacaacaggttatcactggcatcgcacttcctgttggatccga

SEQ ID NO: 24952 - DNA, 448 bp, Glycine max
  Intron number 1 from transcript Glyma16g27500.1 (locus Gly ma16g27500) derived from phytozome v7.0 (chr-ID Gm16; pos 31506678 to 31507125)
tttcaggtttcgtaacgctctgtttgtttctatttgtttatttattttggcgaattcaggtttggaggaagtagtttcgtgttattagagttaacagtgtttaagattttgtaggaaatgattagttgttataattagaatcagaatggaggattgtgtaggaactcatttgttgtgattagaatggaggattttcaaggaaatgatttgttcttatgattagaatggaggattctgaaggaagtggtttgtgttgttggaatggagagtttttttaacttttgaataaaatgatcgtggagtgtatttttgaaacctatggagtaagtggagattcttgagattgtttacttgcggtttgcgatgaaaagaacagaacaattcatttatgcggttattgtttggttttgcaggttagagctgcagagctgaggaagatattggtgga

SEQ ID NO: 24953 - DNA, 750 bp, Glycine max
  Intron number 3 from transcript Glyma16g27500.1 (locus Gly ma16g27500) derived from phytozome v7.0 (chr-ID Gm16; pos 31507258 to 31508007)
atatcaaaattgcccaggctatatcatcccgtgctgtaagttttggtttatctgtcacattattaaaactgatctccatgttctttggtttgtttctggtctttatgatccttcttctatggttttcctgttatcatatgtctattgccaccaacaagaagagtataggtgaaggaattcacggaaacctttgatttacttgttggtggtgataaagctttacatttccatccttattatggtgtttaaaacccgatgggggaacagcaatcaagattcctttaggacacaaaaaggggaacaaacatgaaaataaatagaaaaaataattaagaagtgaaagttaattaaacatttacaatgtcatatcataaaaatttttcatttcaaaccacctccatcttgaatcaaatatcctaaaaaaaaatacctgacaatattaaatatgatgatctgatctggtgttagatgtaattgatatacaggtatgtgatttgtacaggtgttatgttctgacaattatttcaatagtgttcccaattttttttcaccaattgcgtttttgtattcatatgcactttctagtctatacatggggtgggaatactggactctgttatgatgaaatgtaaatttatgctcattttctgttaagattatggcacacactttaatttacagtgactgcaattaggatatgcaatctgaaaaaaaattccttgtaggatttgataccaccatcatatctag

SEQ ID NO: 24954 - DNA, 486 bp, Glycine max
  Intron number 3 from transcript Glyma15g14560.2 (locus Gly ma15g14560) derived from phytozome v7.0 (chr-ID Gm15; pos 11008994 to 11009479 reverse strand)
actctgctacggtctcacaggttcttattatgtctctcttctgctctctagttcctatttgtggcctatatctacactgtggtataaaatgtgaatgcaaaactgaaaatttgcatgcgggtagcgaatgtttttggtagcttacaatcacatgatcttttgttaagagtgaaaataagtgtacttatggagaatcaagagactgttgtctgtagcacatttttagatttgaatttttttttgtcattcctattcgagctaattggcttggcatattatgctgactgttttctggaccttgcttttgaaaatgggactgattaattaacattgttttactttattttcagtttcagaatgcatttgcttgtactttttttgtttatgttcttcgggcatgggctatctgcttatttaatttatcttttgggattttaagattgtctttgtgattagtggaatggttgcaatttgttgatgacaggg

SEQ ID NO: 24955 - DNA, 900 bp, Glycine max
  Intron number 3 from transcript Glyma14g08450.1 (locus Gly ma14g08450) derived from phytozome v7.0 (chr-ID Gm14; pos 6477112 to 6478011 reverse strand)
taagtgagtgaattgtagctcttcaaacattgttgcttctgtgtattctttttttttttttttttttgttatcgacaaatgttaattgttagtggaagagattcgaacccatgacctttccctctcaccttctcccttcaaccaccaaaccaaccttgtaactccattgctgtgtattcttgcaacagagagaattgcgtgtgtgccgtttcatttgtttgagtctttacagtctatgtgactgctgctaattatgaactatgaagtatggactaatgcaattcgagaagttctgaatttgtaacactcagtgttgccgtttttctagttattgatagtgtttttccattgtcccccctttgtcttcattttgtaattatgagatttttgatatgaaatctgtgaccaaaatcatttggtaaatgaaagaaccaattgctttctattgaatgtcttgattaaatgtgcttgtaaatgtggttgccacgcttttctttgtgcaaaatctgtggcaatttgatattttgcattgttggcttagttagttagttggtagcttgacttccatttatatgctcatttcttgttttaccatttaccactgtgtttggaagtattaaaaattagagttgttttgcattaagtccaagatagtaaccattttgctctttatttgccacgggagtttctgcttatgttttctagaggtggtgaagattgactaatttgcacattttttttatatctatcctttttaaatatatattacccctcctcccctcctcaaaagtaatcttgtcttgtctaaattgtatttaccttagtatgaaatatattacagttttacattaacaaggttctctgtctgttttatagactacagatcacaattagaagaag

SEQ ID NO: 24956 - DNA, 652 bp, Glycine max
  Intron number 1 from transcript Glyma13g03200.1 (locus Gly ma13g03200) derived from phytozome v7.0 (chr-ID Gm13; pos 3156339 to 3156990)
atcttggttcactttgcaaagattgcaagccagaggtaaagtcctgaatcatagtcaattacggcctatttggatactaatcataattgcttttgggattttctctactaaaaatctagagttttttttttcagtagaaaaactttgaaagcacttctgcctttatatccaaacaaactcttaatcatactaattagtaacatattactctttgaatcttgaatttcatttcttaaggttaaggatggagaacttattagcctatgtcatttctttcatttttctttccttggattaattgatgtgaggggtggacactgacacattgtgtttggtagatcttgaattctaagttaagaagttccttacttttttctcttttacattatttaaaagaactaagtatatttcttttgcccatgatgtttgttcaaaactttttctctcctttagagggcaaaaggggtctgagattcctgtattattccaatctttttattttcacttttcagaaagaaatcatgagaatgctctgatgcttcttcagcttttcattgtacattccttattaaaaaaataaaagttaaatttactgatactatcttggtgtaacataggtggaagtggaagcacttgtaatccaaggaccaaa

SEQ ID NO: 24957 - DNA, 969 bp, Glycine max
  Intron number 1 from transcript Glyma13g26610.1 (locus Gly ma13g26610) derived from phytozome v7.0 (chr-ID Gm13; pos 29794518 to 29795486 reverse strand)
tctctctctctctctctcttacttacaaagtaaaggcacgtttttctctctttctttttgtctttactattgtatttcattcagttttgcaatttttctgcatacccatttgagtttttctggtagtattgcagttacttcttcaaatttagcgttgacgcatttcttattatcttacttttgattcacaacttggttgggattggtggttctaagtgtaatttgatccaattccttaaaaatcaccatgcaccctttgttattgtagttgttattttccaaaatactaataaaaaaagaatttattttttaactaccaagattgattctgggaatcctcaatgggaaataaaaggaatggaaatcaaaatggaatcttggttgcttctgtttctgtttgttacattaggttatgttaattaaatgtggctctttaccttttttgcagtgtttcctaagttttgaatttttatcccgaacagtatgttttcttcattttcaagactgttatcctttattacatgaagtgctaaaattctgtcctttctgcttatctagcgtgtgtgtgtctgttttccttgttttctattttactgttcaaaaaatgatttgttttcttctttatattggcttctaagaacagtggagttttaagtggtagcaatcgaagtggttgattaggaccacataatgtaattatgaggcaattgcctgttggtgtaagttaattgatggatttgtttcaaaatctctggttgaatttaatctgatctggccatttaatcattgatcctacttttataaagttgcaatttgatttgttctttaacttgtcatagtttggtaattggatgcgttaaatgaaacttctttagttcttcagctgaagaagtgagaaacatgtattctgatgaagagctgtttgtttattcagagtagagtttgttctgtgaagaactgagggaggtt

SEQ ID NO: 24958 - DNA, 865 bp, Glycine max
  Intron number 2 from transcript Glyma13g43130.2 (locus Gly ma13g43130) derived from phytozome v7.0 (chr-ID Gm13; pos 42924124 to 42924988 reverse strand)
cactttgttaccccttggagtgtttctgttgccaggtgacactcttgattttgattttcatgatcattttcttatgtttttcagccttcattttcttttgattttagattcaaattggatgtttgtttgtcagtccctgaattggggatacttgagaactgatcgaacaagttttggtgttttgttatggatgaagcatcattttctttttatgtcgcataaagagagatctcaaataagtgactgcggtttggttaatttatgtggtaaaaaaatttggttccgtttcagctttatatccttggaatgctgctggttaatttgcgtgatttatgcatctttgtgtatcttgcagctatttgttcattattgtcttttgatttgattataaacaaacaaattttactgatgcagccttgtttatttttttgacagattgaatcacttatgatgtgatgattaattactataaatatcacgagttctgaatataatatgtcatctttctaaattttttacaccagtggcaactagactttcgaaatccagtcatatctctttctttttatatatataaaaaaaattgggggttgcatggaaatttgtacttaatcatcttaactgtttgcatttccttcacctttttctcttctgaaccattgtgtttgtttgttgctgttgtgatggttgaatgcgatgcccttgatagtgcaattctattttttaaatggagaaaaaggcgatacttctaatgtttgtgtgctgctttctgtactatagccagagactatttagctattatgcgtattcttacttgttatgctttttagtggttatacactattgcgagatccccatttcaaca

SEQ ID NO: 24959 - DNA, 570 bp, Glycine max
  Intron number 2 from transcript Glyma15g19810.1 (locus Gly ma15g19810) derived from phytozome v7.0 (chr-ID Gm15; pos 17242380 to 17242949 reverse strand)
gaaggtatccttcccataaattcaattagtcacaaaaattcttcaactttcaatcaattttctgttaatttcgttacacaaattatacttttattctatatatctaaggtttgaattcaattagaatacactgaatgggagagctcaactgtctatagtggtttataccaaaaaaatatacaaaatgtaaatgtttattaatgatgtaattataaattttcatataattaaaatttattaactttatgaatagaaaatgactagaaaagactagaatgatttctaattcacacaagttcttaagtccaaaccttgttattgtcattataccttaaattaagaaaagagtaattgcttgttaattaatagtgtaactgcactctcacatgtacaaaattaaactttatgaatagaaaatggtttaagaaaacaaaagaatatagcataggaatatgtgcttaattgttaggtccaagtagcaagccctattatcaaacacttcggcttacttatttcaattttctgcccatttcagtcttcctggtgatttcggttttgaccctcttggat

SEQ ID NO: 24960 - DNA, 713 bp, Glycine max
  Intron number 1 from transcript Glyma13g24260.1 (locus Gly ma13g24260) derived from phytozome v7.0 (chr-ID Gm13; pos 27636176 to 27636888)
gcgcgcgccagggcaagagttttatcctcaaccaggtgattttcgcaattggaatgaaattttcttcgcagttgggtttggtaattagggttttgttacgtggatggtttgttcagtggtaattattagtgtctatgccacagtgtggctttctgtgatcaatgtgtctggttttgattaattttgggacaaccgttttttttttgttgttgtgaagtttttgctcagtgtgatttttgttataacatggtttgaatgcgagattcgaaacctaattggaaggtttggggacggttcttgactgtctaataggctagtggtaaagtggctttgtgatgttgagagtgtctgatcgtttgcttatctgtgtttaacaattagtttgtggattattattgttttcatttagtttaagttgaaaatttgggtgccaaattctgttgctaatttctagcacttgtggaagacaagtgctttggggcttctttttgttccatttacttgatacttgattgagtcaccgagaaatttattttactgtaactattagtttttgtctcaatatgagatgtaacttttccgctttctgcaagtattgaaatacaattactaaataagtgagactttgttaaattgttattataatctgtattgtgtcttatgttttttgtatttcagctcttaggaaagagtagtggatttcaagtagcatc

SEQ ID NO: 24961 - DNA, 778 bp, Glycine max
  Intron number 2 from transcript Glyma15g00610.1 (locus Gly ma15g00610) derived from phytozome v7.0 (chr-ID Gm15; pos 344154 to 344931 reverse strand)
tcagggtatgccatttccccccactaggagaagttcctttttttctcttaaattttgaaattaatatttagtagaacgaccttttcaaaatcatgttactgttgcctgagaatggttccttcagtacgaaaattttggtagcgaggacacatttactaattacaatgtctgtttgtgggtatgcgctgccttgaggttagattttggtgggttcaagtttcggttttttaacatattgatttggaatggttttattgaaataccggcatctttttgtttcaatgaattctaattggttttcaagttgaaccctgatggagtctttgttccaattttccactttgtgatttattccacccatgtttctttgtgtggagatgtatgaagtatctgctgtaatctataataattcttggcattgttggcatttttttttgttgcatttatcataggaattgttttgtaaaaatttcaaatggattagagaaatatgtaagagctgctttggagaattgaatccgacagcactgcaccttagttatcattagaagaaattaagaaaagctacagaaactaatcatttgtattagtgtggaaatcatgtagaagctgctggtaagaattgtccacatcctcctacgtgtgtgtattgcactcctgtttcccgagtagcttttccttgacgagtttaggatttttgtggaagttactcctgactgttcagaatgctttaattaatgtagtgaagaggtagctgttgcagctgaggcacctgctg

SEQ ID NO: 24962 - DNA, 462 bp, Glycine max
  Intron number 1 from transcript Glyma13g29160.1 (locus Gly ma13g29160) derived from phytozome v7.0 (chr-ID Gm13; pos 32088148 to 32088609 reverse strand)
tgcagagagagaaaaagcaagtaagtgtgaacctagctcaaaattcagctccaaaacatgcttctaagctttggtcttggatttaaggtcttgtcttggacacaaactcctttgtttcagataaaggaaaagaaaaaaaaaacaaagaaatctgattttttttttttttttttttgcattttaaggtacacttgagaagcaagcatgaccatttggaaaattcaacaattcttgaaataacacagcaaaggtctcttttccctccaaagctaccttttttttttttccttcctctttattttgttttaattaatgattctgagtttctttcaaatccacataatggaaggttaatttttgttgttgacaaaatagtggaactcatctgaaaatgcaataatgtgttttaatgagttgatatttgcaggttccgaatttcatctcatttaccctttttggttt

SEQ ID NO: 24963 - DNA, 587 bp, Glycine max
  Intron number 3 from transcript Glyma15g11890.1 (locus Gly ma15g11890) derived from phytozome v7.0 (chr-ID Gm15; pos 8795482 to 8796068 reverse strand)
tcacttctgaatatatttatccttatagaaatcaggtccgttttctttttttcctccgttacgagtttttggaacgtagttttacttgttttgttgaaatttggtagtgtgttgtttttagaatgatattatcattatatttttttattcatttaatcgtttttgtatagcgatttgtgatgctgtgtaagcgtgatgcgttttaagtttgatattatcgtaaatattgattttccacgaattcacactgtttgtaacttggaatcgtgtaatgaagatcggatgactcatattttatgttggtaaatcaaccatcaaccataaaacacatctgaaatctgagccgtcgatcttcatccaacggtcacaaatgccttgactgtgaatgcatgcaaaattgactgcacccaatttggtttttttctgaaataagtgatgcgatagagatacatggagagaaaaaaatgagtgtgtagaaactgtcatcataatttgttgtaagcatagaattactgatttttgtaatcaatgatcacaagattttgacatctattaataaccatttctgctggcagggtggctttgac

SEQ ID NO: 24964 - DNA, 709 bp, Glycine max
  Intron number 1 from transcript Glyma14g10660.1 (locus Gly ma14g10660) derived from phytozome v7.0 (chr-ID Gm14; pos 8866796 to 8867504 reverse strand)
gttttcttttggtgaggtgagtttctgttctttcttacattcgtgtgttactgtagttcgtttttgttagggtgtagggtttagggttagggtttagggttagggtttaatcgtaataatattgatgaaggctctattataagagtcaacagcaggggcttgtttcaatggccacctgactgccgcttagagccaaaacgaaagaaccagttgaagatccttgaaatcaaacccttctgtttcaagacacaatttctggtcaaattattgttatcattaataataattttgtgaattgttggcacttaagtcagacacgggtgtttgttgttttttttcctctctaaacaaacaaccttttgcatggtgccaaaacagaatccggctattgattcacgattggagggaccttctctttcgtggttccttcaaatttcaagcagctataatttttctctattttcttctaattggagtaagcttttttttttccttcttacaatccccaaaacaaggatagttacttgtaccttttcaacttttcaccatttttttggatatagaattgattcctagctatccaaacacaataatagtaacttttggcaaatgttgcatgtgaatttcaaagttgagttttgggttgttttttgtgagcaaatgtgtttaccctgctaacttcatttaaatgattctttaatttaggtat

SEQ ID NO: 24965 - DNA, 517 bp, Glycine max
  Intron number 1 from transcript Glyma16g34660.1 (locus Gly ma16g34660) derived from phytozome v7.0 (chr-ID Gm16; pos 37265902 to 37266418 reverse strand)
cagctcaaatctgcaaactaggctttttcccaacggtgggttttatttttctctgatattcctaatccaatttcataaattatccctttaattttggttaatctttcatgggttttccttttcttgctcgaaagttggcaactttaaattcctgctatagaattttgtgctattagatgcaagcaaatttgtgttctaatctcagtagccaaagcaatttttttttcttctcattttctgaacgaatgatgggaccccacttgcatcatcatcatcatcgttctagctattactttgcattttaggaatacttggaaacagttttaagtaggaaaatcatgtctgaataagcattgtgtagttttcgtgttgtgtaccttcactcttctgtgatttccaaattcccttgtttattctctctgactttctctttgaattttatggattttgacacatttgttgtgccgaaattctgcttgcagggttcagtttattcaagttttacaatttcgtggct

SEQ ID NO: 24966 - DNA, 388 bp, Glycine max
  Intron number 1 from transcript Glyma16g26920.1 (locus Gly ma16g26920) derived from phytozome v7.0 (chr-ID Gm16; pos 31012465 to 31012852 reverse strand)
ttccactattactcgaacttccctcggtcccagtaacaatcacgcataccctttttcgttttcactcttttctattcatcccaagtgggtgctgcatcttcagattccaaaagtttggatttttataatgtgggtacgtgttcgttttcatcttatgttgatctagcttttttacgtgatgcagtgctttgaaaatttgagggggattgagaataagtagatttgtttttgtttttcatttacaaagagaatttgccaattttggttctgtagaagctttgtgtttgtgcttgtattaatatgttgctgaagaatgcgtttgtttggatagatttagaatgttggtggtggtcttgttttcaaatgttttgtttgatctgattcagga

SEQ ID NO: 24967 - DNA, 185 bp, Glycine max
  Intron number 2 from transcript Glyma15g27750.1 (locus Gly ma15g27750) derived from phytozome v7.0 (chr-ID Gm15; pos 30323688 to 30323872 reverse strand)
aacatctttgcttttggtttgtttgtgtcccccatgtaagtttcttagagtggttttttttttttttcttacaataattgagttcggaagaatttgttgtttatcctattcctttcataatttcattgataatgatttttgttctgttttgatttctagaccgacatttaggagaatcatccgaa

SEQ ID NO: 24968 - DNA, 727 bp, Glycine max
  Intron number 1 from transcript Glyma15g41680.1 (locus Gly ma15g41680) derived from phytozome v7.0 (chr-ID Gm15; pos 48863554 to 48864280 reverse strand)
cacagctgccagaagaaacaccaagcgacccaagtgtaataatgccctctcaatctctctgatctcgtgttttttcgactttttagctccattttcagtgacccattttttgttttttgttgatttttttggtttgtgatggaaatttcgtattttttttatttgggtatgttaggaagaaaaggggttttgggtttgttgaggtttttctgtgttaggattaaggctttataatgcccaggtagaggtacccttgttggagttctatttcattatgatatgatcgtctgtgaaagctaaaaacccactttttatttattatttaatttgaactttttagagtgagtagtggtgttaaaaaagcttccgatgttcatattggttgattgttgacctaatggaagagttcaatgcagttggatagtgtgtgctgattttagattgtgattctctactgttttgaagtgaattacatcaattttgacgtttgattaattttattaaatgataaatttaacttatagtataatttaatttaactaattttaatggtgggattgtgaactgcaaaccctgcagatttgaaataaatcgcaggggatctcatttggctgatttaacagtgctttttttgggtgcccactgaatactgagctgacatgagatctctttgaaaattcaatgcctttcagattcaaagtttactcagcaagaacttccagcgtgt

SEQ ID NO: 24969 - DNA, 318 bp, Glycine max
  Intron number 3 from transcript Glyma14g23550.1 (locus Gly ma14g23550) derived from phytozome v7.0 (chr-ID Gm14; pos 27912975 to 27913292)
ttcaggtatgatggttgtgtgtgtgatttgatgttgcttcctctaatgtgataaaagggtggcttgatttgtgaattcttacaagattaggtgtttggtctctacttgttttaatttgagttttgaaggggtttgacttgtagatatgtttaggggtgggaagctctgttctgttggttttttcattgtttttagtttcttctgttcattcatcacaattaaatttcttcttttattaaaataatgatcaaatgttggtaaatgtatttccttgttctctgggtttttaattctgcaatttcttcttgttgatgcagg

SEQ ID NO: 24970 - DNA, 747 bp, Glycine max
  Intron number 1 from transcript Glyma14g07190.1 (locus Gly ma14g07190) derived from phytozome v7.0 (chr-ID Gm14; pos 5333577 to 5334323)
aggtaccaatttagtgcgtctttgtttgaatcactttatattaactactactgctaatgctttactgtttttaattttacgtgtttaattgccatgcattgtcatcctttaaaccatcatttaaatcactgcttagttagttgttttgaagtcaaagcgattctaattagtagtgaatcttcatatcttaacatattttaattggattttaatgtcaatcagaaatcatagttgatgtgacttttaaagtggttataataaaaagtcagcaaacatgctgctctgtgaatggtagttttgtggttagatgacagcctttatacaggtaagacggtagtgcatctactatttactctcctaattaaattcttaatatatataggagtatatggttatacttacatttagtaacatttgaccactttatcatgtcattgtcatcttactcactaatatgatgtggtgataaagtgaattcttattagatgtctttatacaaatattgtttattggcactatataaattaaactcttatttttttattggattttttgagaaaagtttttaaaaaagaaaaggattattttctaaaaaagagtggttcccagacctgcacttatataagtaacatttttatgactaacttttagaatttactcgattttctgttttggtggggtggggatgctagtaccttggtttcttaatgtaatgttatgttttgctattgtaggtctggtacaata

SEQ ID NO: 24971 - DNA, 628 bp, Glycine max
  Intron number 5 from transcript Glyma17g01820.1 (locus Gly ma17g01820) derived from phytozome v7.0 (chr-ID Gm17; pos 1132759 to 1133386 reverse strand)
tatcttatccaggtatctatcttattttctggtctgcactattatggtatgatggtatttccttagtgctcatcagtcatcctctgcaatatagttgcgcttcactgttttttcttcctgcatgttccatatttttttcatggaaaagtgctctttattttggtttttagtgtcgcatgatgttagccagacaccatcatgccacagattctcattttattacctgctatagcatcaacatttgaacgcccaactccacccattttgctgaaacagaatagtagtggtcactttctttgtatgagaaaaaagaacgaccgttttgggttgagagtttggtttctgaaatatcatggcatatgaattttccggagacttgtatgtgtcgattgttaaccaaatgttcaaacataacttatttgattaggaaattattgacttttagaaagacaatcatttttgtgtattcattatggtttactacgtctagtttatgcactatgcttgttgtgcaaagcataaatgtttaagaaaaacaagaacacttctttgatagttgatgtcaataatcataatactgaagcaccactttggatttaggtttgtatttggatatacctctggatag

SEQ ID NO: 24972 - DNA, 830 bp, Glycine max
  Intron number 1 from transcript Glyma16g22290.1 (locus Gly ma16g22290) derived from phytozome v7.0 (chr-ID Gm16; pos 25749493 to 25750322)
tacggtccccgagggtatgtcaacgcatcttcatctttctccttctttattccttttccatccaattgtttcttttccattttctcaatttctggggtttggtttctgtgcggtgatgcttgtaattagaaatcgcgtgtccgtctaaatttgtttaaaattagcatttaattaggttcgtgtgtaacaaattggggttgagtattgtatgaatttgtgtttaattttttcatttgagtcatttgggcatggaaaatgctttctgatcttttcccccttttaagtttgtgtgtattttgaataatttattgattatatcctatgtcttgatgaggtttttacatattttctcagctatttccaatgaatatggctgagaaagtagggttgtactgtgttgttacgcacacgcataagcttttactttattttttattctttaattaattaatcttttgagttgtgccagtgatgcattagttatgttactccactattattgaccttgagctgcatcgtttgtaatttgtatgatttttttgtgtgttttattttgtttatatatgttcagcttgatggattgtgtcttggatagattatatggttgtggtccatctgtgatactttctgttgttataggtggtctgattgatatgttgttattttttttttcatattgtttggttgtgggagttgtgatgaatatgatagatctatgagaataggaattaaaattaagtgtcaggggaaaacaaggttgggtttggctttattaacgtatgttgagtgggggatgttttgtttttttgggtatggaaatttgaagggca

SEQ ID NO: 24973 - DNA, 1014 bp, Glycine max
  Intron number 1 from transcript Glyma13g09060.1 (locus Gly ma13g09060) derived from phytozome v7.0 (chr-ID Gm13; pos 10063871 to 10064884 reverse strand)
aacacgcgtactcgttggaccgaagaggaacacaggtatgtgtgtcaaagaaagaaagtttaattctttttgtgtttcgttctctcttttcaatttttggaatgagttttaatgattgtttctttctgttttgactgtagaaaactcttgaatcaattgccttaaatcttttctcttcttcttggtggcagtttagattaaatgttaatttatggttttaacaattctagggtggtaaaaaaattatagccgtttaatctatgggcatttgaattataaccctaagctttttcttcttttctcaatttcccttcttccgctggaatttccccttctccgacacaaaatcaaacaattttctatgttgtcgtacctcggagtcctagaagttgcaaagggagtgtgctgtggaaggtggcaccaagaaccgcgaagagagaaattggtagggttaaattgggaaagaaggaaaaaagaaaacatatctcaggccttcatttaaaggataatagtttagctattgcttttgtttttcaaatttttaagttttgattcatctactgttaataagcttcttgagatttttttttctttgtgtgaaacaattgaacacaaaattcacccctcgtggataagttacaattttgttatgatgaacacttgccctctggtttctgttttggttatgctacaatgtggggtagttcatgcttttcttataatgtgtatggtggttacaatgtgggatatttgtggttgtggcttgcagggctggtctcctcttgtatctttgtatatgccaacattctccttgtggttccagcccttgtttttcattttctctcttacagtagttgcatagaatatatagattggttgggttcaatttgtaagcattgctatttctgtgctttgctgctcggtttagaggaatattttctctatcttatgtaccttgtttttcaaatattcactatcttttaacctttttgtgacaggttatttcttattggg

SEQ ID NO: 24974 - DNA, 992 bp, Glycine max
  Intron number 1 from transcript Glyma16g25540.1 (locus Gly ma16g25540) derived from phytozome v7.0 (chr-ID Gm16; pos 29528835 to 29529826 reverse strand)
gtatccatcatatctggctgtaatattgcattctctctcgctcttgtttctattattacttttttcattgctataattatttctcgtatattttattattctccaccattttgtaatctctccacgataacacactactccctccattttactgttttagaataaaaaaaaactgttctgaattaattgttgttttacaaaactaatatgacgtagtagtattaatttttttttcttatgtaagtagttactaagtacgtaattaattagaaagacaaataatactctatattaggaagtcatatcacattttttgtttttgtaatttaacatttaacatttttttggtctgatccttagaacactttcaacattgaaaaaaacgttatcttaaggataacaaaaatataatttacacggactaaaaataaataaaaaacataaaattgtaaaaattaaaaaaatatttaagtttaattatatttcttaatatcatgtcccttaaatatgtgattaagtttaatttttaggtctatgtatatataaaaaaatatttattggaacatttcagcaccttagttaaatatttgatagttcaagaaattaattttttggtttttagttgaggatgttctggacaaaaacaaaaaaaaacacataattgtaacttgtacattagttttgttagccaaaatatcttaattatatacttgcatgaagacatttagacagtgtttttagtattattctctaatcaaaactagaattttatctgaataatagtaaaaaaacaaatgtaaaaactcaatataaactatcaacacgaagtgaaacttcaattctaatttgaaaccataacaaaagcatctaaaaaactaagtctaattttgatgattatgttttatttatagatggatttgatgcacgagcttaaatttatttatttttaactctatctactcacatgcataatttcatcagacactggcgtt

SEQ ID NO: 24975 - DNA, 926 bp, Glycine max
  Intron number 1 from transcript Glyma16g01260.1 (locus Gly ma16g01260) derived from phytozome v7.0 (chr-ID Gm16; pos 919175 to 920100)
gctcatccgacaattccaagtcccaggtaagatcaccaatgtccaaccacaattcgattcatcattcgccaaaaagatcgcaaatttaattctgggtctctcgattatttcgcaagtatgtggttttttcctgtggcgtgcatgatgtttctgttcaattatttggaggttgttgttctaacgcactagtaaaatagaaaaaatagtccctcacttccacggttcgaattccctttgaaagaggtgttcgtccacagtgaatgtgcctaactcaactgaatttttcggttctaaactaaaaaatagaaagatagtgatttgtgcggaattctaattgtcggtattaatcattaaagcttgttgaagtttcagccggtgtgtgttattttccgtttcactgagattattacacaccaaagtaatgaggaggtagttgggctagggaacttgtgaggaggaggttagatgtgaaaaccattgtctaataagaaaattgaagtctttttgtttttttatagccgatatgaataccgctgtttacaatttagaaaagtaaataaattgcatcagttggttggattggcaaatgccacacatgcatacaactaatacttgtctctgttatttgtgatttccaatttttggaacgggttataagaattgaaagccttgagttttctgcatttattttgctcattagattggtagcttgttcttttcttttaaaggacacgtgtcttccttaaagctctgtcttacgtttcaattgccggcatagtacctttagtttgactaagttcaattgaagaatcaatgcaaacaatgaaaattgttaaacatttggaatttgtgttgctttcttgatctctttaagtatctttttttgtacagagtgatcttgttgaggctggtgaaaacattgctca

SEQ ID NO: 24976 - DNA, 857 bp, Glycine max
  Intron number 4 from transcript Glyma14g08680.1 (locus Gly ma14g08680) derived from phytozome v7.0 (chr-ID Gm14; pos 6701753 to 6702609)
ctgatcatagattatgtataatcatttgtatagttcatttttttcttagattttttttttacgtataacaaatcatttgtttcttggttgtctttttcatatggcaagactgagtatcattcgatacagaattttaactcatgaaagtaatttatcagataatttattttttttaatctaaaatttattatttagatccttttataaaatataaatttttgaaattttaaaataaaattttaaataactaataatgagaaattttaattttcttttaaaaagtgagaatttgaattttttttttgataaaaaacctttcaaaacattcacttatttcctttctaacttttatcctctcttccacttgaaagtttttgaaattttattctttaattcgtgactcttccctctcacatgatcctcttcttcaagaattgaactcactgagcgttgatagggtgcaggcgtaggggacacgtagaactgcacccactaattaggggagcagtcgtcgttgcttctcacgtggcaaatgtgctcgtcgacatggatggtctgggtcatgccttgtgccattgactgaatgttgtggtcggatgtgatggtgtacgtgtgacccggttctcttacgactctttatatcacattaatatttttttctttggaaacacaccaaccgtatcttcttttctctttgcattaattttatttcaccgtcataattttaattttttttattcaaatacaaaattttgaaaataaaataattttaattaaagtatttaaaatttttagaatttaaaatttttcaaaattttaaatttcttcttctaaatacactaagatcattgttgaag

SEQ ID NO: 24977 - DNA, 482 bp, Glycine max
  Intron number 1 from transcript Glyma16g25170.1 (locus Gly ma16g25170) derived from phytozome v7.0 (chr-ID Gm16; pos 29104706 to 29105187 reverse strand)
ggtacgtacccttcctcacttactttattttaaattctttaattttgacttgtctaatcacattttaatgttaaattttaaagagatcaaattataatcacataaatcgtaatatgctccggtacgagacatgggtttaggtacgcagtacgcggccttattaccaagaactggtccttggggatgtataaaaccggtgcactgtttattttgtttgagttaccatatgcaattttccccatggtctctggttcatcttcctcttcttcacgaatttgtttacaaattttaacgaactagttcaaaaaccaatcatgaattggtatgcacgaaccaattcgtggttttatggtgaagtgagcgaattttgtaacttaggatcaaaatagatgttaacttgaaaaaataccatacatatcaacaaatggacatgaggtatttagtctgacttcaaacaatttttttattgaacagggacaaat

SEQ ID NO: 24978 - DNA, 613 bp, Glycine max
  Intron number 2 from transcript Glyma16g18110.1 (locus Gly ma16g18110) derived from phytozome v7.0 (chr-ID Gm16; pos 19903567 to 19904179)
actgggccaagcatgtagaagttgacagacattttataaaagagtaggtggatgtaggcttaatttgtatgccatttgttcctacttcacagcaagtggtagacgttcttacgaaaggattgcttaaacctaattttgactaatctataagcaagttgggtatgctggacttctaggcaccaacttgagggggatgttgacttctaatttaaatttacaataaggattttagaaaattcaggaggctaagatcaagatcagattattcaaatttgattggatattattctccatattttctccctatcttatctttgtgtttattttataatcagggtggttaaaacctctcgtagtcgtcatctctgcctatatatttcttttccaatctgtgttggtgtttttttaccttattacttttctatcttattcatttctaattacttaaacatatagctgtagaatcattttgatttaagatggaaatttgatacattattaagttgtcatttgtatctggttgtttggagcttatggtacctaaaattgtgaactgatgctcaccttctaatcgacagttggtggctagattgaccaaggaaatagttgaaac

SEQ ID NO: 24979 - DNA, 825 bp, Glycine max
  Intron number 1 from transcript Glyma14g14520.1 (locus Gly ma14g14520) derived from phytozome v7.0 (chr-ID Gm14; pos 14830227 to 14831051 reverse strand)
gcttaactattaacaatatcaaggcagttacctcggtaaggataacaaccacatttgttaatccattcttttatgaacatagctcatttctatgacactttggtcttgtttgaataaatttctttataagcacaaaaaaaaggtacataagttgattttagcttatagagaagttaaatatattttatcttattttcttctcttaaaaatgtttaagagatctatgtcttgactcttgatgtattggtccttcagttggaggtctttgtttttatttggtttagtttggtatattctttgcatccgactctttttattaacatgatagtggtatttcttgtgccagagttgagttttacatcttttaatgaaataccttttgcctataaaaaaaataaaataaacagatcttagacacatgtttaatacctacaccagaatataccacacatgagcacttcaaagttttctactgtgtagccatttccgtgttgtattattggatgccttctgcatgttataccttttgaattcgactacatcaatgtgaagggtgtgcattttagataattagtgccaagttataactactaatgagaaaatctattgtttagatatattttaataaattcatagtttgttatacatgagtatgtaatttttcacaatctcaacaagtaaataactgatcttctaatcaacaattttaacttgtaagtgcactttatactctatagcctatagtacactcctcacttcagaaaaatcaaatcataacttactctctttgcatatccttgcaggacatctttgctggtggaattg

SEQ ID NO: 24980 - DNA, 326 bp, Glycine max
  Intron number 1 from transcript Glyma15g10400.2 (locus Gly ma15g10400) derived from phytozome v7.0 (chr-ID Gm15; pos 7536351 to 7536676)
ggatacgggtacctcatcttatgttattcttccatgcccttattcttttcattttgatttttttttcgttcattgtgttttgatttcggatcaaagttggatacagttccttaagtgttgtttgtattgttctccacttagaattgttaattcgcgtaatccttttaatgcaaacctttgttatcagaattatcgaggtgaaattccaattccgattgaaaaataacacaaaaaacacctaaggaatttatttaagttttgtccattggtttcttgtttttgatgatgtcaatggccttttgtaggtgcaagcattatagaagaag

SEQ ID NO: 24981 - DNA, 632 bp, Glycine max
  Intron number 1 from transcript Glyma15g21890.1 (locus Gly ma15g21890) derived from phytozome v7.0 (chr-ID Gm15; pos 20281769 to 20282400 reverse strand)
tctgaagtgttcaagtttggattttgtgcttctgggttggtttgttttgccttttcctcaactgggtcgaccgtgtttaactgaatttgtctctcggaaaccgtgtttttgtctgaattagaagcctgatctacaaattttggcattctagtttctccaattgtgctggaattccgtctggggttttagatctggagaaattgatgtgtagcttgtgacaatttgtggaagaatttttattttttttcttgatttgcggagatgtggtagtttccaagtaagggttctgggggttttgtgctagatttgaccaatgatcaaacttagaacttgaacttgaactttttttattggctaaggttaattgttagtttattgttaacgggattcagcagatcttagttgttaattgttagcttcttcttttttttttttggttagtgggagatttgatcccactatttcttcccatcctttcttccttcaccactttgaacttgaacttagttgggggacttggctgagttagactgttatgtttaaattgtagtcatggtggtgtttttggctgtgaatttgctcatatgtgctaattatgtgttcttgtttgatgttactctacagaagttaaa

SEQ ID NO: 24982 - DNA, 828 bp, Glycine max
  Intron number 3 from transcript Glyma14g01320.1 (locus Gly ma14g01320) derived from phytozome v7.0 (chr-ID Gm14; pos 745331 to 746158 reverse strand)
attgacctcgacaaaactgagaagaaggtaatttaacgtctctctctttctctccctgctatgaattcaatcaattggctgttaatttaccgtattacatattgttttgttcaatgctttgattattttacatttccaaatgaatttggttagtgattaggaaaaatgctatgaaaaggttgaatagtcttatagtatggttttactgtctttttcattagtccaggatacataacgtttagcttttcttagttatgttgatggatacaattgggttagtgcttgctaggttgctactcggaaacaactctaagtggtgaaggtcgtagttttccttctccatctccatatattttcactgttctattttttctctcttcattttccatttcttttacaaagtgctcacttaggctagtgggagaatttgtttggctgttggaaatatgataaattcatacaagatattatggaagcattagttgcatacttgcatttcacttagtatgtgcatacttagtttccttttcagtttttaatggttcaagttcataatatattttttttaaaaaagataattcctagtgactgtctttcttctatattcttcggagagcttgatgaaggcagtgggtgtcattgatttttatatcaaacacttgttgcgatcagatactagcgcatccatgtttgaataattcatcttagcaatatagttctccgaatttttgtaagattatatatatatatgtgtgtgtgtgtgtgtgtgtgtgtgtgtgtattatctgttctgtttctgattttctctgcagggggaacttggagcca

SEQ ID NO: 24983 - DNA, 692 bp, Glycine max
  Intron number 1 from transcript Glyma16g33370.3 (locus Gly ma16g33370) derived from phytozome v7.0 (chr-ID Gm16; pos 36307764 to 36308455)
tcttccggcgccgccgctatctcggccgcgcaccagttattcttctcttcatgtttgcacatccaactttcctttcataatgccccaaattaggttatagattatttgggaattgggggttcccattttaatgcaaatttattatctttattttgttactagtctttcccttggatgggtttttatttgattgcgttgccgagctgaaattatagacatgaagctttcagacacaaaatatattaatcccttttcaatgttttaagtaaaaatgatgggatgaactatgtgcgtgtttgtgtttgtgacagtttacgttttaatggaaaaataatttttctctcaagttttttaagaaatcgtattttttttaaatcaaaataatggaatgaaagctaatcgtatttttttaaaggaatcataatgtactacttttcagctgagttttgagatgttcaatgttaaaactgtactaaattaaaacataatttgccctttctgttctgctatttttataatgtgaggtttatatttttagatatgaggagtatgtgaggtttaagttttagatatgaggagtatatttttaaaatttataatcatatgaaacatggggcctttatttttgtttttctgattaaaattctaatgctgtagatcttcaatttgattacttgggtcaacgatttctg

SEQ ID NO: 24984 - DNA, 932 bp, Glycine max
  Intron number 2 from transcript Glyma16g25960.1 (locus Gly ma16g25960) derived from phytozome v7.0 (chr-ID Gm16; pos 30106384 to 30107315 reverse strand)
atctcagaaagaatctctcggcgcttgatcctgaggtaatgagtgcacttcttcgagtctgagtttacgattcacactaaggtagatgacgagtgttgctactcggtgaggttctttattggtctgatacggattttctcacaattgaatgagattaaagatgattaatgtaattgttttcagttactttattgggtaggatggtacattgacctgttgattctattattaagtaattttggtagaattattacttaaaatcacttgttccatgatttttgttttgagattgtttttaaagatgcaagatgctccggtgactgcaggcatagtagttgtttgaagtagagtagaaagaactcatgaccaccagttaaagaaaacaaaaaaaaatatgttgtcctgtttctactctggcaacagactgtggagtacaaagctttcataacaatcaacagaatcatggccaaacaattttttgagttttaaattttgaaaacaaaaactattttcaaaaaagattgatcaaagaggtccctactgatttgcatactagtgaaccttttattctatgggaaggtattgtacaaaatatatgtaaaataatggaaaactacttaggtttattgaatgtggaaggtagtggctgtctcaatgtcatgttttaacttttaaccatttatacctcttcataatgagggaatactactagaatagggagaaccactgggtgctctatcggtagatttgttgaaaatgggaaaaaagatccattttgattgatattgttccaagtcctaagagagagagagacatacctaagctgctgattttttttgctttcccatacaaactcaatttgttaaataatgtcattatgacgattactgttaccagttaccttttgtatgaattgtagggctgttcattgc

SEQ ID NO: 24985 - DNA, 597 bp, Glycine max
  Intron number 1 from transcript Glyma15g20210.1 (locus Gly ma15g20210) derived from phytozome v7.0 (chr-ID Gm15; pos 18017440 to 18018036 reverse strand)
agactctttcggtgtgtatttgtatgctattattatgcttatgcacttttattcttgtttccgattttcgttctttttttgttgttgtagtaagttatgtactctgtttctgctgagacctctttgatgttttttttcttttgtcgctattgatcgcttcctgcggaaagtgctagttttattacaacgtgtttctttctgtattgttgaagaaaagactattaggaactgtttgttttccttcttacattttgattttgaaatccgctttctaaaataattccatgctaatcgctaagcaattagtttttcatccaaaatctgttaaattttgaaaattgatttcaaaacaagtgtttttaaagcttaaaaacagagacagctagcaggtgttttcttgttttcttcttctgttttgtggttctagctcaacggtgtgtcatttagagtaatgtacggtctggcacgagcttggtgtgaaagtttgttttatttgtctttttgaaaagaaaaaaaaattgaaaatagaaatctgacatactctaaagattttaaccctgtgcatttgcttttatttttatgccacagaacttttac

SEQ ID NO: 24986 - DNA, 478 bp, Glycine max
  Intron number 2 from transcript Glyma16g04580.1 (locus Gly ma16g04580) derived from phytozome v7.0 (chr-ID Gm16; pos 3873289 to 3873766 reverse strand)
aagaagaaccaagcacaactcctgtccctgagagggtatgcccaaattgcacatgacttctcttggattgcattattgcctttcccaaacataactgcaatttcaataattatgattgctatcttcgttaattttcaataagtaacgataattatgactgctatcttctttaattttcaaaaagtatgctggggttgggtataatagttatactatttattgcacttattgtcttttttgtttctgttaatgtgttgggtttggctgttcaggaaatttgagtttgtgatggagaatgttttaattcataattttagaataacgtttattatgttccacacttattccagactgcattgtagttgttgtttttagttaatatagatagatttggcagtaccttacttaccttatctgtggtgtatattttctcattgatgcaggtacaagtaggtaactctcctatatataagataga

SEQ ID NO: 24987 - DNA, 476 bp, Glycine max
  Intron number 2 from transcript Glyma15g23860.1 (locus Gly ma15g23860) derived from phytozome v7.0 (chr-ID Gm15; pos 24030650 to 24031125 reverse strand)
gtggttggaacatcagcaatcgccactacattgctgtcagttcctacctaaccttctataaccactcttcacttttttttttcttttcttttttctcttttaataaaaatcaaacttctaacgtggtactagtcatttgttggtttcatttgattgtaaataaataaatttctctttaagtgaaaaaaataagatgaaataaatttgagtttttctttaagttaaaattagtttattaagaagttggatggaagaattttctatacaaaattaagtgtataaaatgattttggcttatgaagaaactcaatttattttactttgtcatattcttctctttgtagtttaaaactcatgatttattctgtgttgtgatgtctggactagttggaactattaataatgtttggttaacttgtggttgttggctttttggtgcagtcagttgttttcaccgcggttcccttctttgttgt

SEQ ID NO: 24988 - DNA, 627 bp, Glycine max
  Intron number 3 from transcript Glyma16g04500.1 (locus Gly ma16g04500) derived from phytozome v7.0 (chr-ID Gm16; pos 3799689 to 3800315)
catcatcatcatcaacaacttaatcgccttacaaggtgctgaaaacaacaacatcaactaaggggatttggtttcttcatgattttcttcccccacttttctaccctttttcttttttctggcttatggttggcttcccagagaagatgtgattttgggttgatgggatgtaatgatgttgcccgtctccaattttctttcattttgtttggtttcaagaagaagaaaaatggggttttgattgatgggttgtaatggtgttgttttccctttttagagttgctgagaattctctcagaggatgaaaagcagctaagggagaaaaaaattcttttttttttcatttcactattcgtttcttcttaacaggaaaaaataggtttttgatgatgtaaaaaatcaagttttttttaacatacccagatggggtaaagccgtaagaatatacttttttggggtgtaaccgtttttttatttgtttttctttttttagaacaagagggcattggatctgttaattctgccataatgtctgaaatttacgtatttttatgttttttgttgtggtttttgacgtttaatttgggtgcaggaattccgacggggcgattctccggtcatcggccg

SEQ ID NO: 24989 - DNA, 764 bp, Glycine max
  Intron number 1 from transcript Glyma13g05830.2 (locus Gly ma13g05830) derived from phytozome v7.0 (chr-ID Gm13; pos 6147076 to 6147839 reverse strand)
cggcttccatcgagtaagagacattttcatttgggttttttctgaaattcagttttttaatctgaaagtttcgattttttggttgttctgctatgtttctccaattggggtgcatgtaattgaaatcaaccattggggttcaatgagaattggtggattagcaaagaggaaagtgcatgcaattgggttagttgtatgtgcttgatcagaaaatttaacagcaattgttctttttcttaaaaaaaaaaattccaaggcttgcttaaatagtgccttaagaaggttaatacacctttttttttttaatattatggtcacttcttcaattgcttaaagatgtaatgtgagcatggaattatttttttaattcttaatattgtagatgcttattttcatcaaatattttattagaaaataacacatgtgcgtatagtgtaaatggtttttccagtgttaacataacattaccttcaaaattacaagaaattataaatttgtttattttttttaataataaataccttcaaaattacatgtatcatgatttctgattagtttttggtgtaactttttttacacttgacaatgcatagaaattgaaattatattttatactttttatatggtggatgttttttttcctcgctgttatgctttcaatttttgttttgtttgtcaagtggatgctagtgaggttgctcagccatgttttaaaattaccctaattcttttgtgtaggtcagtgccaacaaagaaaagaattg

SEQ ID NO: 24990 - DNA, 1004 bp, Glycine max
  Intron number 1 from transcript Glyma14g06350.1 (locus Gly ma14g06350) derived from phytozome v7.0 (chr-ID Gm14; pos 4591511 to 4592514)
cgtggggatcacgagctgttcatccgaggcaatcggtaatttatcatcttttgccaataaaaccctcgcttctctgctcagttgattccgaatgtgcggaaatgaagttgaattagaaccttcgttttgaaattctgttttcttcttttgctgctgtgcctgtgtctgtgttcctctttgttattactttgtcagaagttgcactgttgctgcattgcttttatctaacgttgtgatgttttgtgataggattatatggtcgacgggtgcgagagtatttaagagatttaccttgtcatctgacatcgttaaggtttgagtttttgagttttcatgctttgaatttgaattaaatgagtttgtttaatttaacccgctatattagtaatttataactcccgctttacgatttttttgttaagtgaactgaacattgttgatggagggatatctcgtttagagcggctttttgtgtggattgtttcctgtctggagttttttttttatagttattttaattttgagtgaagccaaagctaatggtttgagtctgtagagaaaatggtctttagtgtttcagatagaaatttattggtttagtgctcccttcgtgttttaatgtatttgttcattacttttgtaatgtttactttaatcttctttattccttaaaaagagaaacaaaatttgtgcctttgcagccggtggttagaggacatgtgatttgcatatatagttcagattctcatacacattgtataagatgagatctagttaatataaaagcagatagggaagtaaacatttagaggattaaaaaatcttcaagtaagtagtatctggaattttcagactgtaacagttacttcaggaaatttggatgccaaggattagagttctatgagcaattttcaatttaaaaaggaatttaattttaatgaataagataagaggatgaatattgtttaggactgtaagaaaggaagattgcaactagcaacatt

SEQ ID NO: 24991 - DNA, 890 bp, Glycine max
  Intron number 1 from transcript Glyma13g16590.1 (locus Gly ma13g16590) derived from phytozome v7.0 (chr-ID Gm13; pos 20513465 to 20514354 reverse strand)
attgttttgtgaatgtaagtttaatggttgttttgttatatgcatacttcatgatcagtcaaattgttagggatattgttatcattcttatccttgtaacctacagaaaatgttaacaacatactatctctgatacactttttaaaactaagtctttattattaactgatattggaaatcccataatttattgagtccgacttcatatttaatgagtcatactaatgattttatagtttctaatcaactttaacgaatgatagaaaatgtgttggagaatatgttactaacacatatctaacctcaaagtcccaaataatattggtagtaaaggattgcaatttattcaaagttttaaattgtagtcaacaagtggttgctatattaagggcacattgcatcaactgcatttgcatgcaattgtccacaatattaaatttttattggtctctgcaatcacgcgcaaacacaatttgaaactttgatttgtactaaaaatattttattggtgcaattaaagggtagtaaattgcatgcttagatagattatgagttcttgtatcaacacaaagttgtcagtaaactgcactaaagaatttttaaaaaaaattatccaaagagaaattatcgtgttatatcgaaatactgttactaggtattccatatttcccattaattatgtgacacagaatcaataagttagagcataactcaagcgattaaggtatagggtggggtagagatcttaagttccactctcatataaaacatggagtaatcactgaaactgaaatgcttattcttccttccatcatggtataattataatctgatacacctaattttcatttatatcaatttgtttttggtcgaacatcatcagggttgtg

SEQ ID NO: 24992 - DNA, 717 bp, Glycine max
  Intron number 1 from transcript Glyma14g01550.1 (locus Gly ma14g01550) derived from phytozome v7.0 (chr-ID Gm14; pos 892894 to 893610 reverse strand)
aagaaaccaggtatcctgtgcgcttcaacaactttatttcagtcaattttattattagtaatgggttattgtactcattggctatattatagtgtactaatggcatgagtatgctctaaaattggctagaaaagcttgataccatcgttttgttggttaaatataactgttatataaaaataaattgttctccttgaattgattataaataatatttggacaaaacaagttggattgttggaagataggaaaataccaagtgtcaagtaatcataaagttatcgtaattttaatttattctcttaaaaagagcttggaggaatcaaataccctcacatacctttgtcactgcgatcagttcgtggcatttacttttgaaagagtagaatcttttgtttattgcattttttttatctagttgaggatataaatcatgtgaaaattgaaaagcctaatatagaagttttaccaacttctttttctattaaaatgtattgtaatttcaagttgacgaaaaccatatccaagaattaacagtaccaaataggaactgaaaaataaattgtaaactctatttgtattatattgtctggaataacttccatagtcattgattcaatcagagaaacaagtttttatttttatttttagagccatgcaacctttttgtggttgaaatttgaaattgtaattttaatttgcactctattgtacagg

SEQ ID NO: 24993 - DNA, 825 bp, Glycine max
  Intron number 1 from transcript Glyma13g23810.1 (locus Gly ma13g23810) derived from phytozome v7.0 (chr-ID Gm13; pos 27131560 to 27132384 reverse strand)
agttccaagaccgacgaggaaaggtgagtaaatcattcattcttttgcctaacaccctttaatcaaatttatgagcttcattgcatggtcatgtcaaaattctatctttgtaatctaaaattgattaaggttgggaaattaattaagagtttgagttttatgtacagtaaattctcaatcaatcagtaactcattacttaatagtagtaataacaaataaacaaaacccgagtttaaaatagtgtaaacagtttttacattattaatcaatcagaaatcatcctaggaataacttttaaggctgttattgtaaaagtcaataaaattaccatatatggcatctactatttactcaaacttatatgcagttttagatgttttgagtgttgtttaccgatcagaattcaagtttcaccttggtgacctatgaagatgtttaatgcaaacctttattatgtcgattgtagagcagaaacttcaatttcgtttagagaataacaccaaaattacttaaacaactgtgtttattttttttctctaattaattaatcttgggtttggtggctaaacttaacaaggttgatttcatgctcaaaaaactcaatctccacgagtttaaaactgatggagattggtgatgaaatgtttaattcctaccccataatcgaatttgaatgttaatgatgttgatttatgtgtgtttttgtcttttgttattattcatattgttttgtggcaacaattggttttggttttgttgtgctaatggggaatgggtgtttgacttggtgttggtgtgttgtggataggcaggggatcctctct

SEQ ID NO: 24994 - DNA, 604 bp, Glycine max
  Intron number 2 from transcript Glyma17g01300.2 (locus Gly ma17g01300) derived from phytozome v7.0 (chr-ID Gm17; pos 769171 to 769774 reverse strand)
agcaaaggaagaatttgatcgacaaaactgtccaggtcactttcactctcaaattaatcattattatcaatacaaacctttttaattttgatatctaaatattttttagtctctaagccaattataaatcttttaagtaattctttttagaatagatgatatggtgtaatccaattagaagtcgggcactagtcatgtttggataaacttctttctcagcacttcactaaataaggtttacagaagctaaaattagcttatacataagttaaaaattatcttttagaaaaactgacatgacagtttctacaaattaacttgcataagctaattttagcttgtggagaaactcatttcatttttcttttttattttcttctcctaaaagtgtttattgaaaaatttacttaaacaggctcaatacatgattcgattacacattacagtcatggcaccctgaatctctttaacaaccattattgtttgttatcttcatcaggaggctagaccgagacttttgattttgttcaatacattagtttctataacattgaaaactggcgatccaaccatttgattgaatattatggtttgttacagaagt

SEQ ID NO: 24995 - DNA, 361 bp, Glycine max
  Intron number 1 from transcript Glyma14g02260.1 (locus Gly ma14g02260) derived from phytozome v7.0 (chr-ID Gm14; pos 1372675 to 1373035 reverse strand)
tcgccaccttgtgctcccttcctttggtgttcaaggtgttcttctctcctacatttaattatcattcgtgctacataaacctaattaagtttgaattaagaatgaaggaagattcatattcattgcacgtttgtgtttgagcattaactacagttagttccatgttgcaactgctttatagtaacaaccttaacaattgctattttgccatgtattgttttcactgcgaaaaatagacatcagacaaatagcccttatctgcatgtttgtcttgttttttttttttgtcttaaattttcccaccttcttgtgtttgtggagtgcagggcaggcaaatctattgaagtcgtcaatcttagtt

SEQ ID NO: 24996 - DNA, 1033 bp, Glycine max
  Intron number 1 from transcript Glyma15g35390.1 (locus Gly ma15g35390) derived from phytozome v7.0 (chr-ID Gm15; pos 40026755 to 40027787 reverse strand)
cttggaggatcttagaacttggttgagtgctgcaggtattgtttatttatattcatatgtgcttgattaaacttacttgtcatcgtgagagctagttaattatattttgacccactagaaattgatttggtttattcgtgtggcatatatgctggttttggtagagtcataagtcttatatttaaccatttgcatatttaataactttcagaaaatgttttttgtttcatttctaattttttacaaataattaaaaaatatcattgtgttttcattttctttttatatttttaaatatttgaatagtaaatgaaaaaaattataatttttgttattttcattgttttatatatatgtttaaaaatataaaataaaacaaagttaggggactattttttttataattacttatagaataaaagtagaaaatattttattgatccaaacaagttaaatacttatccttattggagatgtatgtagtgagagttttatctttttttactttagtgagggaaataagtagtaatcattatattttatcattaataatgatgaagattaaaacaaacaagtcatttaaatattttaaaaagtcacatttttttcagttattgcatgtcattgaatttttaatcatccatatatatatatatatatatatatatatatatatatatatatatatatatatatatatatatatatatatatatgtatgtatgaatattatatcgttttaattttttcctctcattttcatataaattaagatgatattcctctgccaacaaatttgcattgatggctttgagttttcatcatataagagctctatatattagaccaatgcttgatgcatgcttctcatatcttgttattggaatttgagcatgcaaaggataataggaaacttattttccctcataaatttaccaaaactcaaaagaaaaaagcattattgaataattgaagatcattgtttatccgtgtgcttctgttgaaacaggtacttaccagcaaacttgcattg

SEQ ID NO: 24997 - DNA, 998 bp, Glycine max
  Intron number 1 from transcript Glyma14g40220.1 (locus Gly ma14g40220) derived from phytozome v7.0 (chr-ID Gm14; pos 49195283 to 49196280 reverse strand)
atttagcaacggaaaggttccatctgactttataggtacgtgtgctatgcatcttcaagaatccaatatatataatatcacataaaatttataataattaacacattcaaatcaaccatcccaattagactgtgtattattatattttttttctcgtccttcccatatctttgaaaaattaatagttggcaaatgctaataattaagtgtctaagacatttgttaaaaaattaaaatgaaattctttttttattaaaatatataaaattgtgctgtttaaaacttatttttgtcttctcttgttatttccacaataatacttagtcattttagttcataacagtcactactataagggaatcaaagtgatatgtttgggctcttcaaataaatggttccacatatataaaacgcgagctaaatgctgagttcaggtaatactttgatacaaattactattaagctttcggtattaattaattttgatgtaaataaattacagtattatctaattacatatctattcgttaaaagttatgtcaatagtaatttttaatatatgaaatttcctatattaataatatatagaaattaaactattatttatttgttatatatttgtgtgtatgcattactgatatggatttttttgagtgacagatgtgatttaatttgtttggatgcaactaaggactaaggagtacttaaagaataatggttaaaaaaatattcaacgataattttattaagtattttaaatcattttaaaaagtaaatattagatagtagtagtaacatttatgtttctacatatataatataatacaatacacatttcttttattttagttttttaacgagtggaccttgaagtttatttttttccttgcggtgaagtcagtgacattaaatggcggtgggtattggctttaaattaaatagtgtatcttagttattattttgtgttgtattagctgaagaattgggcattaaagagt

SEQ ID NO: 24998 - DNA, 741 bp, Glycine max
  Intron number 2 from transcript Glyma15g12560.1 (locus Gly ma15g12560) derived from phytozome v7.0 (chr-ID Gm15; pos 9270993 to 9271733)
cttgtcttgtgttaatcttgtattggttcttaccagtgagtgatatattgtttgacaagagacctagctagtggtgttggcatctgagagttgagacctttctagtcttaaattatgtccagtcatatgtgtagcttctaggatcttgttgctcatagactatggcttatatttctttaattttttcttttcaacagtaagttgtgtttctgtgaaatttattttatcatgtatttatgttttgactggtttggatgggccatacgatttggtcttgtaatttgtacaatgcttttactatcagtgtgtgtttgattgagcttttgtaaaactgattttgaagtgtaatgctttatattgagttaatagtaaaactcattataattttttttaatctaatacaagagctagttgctttgcctcaatcaattttggacctagaatcaatttcttaatataaaaccaaacatttgaatgtgttacctataatgacattagctgatatttcattgtaaattttggatgattcaacgtgaatcgtaacacacacttatacacttaagagttttcttagttgtgaggaagtattagctcactgttttgagtgagagaaagaaggaaaagtctgttattatccttactttcacagctacactcttttgatgacacctcttctatgtcctgaaactaaccatcttggataactttgaagtggtgcttggatcatttactgacttgaat

SEQ ID NO: 24999 - DNA, 302 bp, Glycine max
  Intron number 1 from transcript Glyma16g24280.1 (locus Gly ma16g24280) derived from phytozome v7.0 (chr-ID Gm16; pos 28123349 to 28123650)
aggtttttttttctgttccctttaatctattcactgtaaatccaatttgttattgattttgtgttgcaacttttttttccttcttgctctatgtttatggtttgtgtttccagttcagtgcgtcattttattggttgctcttgatgtagttaagtcagctggtggcggattcttcaggaggttttacacttctttcgcgccaaatacattggaaattagttttaattttactttgacttcatctatttcataattaggttttattaggaaatttttaattggaaatatttgtgtattgattt

SEQ ID NO: 25000 - DNA, 535 bp, Glycine max
  Intron number 3 from transcript Glyma15g17910.1 (locus Gly ma15g17910) derived from phytozome v7.0 (chr-ID Gm15; pos 14406052 to 14406586 reverse strand)
ttgctaagagactttcaaagacgcgaagttggatagtataattcttttgatgatatttatagtagtttgatatcttgtcctttgaaagcactaagaacgaaaacatcctaagaactttttttttaatgacatggtagaagattttaagtgttggaacagttcaattaagggttttattagatttgctttcctctttatgtacacatactagcaaaaatataaaggggaaatagaagaagaaaagaaacacttgaatgatatcatatgcgtaatcaatcacacctatatataaaataaatcatgattttaatgttattgcaaaaataatgggatatgacatgttcattaattatcatagcgtcccaaaagaaagggacatccaaggggctaaattaagattcaactcacatatagagagaggatttgcacacaattttactgagaaaaataacttttatcattgtataagattcgtgtgtcattgaataatgaaatgtcaggttgctataaagacattgatagtcattcataggac

SEQ ID NO: 25001 - DNA, 993 bp, Glycine max
  Intron number 2 from transcript Glyma13g43700.1 (locus Gly ma13g43700) derived from phytozome v7.0 (chr-ID Gm13; pos 43313799 to 43314791)
cagaattgtacgaattattgttcatttttttgtctgtaagtaccctttgcctctatgttccttcgtttttagcatttgaattgttcctttcgctattgttttactatttgccctagtttttatgtttcctctcctagaaataattcatattacttttgccacccaggttattgggaacagtatttttgtttcccagattcctctgattggttttgtgattccaatggtttttcttttctgttaatcctcatgtaatcttctctcgcttttatttatttatttatttattttgtgtctttctacattagatgagattatttagggttctgtatactgatgctttaaaatttagagctaggcagcgtctgaaaatatggtatttgaaatcttgttatgcttaatcggtgttagttgtttatcttgtaacaccgattaaatgttcagaccgaatacaaactagtcgaattcaaataatacattagctatttactactttgaaataataaattgcaattcttttatattttacattgttatatttacttaccggttcttgtgtaatgttatgcttcaaatgctttcttgagacgtttattctcccccattagtttgtgttattttgtgatgctctatggtatcaaattattataatttatttataaggtacaaataatgtgagcagatgtacttagcatgaataatttaggtgctggtgtttactaagccttctgtagttttcttatgaagaaaataatatggttaccttgttaaatttatatagatgggatttctaatctgcatatgtttttgttggttggtattttcttagtttatggtagttttcctatagtgtgtaacttgttatgaggcttaataacttatcctgtgtgtgattttgttatacatattatgcatcatacgaggagataataaaagaattgtaatttcctgattgcagctactgtcgtgctccaacttggtaaactagaagtt

SEQ ID NO: 25002 - DNA, 631 bp, Glycine max
  Intron number 1 from transcript Glyma16g06740.1 (locus Gly ma16g06740) derived from phytozome v7.0 (chr-ID Gm16; pos 6060504 to 6061134 reverse strand)
gcaagtcttgggtattataccacttcccatacaccaattggaagaactttgttttgttttgtaatttttctcattttacaaatgatcgatcggttgagaaatgcaacaaaaggggtggaaaaaagttgatctcttttgttctatgtttatgcacaacaagaaataactattcctacaacaaaaataaggcatagtagcatataattagttaattactatgaccaaagttttctctctttaaatataaataaacaattgaggcagcatatattgtataatggatagataatcatatttcttaaacatatatgtaaaaggattcaattctctgtattttaaagaatatttgttaagagatgtaagtcttttaaatgggttattatatccagagagattaatctctgattctttatccattttaatttcaaaagctctatgtaaaaattaaataattattcctttaaaatacttatttttctcctttcttttaaactattatccctgctactttttttttttataagaaacaaattataatagtattttggcatccttgagggccagtcaaaaaaattgttgatattaatattgtgatctccaggggtcctggggtggtgattcttgtattgtc

SEQ ID NO: 25003 - DNA, 716 bp, Glycine max
  Intron number 1 from transcript Glyma14g36390.1 (locus Gly ma14g36390) derived from phytozome v7.0 (chr-ID Gm14; pos 45651754 to 45652469)
atcttcttcacccttttgatctgctaattctcaaggtaaaacattgtctcttcagcttctaatgtttgctttcacgttttgttttctcttcgctacctgtttgtttaaccaaggattgggaaagtccaaatcttcaatcttttattgtgttgcttgtgtttgctttaatggctgcaactttggtatgcagaatgtttccctcaaatggggttgctaaaaactgatcaaacttttagtcaatgttttcccttttcaaaattcttttaggccattaaaacaagtatcaagcttactctctatgtgagtgtattgtacatacatatatacatacatgtatgctcgtatttcaacattttaagtgtcttttatgaagtggtggtttagcgaagagtttggcttataagttctttgtgccctctcttttttctctctattttgatcaacacttgtccaatggtttgttctctttcggttatttttggaaactttgtcccatgactacctcctcttcaaagtaattagtctgatgtattttatgtacatatattcatgatggttgtgttttggtaattgttacaatgttttcaatttagtaatttatcaaattgcttctaatttaatgcctcttaggcacagaaacgattctatgacagatgttgttacttgttattgtttgataaggtattcaaaattgggaggttttcgtttgaattgtg

SEQ ID NO: 25004 - DNA, 986 bp, Glycine max
  Intron number 4 from transcript Glyma15g01520.3 (locus Gly ma15g01520) derived from phytozome v7.0 (chr-ID Gm15; pos 985761 to 986746 reverse strand)
gtattcctgaactcagagcagcattagtcaaaaaggtaaatggtataatttcttcttacaagatgtactagtgggaatttggaaactctagttatctgtttgaagttcgtcatctgaacggagcttggggatttcattagataacaaacctgttgaaggccatttgtagcagttgaattggacaatccaaagcagtttacaacataaatgttgatagatgttttgttttgtttaaggatgataactctcattatgtagagtaatatgtgctattttctttttccttatgttgaagctgattatatgtagataacatagtaatgtattgtccacaagacaaaacttgtgatatcatttgagataatagaaatttaatattatgtagattctaaaatatattggaactcaacaaagattgacactgcagttatgtttgcatatataaggagaaactaatttaaattgatcattaattaaattagctcagctaaattaatagacctactagtgtctagtatagtctgtagtctctgggctttatccaattgcttgttggtatttggtgaacttaaatatggattcagctgaatttggttctcttataacttaattgttttggatgagtcaggataatttttacatcataaattttatttggctatgactgaatctctttattttacatgatgtaacaaagccttctcctagcaatcgggtaatagctaatttttattttatgctatatatctgtgatacctatctgtttttttccttcattgatcaagattcttgcacatgcattgtttttacttcccataatcacataatgttacatatagatgtaatccatccaggtctctccctccatctatgttttggatgttgtttttttttttaaaaaaaactagaaattattttgctatatgaaatttggatcttggtgaccaatgaattaattgcttttatcatcttcgtgtagttgcgtg

SEQ ID NO: 25005 - DNA, 474 bp, Glycine max
  Intron number 3 from transcript Glyma15g01520.3 (locus Gly ma15g01520) derived from phytozome v7.0 (chr-ID Gm15; pos 986806 to 987279 reverse strand)
ccttgtctttggcccaggtcttttttctttttgtctctccaatggtagtttatatttattaatataaccccttggcgatttttgcgaggcactcaaaggaggatatggtgtttccaatgtctgattataaattggtttaatttgcttgcttgggattgagaaatgggaaaactttacttgctattcttcaacaattaggacgtgcttgccttggtgtgggtttagatggccttgattgtatgatctagcttacatataggattgtgtactaaagtgaaaagctacatggttttgattttggggttcatggttccgcacacttttaatcctcaactaaagtttgcccatcagtttttagttttttatttctctgactcgtgaccactaggattcttttagctgcaatttgtaatggatatttttaaattatctactgtagggggtggtttactggcagcctcccaagcaagcgtt

SEQ ID NO: 25006 - DNA, 709 bp, Glycine max
  Intron number 2 from transcript Glyma13g29100.1 (locus Gly ma13g29100) derived from phytozome v7.0 (chr-ID Gm13; pos 32045433 to 32046141)
gctcgggcttcatttgggataaatttggtcacatagtaagaaaagttaaatgattaaatcagaatgtggattttgttcgccccacttagattttattctacttgtttatcttattttactcttgtcagtcttgtatggtggagcgttttttgttttaaatttatgaagatagttactccctttgttttcttttataagcaaaaaaattcaatgtttttttgttctaaataagcaaatctcaattacttttgactcatttaacaagactaccttcaaaatacccttcatttctaaggggtccatgcttgatatcaagttccaatgaagagtagtttagaaaaaaagtttgttttttaattgggattggcacaatttaattaaattaactaattttcttaatggggtaaaatagttttttcttcttcttatcaatgagaacagagggagtagcttataggacaaattattacttgcaagttgcaaaatgtcacaatggtatgctgtttcattgagtttgaaattccttttatcattatcaaaataatttgacggtgaataatacatgtatgcatagtttgacatgatatcttaataaggaattgtagactctcgcatagtcgcatgctatagatattgtctttgattgcacaggttatcaatagttcatagtagtcatgtgtttttgctggtggacaggttaccaattatc

SEQ ID NO: 25007 - DNA, 950 bp, Glycine max
  Intron number 1 from transcript Glyma13g27220.3 (locus Gly ma13g27220) derived from phytozome v7.0 (chr-ID Gm13; pos 30386423 to 30387372)
caaccaaggaccttcctgtcaaagggtaccttccggttagtacttttgcctctgtgtgtgagtttttttttaatttgttctttattcaatttgattaaaatgtactcatactgtagagattgattgacaatgttttactgttatccaatcatagattatcatgtaggggaagattgttgtcttttgtaatgctaattaacaaggttttcggagtgtctgcgacctcaacgcaaccacaattatcgccgcatttgtctgcaatttcccacaatatcatggaaagcggcgaaactaggactttaaaaccttggttgtttgtgtaatagttttaatctgacagtctatggaaattaaagtcttcttgttatccatttgaggatatgggttatttatgtgggtaattcaaggttttgaattgcggttgcagtttcgccatgtttcttgaaattgtgagaaattgcagacaaatgcaaccacaattgtgatcatggacaccccaaaaaccttaacattatggctgaaatcatggttgcagacgctttttaagaccttcatgtaattgtatttcgtttttatctgttgtggtgtcatgatttgtaagaaaacttacagcctctagattttcatttgtgagcactgtggaagtagtctatgtccatatttctggcagttctttgattattatatcttcacttgtattatgctgctttacacctgagttcatatggggagcccgtgttatgcttaactggccatgaaaaatttgcgatttatccttgtagttttctgctttctagtccttgaaaaatgttaccattgcaattcactgacatgatttcaacattttcctgtaatacactctgccactaaaggtctagagtctaaaccaatatcaggtcatgccactcaaaaattgtctaacatttgaagtgtgttgcaggattgcttga

SEQ ID NO: 25008 - DNA, 839 bp, Glycine max
  Intron number 1 from transcript Glyma15g31280.1 (locus Gly ma15g31280) derived from phytozome v7.0 (chr-ID Gm15; pos 34479215 to 34480053 reverse strand)
ggagtctcactcaatacataagaggtaaataaatgttgttctttgtgtgtcttgtttctatgtagatgttctttttggtgttgtgtgctgattttagcaatataataatgggcttgttaaaggcttgtggcaaagattgatctctaatggatttgaaaatcattcactcaccgcctaatctgttttgctgttacgttttcgtgttaggcttgtggcaaatcattcactgcttaaactgtttcactgttgggtttttcttaggagatggggaatgttgaattgtggggatttgggaattaaagaagaaacattgataaagaagcatcaagtttttgtgttgacagtaaatgttaatggttactttatcagacaagcgaatggtatttgcacagtagagaggatgttgggttggaatatgtattgtttgtttttgttttattattttaaaaggaagcagtataggaattatgtaaatcttttatttttggtttgatgtgtactttaacgaaatagactattcttttctagtgacagaaagcaggaatacatctctttctttctgctttagtaacattttccaagctgatattaacactactcaattttaattttcttgtgtttaggtcattttgatggcattggtattcattcatcttttaatttaatttctaattagactaggaaatatgttcattaagaggggcaagtgatcaaatagctaggcagaagatttcaaacctggatatttgattcattagtcctactcttcacaatttagagagtgatttttgttttgaattatatatttcatttattgatcaaagaagttcacttagcag

SEQ ID NO: 25009 - DNA, 413 bp, Glycine max
  Intron number 2 from transcript Glyma15g16850.3 (locus Gly ma15g16850) derived from phytozome v7.0 (chr-ID Gm15; pos 13113386 to 13113798 reverse strand)
taattcttccagctttgggtttaaacgaggtaaatttcatttgtttttctaatagtttactatattacattgtttcaaagactaatcaaatacttaaccacggggtggcatagtatctcattcttgaacatctcagtgcacctgttggaaacgttactagaggtccgcgcacttccattttgaaatgcaatgcaatcattaaagatttaaagtaaattatattgaactgcaatctattcagtactagaacttactaatcactacaagtgtttttgttcttctttactgcacttaacgatgtgattatattgagtcatgactacgcataccccagaaacaagaatgtctaattgttatgtatgatgttcgacgatgcagggatctgagtgggattttggcgtgttttccggcct

SEQ ID NO: 25010 - DNA, 1039 bp, Glycine max
  Intron number 1 from transcript Glyma14g23920.1 (locus Gly ma14g23920) derived from phytozome v7.0 (chr-ID Gm14; pos 28408701 to 28409739 reverse strand)
gaaagttcaggatctgtttcttctcattctgagaggtactcagatgaacaggtatgttcgaatagtagcacaatggggttgcctaatctaagacttctttagcatttgttttcatcttatttggaatcactttagtatctcacaagactagtcagaagatttgaattataacttgactccttttttgtatggtgaaacataggattccttacttgtttgtggattaagttaattgatcacttactggcaagctaagattattttcactggttgtgcttttccttctgctctgatttctgtgttccggtataatactgagagacgaatatacatataagaattgtgcttttaaattttaatcacaaaatataaatatttgctacatatgcttcgttttgaatcttgtgtcattggcataactttttgaaattcagtgacagaaaagactgaaaaagtcatgttgaataaacaggttctttgaataaaaccaggttcctcaactaaattattcaccctaaggcctagattctttaaggcagaagctacttgtccctccctttggtctgttccctatgtgaaataaatagttagtttctgtttctgtttaggcataaattatctgaataaacgaccagtaggcatagctcattgattattcaagctttatataggcatgcacacataattgaaattaagttcacatttttgtacagcccgtatttgttagctgttctgaaaatgaatccattatggtcaatgttgagtgtattcaggaatgtattttaacaacttctctgccagtcattggtctaagtcaaccatgaatatcttatcttttatgccttcacctggaaattaacttgtgatcctagtagtttcagcatgtaatgtccatcttggggtatttcacaatctgaatgaagtttaccattaattttcatcctttcttttctgacaaagtctagtatttttgtgtctttgaaacttgaaaataggaggcattgaaggaatctcctactagaaagcaaccagtcacctg

SEQ ID NO: 25011 - DNA, 355 bp, Glycine max
  Intron number 1 from transcript Glyma16g27210.1 (locus Gly ma16g27210) derived from phytozome v7.0 (chr-ID Gm16; pos 31237093 to 31237447 reverse strand)
gcaaacctaattactgctattacgagacgacgcaggtaattttccatttccttttctcgggaaaattaaacagatttaaacaaatccagaatacactgaaactgcagcacttttcattttgttctcgttcttctttgaattattccgtcgttttctgctgcggcgtgcgtgcgtgaacaatgtagtgatctcgatgcgtgctgaattttactttgtttttctcggaaaccaaatagtgtttcgcagtgtttgatttcttaactggcttgacatttcgcgattgtgatgttgttgctgttgttgttgttgttgatgatgaggatgatttagatttagttcggattgttcgattgcg

SEQ ID NO: 25012 - DNA, 579 bp, Glycine max
  Intron number 2 from transcript Glyma16g30070.1 (locus Gly ma16g30070) derived from phytozome v7.0 (chr-ID Gm16; pos 33741629 to 33742207 reverse strand)
caacatcgaactactatttgctacaaatcacttaggtacgaaagaaatgtcttatatatatatggcaacatggaatcttttacgagctttccagtgtaaagggggaacgcggggcaaaactacaatgctacaaagaagtttattgggagtgtagggaatgtgatttttttctttctaaagcaaagaactaaattaaggatgaaagatgcttgttagtattggtctattgcagcatatatatctcttgaaagggaaagggatcggattataattattattgaaacataatacctatatagttttgataaatttattgataaacacttatagaagctaacaaatagcggtaaaataaatcaaacttcttgcataagttaaaatcgggttgtgagcttcaacttctatgagaaaacttataaaaaaagttagttgcattggttaatttaacttataaaaactttaattcatttttttttaaattttattgataagtttttccaatcaaggaagaataaaaagaagtgaacttattctttttccacaggtcatttttttttaacaaatcttttgttggatact

SEQ ID NO: 25013 - DNA, 960 bp, Glycine max
  Intron number 3 from transcript Glyma14g36610.2 (locus Gly ma14g36610) derived from phytozome v7.0 (chr-ID Gm14; pos 45974305 to 45975264 reverse strand)
gctgaaatcactatattggcccttcacactccttggtactctatgccctatccctatgctattgtcaattgtttccaattagtgtacactaattttggataaacttttcattaagcacttacaggagaacaaagtataaaagtaaaatgaattacgcttatttggataaacttctctatagacaccaagaagaaaaaaaatgaaacaaatttctcttgtataagctcaaattagataattcataaattaaaactagctttttgggagaaactaatcgaaacaggatatgagtttttttcgtaagttaaaattagtaatgcaaaagttaatctatagaagctctatctttatttcaacttgtttcaaatgaaataaaattagtctaagctcgaaaagaagaataccaagaaagaagtagtctaactcatggctggaactgatttgaacaattcataaacttgcttagagccaagcatgatgtttgaatgccgaaaattgtaatcaggtcagggtgaatattgtgcaagtctttgacacccagctataattttttgtaatgtatttctcttgctagaaaagtattgcattgtagaatcaattgtgtactgcttgttgaacttattgagacaattgttctcatcctctgttggagggatttagccctgcttatctgatgataaaaaacaatagatgcgctgaatttcgtaaaacgataccaagaaggcattgctctgcttcattggccctatcagttattattaatattattctatttaatattattattattattcattttggttggtgagttattagttgttgatatttatcattctattagtattgtttgatgtttgcggtagcgattctacctcgcttacatgtttccctctcttgttagcattaacataagttatttctgtgacttgctcagccacacacaaggtcatataagttact

SEQ ID NO: 25014 - DNA, 890 bp, Glycine max
  Intron number 5 from transcript Glyma14g08730.1 (locus Gly ma14g08730) derived from phytozome v7.0 (chr-ID Gm14; pos 6752428 to 6753317)
ttttacatactttgcaattcaattggccagtatttgtaagtacttcaacatagttttatgactaattaatttagaattagcatgactttgctaatgctagtttgcactactttaagaaacgatagaatgaaacaagtgtactaatacaattgttttaaaattgagtgcttgactagaatacgatttgatttatgttatgtttatactttttatttaatttttgtatttttgttgttttgaaactggtccagcattctaactgcaatactgtgatcatcaatttatcttgaattgtctagtaaccagatttttgcctgcattctgcagttagctaaaaagtataattaaatacttttcacaaattgtacccttaatgtatggaagataatttaatttaccctttaatcttcttattagcaagattgaaataccatcgttaaattctctcaagaacccatcgaaatttaattttggaagcttttttgatgttttatgtttgcatctttttttaattattttaatgatatggttcaattttttatcttttctaaaggcattatgttacttaagttaaagtactgaaatcagagagaggttttaacttaataacattggctcattttcgtattctctctcttattcacacggaaatacattgtaaagtcgggaattttcttctcatcgtggtatatacaataaacttcttacaaatacataatggtagctaattggatcgatatagtatgttaaaataatgtctatctataatattttttaattgcacaatgctaaaactatgacatcaatatctattgacaaatagtataattggtaattttaaatttatggtcatagcattcttcactgaaccccagagatcaacaaaccct

SEQ ID NO: 25015 - DNA, 684 bp, Glycine max
  Intron number 1 from transcript Glyma16g04260.1 (locus Gly ma16g04260) derived from phytozome v7.0 (chr-ID Gm16; pos 3612247 to 3612930)
acaggccaaacttttccgtgttggtgacaccctttgtaagttccaaaaaaaattcatttttttcattggataggattagagtatgaaaaaaaaattctctttttccgttcaactatttaagttaattttataactccaactataaaaatcatattacttagtcagaattcaagcttataaaattctaattatttgtttgattagtgtatagtaacacgtttctccctttttctcctaagatgaaaactgtgataattagtttttattagcggaaaaacttatatccatgatttcttcttatattttttcctctaactggcaaatcaatcttataattttaatgacaaaaatcatgataattaattagtcaaaattcaagcttataaaactctaacgaaattggattatttgcagtcatgattataaaggtgttttttagttgaatttactgaatgatttatgaactgttaaatcttttatcagacgattttaattgagtgactacgtgaatgcgcgatttaatttccaaccgcagatcgagaattaggatccaattctaagtatttgtttgaatagtgtgtagtaagtaagactttgttggatccctaattaagatgaagactgtgtgttgatgttaatgaatgggcagggttcaattacgacaagacgaagcacaacgtggtg

SEQ ID NO: 25016 - DNA, 413 bp, Glycine max
  Intron number 2 from transcript Glyma15g13210.2 (locus Gly ma15g13210) derived from phytozome v7.0 (chr-ID Gm15; pos 9829208 to 9829620 reverse strand)
aggtgaagagcaagcgagaaaagaaaaaagaggtgcacgcttctttttgtttttgtttgtttcagctattcagaattggttttgtgttatcttgaaaaaaagaattgattttatgcttgataatgtaatcaaataatcaattttgtttcttcttccctgagtgtgttctactgctatgtcatgtggcttgtgcgtaggtttataagttgacagtaggttaatctgtgtgctaaatttgtaggtggatatgatgagttggtttgacacttcgacttgagcatttgtttctgctaactgtccctacacttattttgtttttgatattttgtttgagtttgtctgtgttatttttacctgttcttgcccttgttggttcagattaaggaccctacagattccaggtctcgtgggag

SEQ ID NO: 25017 - DNA, 506 bp, Glycine max
  Intron number 3 from transcript Glyma13g08190.1 (locus Gly ma13g08190) derived from phytozome v7.0 (chr-ID Gm13; pos 8570727 to 8571232 reverse strand)
tcatttatttctggttttctacaccaaaaggaaaggtaatttgtatacatgctctaacaccctcttttaagactaagttcttctctccatgcatgcataaaaaaaaaatcttactaaactttacatcattttctaagtcaaaatcaaaggattcatacccaagcaacatcagtgatacatgcatggaaagttttcatcatatattaaatttcttccaaaaacatagggaatggtcaaatattaactctagttaccaaaagagtttagttgaatcttctggtgttcaatttctacgataaaaaaatattaactcatttcttggtcactaaaccacgaaataaaagaaattagataaaaggcaccatgtgacttaagaaacacatatttggatttgtgcttgaacaatattaatttatgtgttctctatcagatataaaagataatgcgtgcttcacatgattgtatggcttctgaaaaacttgaaatttttgcaggtgaaggtggcc

SEQ ID NO: 25018 - DNA, 582 bp, Glycine max
  Intron number 1 from transcript Glyma14g08820.1 (locus Gly ma14g08820) derived from phytozome v7.0 (chr-ID Gm14; pos 6840512 to 6841093 reverse strand)
tcaagataaaaaaaataaaaggtttgatctttaattacccaaagcaattgataacagtttcaatgattttttctatgaaatttgacaattgggcatgagtgttagtttcagatttttagcatagcttgaaaacatgaacagaagaagggttaggactaggaaagctccaattccagttcagtagcacatgaaaaagtaattgaagtttggtatagccagaagtcagaaaagggtacattcatgccgtttgtgtgtttgaaaaacagtttgtacagtaatagaccaagttcattatttttattattaataaagtatctgaggagcgtatcagctttcttcacaaactttggcttcagtttcaatgagataaaaaaaaagtatgacagatcagtttatggtgttaaagatgtattaagaaaaaggaaaaaaaaaaaactatttcataatccatgattagttattgattctaaatttctttgtttccccctttgttagcctcttggatttgatttgatatttgttcttgtattttattttttctttgatggattctaacttgttttgcattgaaagagaaggtag

SEQ ID NO: 25019 - DNA, 768 bp, Glycine max
  Intron number 1 from transcript Glyma16g23930.1 (locus Gly ma16g23930) derived from phytozome v7.0 (chr-ID Gm16; pos 27769449 to 27770216)
cacttgactcgctgaagtggatcacggataatcttgttaacgcacacccttttccagaagtgctctacattcaggtcaattatttgcttcaactttgtgctatgctactgctttcagtttaatttttgagaattaatagctcttttctttttttaaagaagctcttaggatccaattgcaagataggagactttattctcgtgttggaagtcttgatcgagctttgcaatttcaatgactagttttgtggtgtgattcttgtaaaattcgtatcatttgatatcagagctttttactatgtcttagttgcagacaagcagccggttttacaaggttttgagctttccaattataatgactagttttatggtgtgattcttctaaggttcttatcaattagtatcagaactttttaccatctctctcagttataagcgagcggcatacatggtgcactgccactggcaatcactctgactagcaagtgaaagggcaaacccgcgtggatgcggggatgctaattgtgatggaatattaggatctaattgtaagatatgcaactttgagtttcatgcaagaagtatgaaatttcagtgcgtctttataacttgtgctctccaattatcatttattggttttgtatcatggttttccctagttttcttattagacaaataaaaggaaataaactaaatcagatataaatttgttgttcttgtcatttttctaacagggatcttgagttggatcataattgctgggaaaggc

SEQ ID NO: 25020 - DNA, 864 bp, Glycine max
  Intron number 1 from transcript Glyma15g19450.1 (locus Gly ma15g19450) derived from phytozome v7.0 (chr-ID Gm15; pos 16731421 to 16732284)
aacaagcccctctcgatctctggctcatcattgcggttcgtttcgcgctttcaattactagtttcgtgaataataaacatgctcgagtttcgattatctagttgcaactgcgtgggattctagcgaggggcgtctagcctagttggttgagcaggttacctgtgttcgattcctacggctaaaaaaaaaactgctgtgattcttcagttttgcttatgctctctctgtgcatgctgtaacacgataaaaagtttaatgatagttggtgattggtttttgctttgttgattcgcgtccagttattcactcttttgagcatgcttgcttccgttaatcatctagtggtttttctgatgcctgtttgcaattatatggcaaatccgtgatgagtttaatttctatgcacccagtgcaaaataaaaataaaaaatacattgttaaccaagctggtacgacttggaaagtagttattgtgaaagtcaacaaacttacacacatgatgatttctgattgattgacactgtaaaaaccattagtgcatatactatttagtgtgtgtttgtaaactgtttcaccatccgttacatgtgttccaagacaccaacacagatgcaacacacttgttgcttttaaaaaaatgctggttacgtttggaaaaacggtaacccaaacacactgttactcatttatgattggatatcagtgtattttttatacagacatattgcattccccatttaaatgcacagattgcataatatctgtttttgttttctttgctttgataataattgaactccaccgaacttctaatatcatttatgtgcagagggagtacttcaagcagggaaaaattgatcaata

SEQ ID NO: 25021 - DNA, 713 bp, Glycine max
  Intron number 1 from transcript Glyma13g38340.1 (locus Gly ma13g38340) derived from phytozome v7.0 (chr-ID Gm13; pos 39137438 to 39138150)
tctctcttcaagtcaaatttctacacattctactggtatatatctcattccttctttatatctatcaatattttaatattttacttactatataatttatatatatatgcaagatattaaacattcttaaatttttatttaaaagcttctttggtagaataattaaaaggaagatatatacctgaaaaacttgagagtagtccgcaaccactgagttttgcagttctatctacactaatgcttgttgtgtgtcactctttcagtctcttcttatggaacagtacttttggaattcttaggtttttttttttttttgacaaacgaattcgtagtttcttaatcttattctttgtagcccttcttttattgctaacttgcttttattttaaggtttttatttgtgttgcactcaaattattatttggcatgcgtagtaattagggttgatgaaagtggaaactataatatatatatacaaatatagttacggtaaaaaaaatgtttttacacgtgtcaaataataataatttgagtctcttagaattgacatgatatccagtaaaaaaaaaaaaagaatagacatgctaaattatgcctaattaataacttgggagttagctacttttctacatggttttttttttttttttttaatgaaacatgacacactttgtttagattcaggaaatcgagggtcttccaaagttgaattt

SEQ ID NO: 25022 - DNA, 615 bp, Glycine max
  Intron number 1 from transcript Glyma15g11230.1 (locus Gly ma15g11230) derived from phytozome v7.0 (chr-ID Gm15; pos 8229674 to 8230288)
cttccattgctcttgtttcctcgcaggccggtcaggtacaccgtacacctctttgtgcccttctgttatttattgttaattactcatttgttctctatacatgcacaatttttatgttttagttcgtacatagttgttttaatccctatgcatacattttttaatccattttagtctcggccgtccacaactgtaggactagaagtttaaaatgtacgtgtagatactaaaatgagttgtttttaggtgcatggactaagggtctatttgggtaagtttatccagaagcaattctaggagaagaaaataagaagaaaaaatgaaatgagtttttctataaactttgtatatgcacaagttaatttgtataaactctctaaaagatgagagactgtctacaaattagtctgtgcataagttaatttgagcttgtggagaagctcatttcatttttttcttcttattttcttctcttagaagtgtctttggataaacttaaccaaacaaaccctacataaaagattgtgtaggtatagagcctaatgaataattaaaccttattattattattattattttgatctggaatttatgtttatgttcaggtgggaattt

SEQ ID NO: 25023 - DNA, 501 bp, Glycine max
  Intron number 2 from transcript Glyma14g24510.1 (locus Gly ma14g24510) derived from phytozome v7.0 (chr-ID Gm14; pos 29414691 to 29415191 reverse strand)
gtgttcaagaggtagacctagagggtaaagagatactagtggaggaggatgttacccatggaaagactcaagttaatgtcactgagcaagggggccaattatcaaaatcagaagacaataaaggagtttttgattcctgtcggttgtttgtccgtaatctgccatatatgaccacgtacttatttacacacacacacacacacacacacatatatatatatatatatatatatatatatatatatatatatatatcttctcttttttcttgaattctcttatggatgaatgtgatatgattttggcaacttttccaattacattatttccaaaaagaatgtcctaattaagcaagttgaattaccttcaatacctatatctataggtgctttttatggattcacttgaacttaatgctgtttttttatttctagttggtttgaatcattccattgttttgttacagtgaggaggaactggaagaacatttcagtcgctttg

SEQ ID NO: 25024 - DNA, 975 bp, Glycine max
  Intron number 1 from transcript Glyma13g37050.1 (locus Gly ma13g37050) derived from phytozome v7.0 (chr-ID Gm13; pos 38232731 to 38233705 reverse strand)
cggaaccataatcttcacagcacgcaacgaacagggtaagatgatgtttctttttgtgtcgcctctgttaatcttcacgttttgttgtgattttttttcccttttaatttgcatatatttgatgtgttgaatttaaactgttaaaaagtctatgtaaagtcgttgactttatgatagctttattttgagtccttcaaattgcaaacacttggcacgtgaagatttagagttttaataacactgaaaaaaaaataggtaaagggtctttatcatgtgtgggaaaaaatgttattgcagtgagagtgtaaaagttttcctgtttaataattacgttgataatagattaatcttaaactcattggttttgtcttgtttgagtgtaactcagattgaaactcggaaaggttaggtcaatgttattaatgtagattgtgcattaaacgatatcaatgttgttaattcaaatataaggttaggtcaaggtttgttttaaattgcggtcaggttgtggttttgtcacattatcgcggggaattgcagactgttgcacctgatgtagccaactaacaaggtcgcactcaccccaaagaacgttgcagacagcatcctggtcgtggatagttttataatagcttgggttaggttaatcttgtttattgttattgcccatgttggaacacagtttgtgcctaactaatgtttcccaagtttgaggatctattgtggagtaagtgatagtttggtgtggtagtagtcattacattttctctcccaagtaaatgtttttcatgtgtattttgttgccacttcttttgtctttgctgcaaatttaaatgttgtcattcttgcttgtttttgaagaagacatctgtttggtgaataattttgaagtgtttaattttgaattagatgtttcattggttcacatttgtattgtaatggtgaataattcatttactttgtgcagtggaccat

SEQ ID NO: 25025 - DNA, 832 bp, Glycine max
  Intron number 2 from transcript Glyma13g40930.2 (locus Gly ma13g40930) derived from phytozome v7.0 (chr-ID Gm13; pos 41358206 to 41359037)
atattaaggtacaatctcttttgtgttggtaattgcgtatatgatatttcgcttaacttgatttgatttagcgctgtttgtattctttggctatttgtggaatttaattttgatgtgaactgcatacaccgccgcctggcccgactgatctgcatacatatcgtgttgccaagccgtctccatcaaaacagggaccaagcgtgcctggagacagcaaggcagaacgatatgtacgcagatcggttcgatcatgcagcagcgtatgcagttcagggtggtcgagcccttccaatctttctctattttgttcctttttttttaagaaaaaaaatacaaaatcgtgtgagttatgtatactgattgcctggctatacatatctatgtggggcttgtgtcagtgtgaaattaatttaaatcaaggtttaattattagtatggaccttatacttgtttgtaatttgctgttttgtccctatatctagtatgttatttggtccttgcggtcacttgtctttgaatccattaactttggccactgcaacaccgctacaaaatttttctggcggtgtaaaaattttcttgacaacatcaccggcagccacactagtaatggtgttaaaaacagggaccaaaacccattaagtttgcttgtgcatgactaaaacttataatttttatgcggacacgtatagcaaccaaattaatattaaaatctcaaatcaagttatgctatttagtaattttcttttcttgtttgaaccatgctttgttaatgttgtgttttattatatgtgtaggagttgtttcttgaagttggcgacgtgaaacggca

SEQ ID NO: 25026 - DNA, 948 bp, Glycine max
  Intron number 3 from transcript Glyma15g10220.1 (locus Gly ma15g10220) derived from phytozome v7.0 (chr-ID Gm15; pos 7423377 to 7424324)
gccaagtgcttgccatcaacgaggtacaatctcctttaggcatagttttacttgctttatttttttctatattaatgtacggattttattgcctatggttttgggaagttgaaaactatggttaagtaatctttttttttccaagaatgtgttataaggtgatttatttggtgttttaccttagtatgcagtgtgaacttggtttgctgaaagtttagggtctttgcaatttttttataataaattgtttaaaaactcacttgtgggcaagatgttatattttcctatgatagcttttgtgttgcttataggttgcatggaaattgcgttttgtcgttgttgctcactattttaaattgtttttgttgacttagaggttatcacggattcagcttaatagattttttttaaatggtatacaacttcagacaaattagcttatgtacaaactgtttcttgataacccatgttttcagtagttaaaattatcttcaaagaaaaaagtgttcaatggaaggtgtcttgtgttttttttaaaagtactttcagtgttactattagagtccactgccctgctgaattcaaaatttttatggagtaatttcataatgtttgttttgcctgttgaattactttgtatcatgacatttattaaatttattaatggactccttgtatgtttcaaatctgttgaaatgcagatatttcataatgtttagagtagatgcttattttgctctatcaataatctgtagagttagcttgtcatggcatatttattaattgagtccttgtaatgttgccaagctgtttctggatttgcggattatttcaactcagtttgaaatacaatgttagttttctgttggctaattgtgggtgctctgttctgttgaattattttattttccagatttttgagaagaacccaaccaaaattaagaacta

SEQ ID NO: 25027 - DNA, 861 bp, Glycine max
  Intron number 1 from transcript Glyma13g27310.1 (locus Gly ma13g27310) derived from phytozome v7.0 (chr-ID Gm13; pos 30490659 to 30491519 reverse strand)
ctcatcgttcatttgcactccattcttggcaataggtacttaccctcttaattttcaccttgtgatttcatatccttgtttgcttaatcaattgctcttatcagtatcaagtttaacatacctatatatgatctactattatggataaactacaatgtgtttatattaagaagaaacaaaaatgcaatgtcagtgaagatcttaacttgtataggctatcctctatagggagatttctaagctctgagtattacaaataccatgaatattatagtcatgttgtattgatttgagtgatttatgaggctagtaattgtagtgaagaaatgaaaaatagaaacaagtgaaaacaagattaaattcttgtaattattggtaaaaacatggaatcaaaatattgtctctaacttttttgaaaccaaagagaccccaatatttgtttcttttattattgtgttacctttacatggacaatgataattttgagtttttgaaatgtgtaatacagaatgatttggcacattgtgtgaagaaattgaatttattgctcagatcaaccctgcataattagaccaaatgggtttacctggtagcatgtcacagttttcacctagatagctaggtcttgcattctattaaattaaggatggcctataatatattaactattcagtatagtagttggtttaaaaaatatctgttaagccatgaataattaaatattggaactctaagtaggatatgtagtatacgattatcttgggacttagtatttgctttctttcttctcttctttaatctcttcaaatattgttgtaaatctcaggtggtctcagattgcagcacatctccctggccgca

SEQ ID NO: 25028 - DNA, 472 bp, Glycine max
  Intron number 4 from transcript Glyma13g37030.1 (locus Gly ma13g37030) derived from phytozome v7.0 (chr-ID Gm13; pos 38226421 to 38226892 reverse strand)
atcctgatatccttttagtcgtttaatataaatttgtctgtagtttgcttttttgtatggtttgtttgcttgattttccccttaaagtttaaaacgatgtaaaaattggtttattaatgattaatccagtaagaaatgtatataatctaagttttgtgttttgccttagctagctattatgatgttttctagatatgtgtgctaacataatagagaaaacattagttctgctatgattttagtgatttgtacttgatatggaattatgaatgctctcatacctttagttgttcttgaactggaaattttactgcaaaattattcctgaagattgtgagatattagtttttatttgctttcatttattgttttgattgattggatcagctataagttattatactggtctcctttttagtttccttaattctgcatacgtagaggtggctacgggaagctggttcagaaagag

SEQ ID NO: 25029 - DNA, 778 bp, Glycine max
  Intron number 1 from transcript Glyma13g34000.2 (locus Gly ma13g34000) derived from phytozome v7.0 (chr-ID Gm13; pos 35677767 to 35678544 reverse strand)
ctgggttcttccttgttgccacgtactttgttattgtgagttcagtttttctttgttactgagcttgtttagaaagtgtttttttttttttagtgtaaagttgggttttttggggagtggtttggagtttgggaaatgggtgtgcgggtttgctcgaatttttattctgggggttgggaatttgtggtctttggaagtgagaaatgagcagatcaaatttagttattcgttgaaagtggtggttttttagtggaaagttgggtttttttggggaggagtgtgggttttttattccggggtggggaatttgtggtcattgaaattgacggatgttgagatcaaatttggttattcgttgagttgtgaaaatgggtgtgggggattttccttgtttttgtgtctggggttgagaatttgtgttgtttgaaattgacaactatggattgaagatcaaatttggttgtatgttgagttctgaaaatgggtgcgggagatcaaattttctgtttgactttatttgggggagattaattgaggggaaaatggttttgcttggagttatgtgcaattctgaaaatgggtgtggagatttttctagattttgattatggggaaagtgataaattttgagagaaggattggttattcatggagttctatgcaattctgaaaatgggttgtgagaatttcccttgtttttgcttctgggttcgaggctgtgttctttggatttgatttgtttggggtttgttagggtactgctgctacaaaggtcaaa

SEQ ID NO: 25030 - DNA, 979 bp, Glycine max
  Intron number 1 from transcript Glyma17g01900.1 (locus Gly ma17g01900) derived from phytozome v7.0 (chr-ID Gm17; pos 1177692 to 1178670)
tgtctctcacagctgacgtttctactgaatccaaggtttacctttgcttcttctcttctctgaggacaatttattgcatggttccagattattatcatttcacctaatgtttatataaaacataattcagctttattaattctttttcataaattaaaaaaattgactaattgagactaccagtacatgatagtctcggagtatccaataaaagtcattaatttttagtcatcatttcacaaacaaacgctcagtcaagatagaaaacatgaaagttgaaacatgtcaataaaatttagaatcttggtaaggtaggagagagagaagaattttagtgcaataggtttaacgtcgaaataaattttcttgccaaggatttgttgttaaataaatagtaggtctctgccaatgctttttttttttttggcttgttttgatcattcgttcataattcatatacaacatgaccgctgccttagtttgtcagaaacaaaagtatttgttaaattgaaaggtgttcaatacatggtggtccatactttaatggtatggtggtctacttggtccaccgcatcaccaaccttagcgtacgtaacgggactcattttcttgcccttcgatttgtatgaaagtaaaaccaataaactttgttttaaaattactttttttatgagaaagattcaatccgttccttcttacttcaactactaacacaatcttataactccttgaatcgtattactcccgcataacacttgattgccatagattaaaaattttcaagtgtagcgatatttaaactatgcataaattttgtaacaagtgttaatgtgatttcatgtcaactttacaaaaaaagtgaataaaggtggtgcaaaaacacttaaattttaatgcataatttgtgagagttggtgtatgcaacgttttccacctgatgagtgggaatatgggggtagtgcagttgagagacctagat

SEQ ID NO: 25031 - DNA, 531 bp, Glycine max
  Intron number 3 from transcript Glyma15g12150.1 (locus Gly ma15g12150) derived from phytozome v7.0 (chr-ID Gm15; pos 8987126 to 8987656 reverse strand)
gcttcttggaagtgttgacataaattctgttggaggtaattccgtgtagaattggcttccatttattcatttatcctattatatgatgaattatttcagcattttgaatcatggtcttaaaaccgaagaaatatcattcttcccagattgaattaactattttggtcatggatttgagaaaagaaaaataaataaataaataaaaattataccaccttttggagacttgaatatctcatttcttcatttcagttttttaacattgatactgttaccattttaacatgttatcattatttggtaattgcaaatgtattcatatccaaggttcttttaatggtttatacatattagtgatataatttgaactgggaatattcaaaacatggtttcatttactgagattcaacaaacaattgaatcggtatatggttccattgtaacttgccctcatgaaatcttttccggtgaaacttttcgtcacctaacttcttgtttgtaatgtgaataattcagaaactctggagccaa

SEQ ID NO: 25032 - DNA, 895 bp, Glycine max
  Intron number 2 from transcript Glyma15g40830.1 (locus Gly ma15g40830) derived from phytozome v7.0 (chr-ID Gm15; pos 47820532 to 47821426)
cagtaccacgctctttcactcgccaatcaggtttttctttttactttttttcaatttctataatttcctttaattttagcttaatttgatttgactatccttttttttttcatttttttcttatgttggaattcatgtgagtatttgcagttagttgtaagtttgccaggacatggatcatggcataagtaacagtagttagtggcttttgaataattcttctttttctagctttgatttgagaaaagtcgtgaatggtgttgaatttttatttatttatttattttttattatgtttggatgtaggatcataccaaaattctgatgtctgggtttctgcactgggtgtaaatgtgtaatagatgttctctttttatgaacatgattcttaaattttaatgcagacttgatcaggttatgtgtttcaagtttttgtgcaatcaattgagagctcttgacctggtagctgttgctgttagatgtttctgagacccatttgatgctcataatttcatttttttccttttctttttctgtaatttaatgtttgggaagtgcatgatgttgttacatatggtctcgagtattaatttaatcacagtggctaactggttatttgttttctggaaccttgctggtttagccatgcagtagtgatgttgttaaatatgtgtgtataatattgtttggaatttcgatttcctcaactggaaataaatggccgttctttcccttgtaggcatgatcagtaggtattttgcacatttaatcatgattcatgagctccttgtaacgtttaaacattttaaatatttattttatttgtactgttcgttgatttactggctcttctatgtggcattgcaggcttccctggaggttgacattgttgcat

SEQ ID NO: 25033 - DNA, 889 bp, Glycine max
  Intron number 2 from transcript Glyma13g30570.1 (locus Gly ma13g30570) derived from phytozome v7.0 (chr-ID Gm13; pos 33148440 to 33149328 reverse strand)
ctgtactcactcttctcccaccctttcatactaaggtatatatatatatatatatatatatatatatacatatatatgtctctctcttttcaatttcatcttagatttaactgttcctcactcaaagttacaaaaacatttaatctaatttattagtaaaccattcaatcgaattgcacgaattcatttcttagattctgagcgagtggcagtgctgtcatgttaacacactcagctgattaaccaccctcctgcccacaagttccaaccattatgggcttggggatgttattcaggattcttaatcagatcagttatgtttatcaactctagagttagctagtattttactctctttagtatcttactaccctcagaatcatgttttgtattgaattattaactgttgagctcatatatgtatctcactatctttataaggttaaagcttcttcatttatgcccagtttcgattggcttttagcttacgagagattttcaattataaaactcttttattaggactcttttaaaccaataatgcagagttttcctcagtttatcagtgcttatggagaaattggatgaggtagcttctaaaaaggtctaggtgcatgagttggttgacaagtttaattcaattttacattcttgattcattatattttcttcttgtgactgattcgagtgtgtagaaatatacaaatttagctggttttgacaccatttaactattaagacacatattacccaggctcaagttcattagttcgtagtgcaattttacattctattttatttcagtctattattttctttgatgattcaatccgaatatttaaatatatgcataactcaataccctgacaaagtggtttttaaatgcagt

SEQ ID NO: 25034 - DNA, 671 bp, Glycine max
  Intron number 1 from transcript Glyma15g42150.1 (locus Gly ma15g42150) derived from phytozome v7.0 (chr-ID Gm15; pos 49548192 to 49548862 reverse strand)
gaacgctacgtcttcaagcgcagaaccggtcactgctccattctcaatttctcctttttatttattttatgttgaaatagtgatttcctttgcattgttcttagtgttttttacaatggaatgatatgtgtgtgtaatgtaactaagtttatctctgatacaccatcacttttttctaatttaattcgtgtaaatatatataattactcaaatgtagaattctgggtaccttagaagccctgccatagtggccgtgagcttatagtaatatctatgtgtgttttatgagtggtctaaattttgaaagtttttggaaagaccatatgatatctctactttttgataattgttgggattttcaatattcaattattaaatatgttttcttttccgtttatgatcagttgtttctctggttttttcgtaattggatgtgtacttttcatgaccatgataaagttgttaggtgttattaagaagtgattcaaagggttaatttaattactaatcagaattgctataatggtagtctttgactctttgggcgtttgcttttttgcaccgctaccatgaaggtttcctcttgctactgaaatagaacattttggagtttttgttgaatttttgtggtttatgttttcaggtatttacataattaaccttggcaagac

SEQ ID NO: 25035 - DNA, 504 bp, Glycine max
  Intron number 2 from transcript Glyma13g24240.1 (locus Gly ma13g24240) derived from phytozome v7.0 (chr-ID Gm13; pos 27611908 to 27612411)
tttattgccaggtggtgctggttcccgaaagtgaggtgaggccttttttttcgcggtttcactttggagaaagtgctaaaaaaggaaacgaatttatctcaactcagaatcttggtttctttagcacctaagtcttaggggttaagtgaaattttaccaattgagattagtatagttaatgggtaaatgttaattgttagttttttctattagcgagaggattcaaacccgcaaccttttcgtccttccctcttctcttctcctttaaccactagatcaaccttagcttaattgagctaaggtgaaggtgtcaaaactcaaaagggcataatgtaggtgtaggctttgttttcagaggaaaagggcactagaaaatggtactttggttgtgtggaagtgaaaagatgaaagaggggtatgttagtgttttttttttttatgaagtggttaacttggtcattgtttgtagcaagtgcagcagaagttgcgggagggggaatttga

SEQ ID NO: 25036 - DNA, 834 bp, Glycine max
  Intron number 3 from transcript Glyma16g04520.1 (locus Gly ma16g04520) derived from phytozome v7.0 (chr-ID Gm16; pos 3807772 to 3808605 reverse strand)
ctctctacattctcgaaggtttctgtgctttccttactatgtgatttgtattttgtacaactggtagtttttcctatgttgttaaaagtttggtgatcatagctgagtgtaattcatgaggatcaaaaacttagggtgtgtttggtttctggttttagaaactgtttctaggtttcaagaaaaaaaaaaaaaaaaagcagacatgtgcgcgatcacaccaagtttgtgcctcactaatgcagcatcagtccagatgacttgcatactaggatcacaaaacagaatatgtgaaaacatctcccagctctttctattctttggtttttaaagcacttgtttttggaaacaattttcaaaacttaatattttttttttttgagaaattgattgctgggtagtattaaattattttataaaacagtttttttaaattaaaaaagtgagaaggaaatcaaacaagccaataactatcttctctgatgttgaaatgatctgcaatcacctttgaaaaatagaaaaattgtgttagcatataactattatttttcctggtgagacatggagaaaggacattttgtctttctgggagtttagttgtgcccgaatcttcagttatttctggtactaaaggactaatgaaactgcaaacacccttcccattctagtaacaacagcaatagcaaaatccaagtctggcagagcaataaaattgaaaccttgctgccttttgtgtaaatatattttgcctggaattttgtttgtgtttattggaagacaacttaaataccctcttgtcatctggtcttcttttgatttttaacatgcagaagttcg

SEQ ID NO: 25037 - DNA, 711 bp, Glycine max
  Intron number 2 from transcript Glyma16g34470.2 (locus Gly ma16g34470) derived from phytozome v7.0 (chr-ID Gm16; pos 37116097 to 37116807)
tataaatacgactatagcagaaagcagttctacgagtaagttttttttccgtcccttgcttgatttgccttttggaaattaatagtggccggaagttccatcaactcatctatgcatgttgtttaatttgaaataatgtgtgtgtgacttgatagaaactaattagaaatgattatttgacttagagcaacaagtgataagttgtcaatttttttagaaaggattataataattttttaggaattaaaattttctaggaaagatcacaaaaaaaggaactgctgataagatgccaatgttcattttttttttcttctacttttttgtttttggtaatttccccaaattttaccttggccttgaagaggatgtacctatctttggtgtttgttgttagttttattgtactcttatttaaaatgagatgaagttcataaacactgaagtttgatatgtaactgaaagcctggggaaattgatgttacattaatggagttttgaagtgttttctgtgactctgcttctgcatccctaatttaggacaaattataatttgattttatattttacatgagatatgccagttaagcaatttattggaatttttttattggttgttggcttggacttgattatcatatgacccaaatttaggtccatgctcttgtgtttcatgcttttcttccaggcacacaggcagcttatctattc

SEQ ID NO: 25038 - DNA, 900 bp, Glycine max
  Intron number 1 from transcript Glyma16g34560.2 (locus Gly ma16g34560) derived from phytozome v7.0 (chr-ID Gm16; pos 37182000 to 37182899 reverse strand)
gaccttgttgttccagctcttaagacctccctgcagtaagtatatatcatgtttaattactcatttggtccttatttttttttttggaaggcaaatatagtattattattaaaactattcagtaccagaggtacttaagaaagtattacaagacacctatggtgccaccttccaaaagcagaacccaacaaacataatcccaaacaagcccctaccaagaaggaaatacaaaaattagccaaatgactcctgtagattagtagaccagtgattaaattgggtattgaagcctttgtctctagcttttaaccaggaccaggcaaggaaaagagcctcatcgatcactctatgaggatcaaaaagggtccccttgaaaagcaaggaattcctgtgctgccaaatggtaagggttaaagctatccaccacccacacaccctgctgtacttactccctgcaccaaatccattacagaattggataaaatgactgacagggtcagctgagagagcaccaatagcccggatccatttcatggattccccccacattccccttgtcatttggtccttatatttgtacaatctctatgttttaccccctacacctaaaaactactcgttttagtccctacacatacactttttaattcgttttaatccctgatgttcaaaattataagaacttaaacaaattataagaagattttaattcgttttaaaaagtatatgtatgattgatcacatcaaatgtgtagggactaaaacgtaaagattatgcaggtataggaaccaaatgagtaattaaatctattttgtatctattctatactttgtttctctggttgcatcctatgtaattataagtttcctcaaaactgtttaggaagttgggattggagt

SEQ ID NO: 25039 - DNA, 630 bp, Glycine max
  Intron number 2 from transcript Glyma17g01650.1 (locus Gly ma17g01650) derived from phytozome v7.0 (chr-ID Gm17; pos 999937 to 1000566 reverse strand)
ggccaaaagctccttcaagcttgaacatcccttgggtactctttttcttcttaatcttttatttttaatattttcactctgatatttctatctgtggccttattcatgattcgttccgttgccacacacaaacacttaaactatactggccgcatgttttatctcacaaggccccaacccttgtgtttagtagggtttgcgcgtaattagtacagttaaaacctgtctcacttaaattgtaatgccaacctttgattcctggaattcaaaatcgatggcttttcgattctgtggaaaaaaaaataattatggcataggataattcatctaaatgaaaatctaattgattgggattattttctaagacaatttcaaaaggatcttttgcttattctctttacgaatagaatactgaatatgtttatttctttcttttatgcctgtctctatacaccttatgttttccccctaggacaaatattttgtttcacccttttacgagtattgtattttctctttatatctaaggcatactttgctgcatatttgtctttttgaactcctgaattgaactttttgatctttcccatgtcagaaagaagacaggctgagtctgctcgcattagagac

SEQ ID NO: 25040 - DNA, 509 bp, Glycine max
  Intron number 4 from transcript Glyma13g01920.1 (locus Gly ma13g01920) derived from phytozome v7.0 (chr-ID Gm13; pos 1693201 to 1693709)
tagaaacaaggcaagaaggaattggtgctcccaaggtaaaaacaaaaatactattatgtttgtttctacaattttaattttgaaatttggctctgtttagataattttgtcaataaacactcataacagaaagaaaaataataagataaaatgaatttaaactaatttataggagttttcttatttagtttctcataaaattgacagttatttactgtcgtagtaattgacacattaagttttcacacgggtaactgactaagcacatttagaggcaactttctctttggaaaatgagcttgtgctagccagttacatatgttgtttcctatgagatactttatgtttcgtttttgcactccttaagaatagatcagtagtgctttatctataatttcttcttaaattatggttttaaggacttttgtattgctcatttcaccttatttttggagcattttattcatttaactctttatttgatcagattgaaaagccattgcagaggc

SEQ ID NO: 25041 - DNA, 418 bp, Glycine max
  Intron number 2 from transcript Glyma16g33600.1 (locus Gly ma16g33600) derived from phytozome v7.0 (chr-ID Gm16; pos 36474198 to 36474615)
tgttattgaagatctgaattttgagaaaatgaacaatttaacttgtttttgagtaatcattaatatatatatatatagtgtctggagtgtcttggatgctgtacacttgttttataggagcggatcttaactaaaagaataaactaacttaaattagtgactaactgtaatgtttgttgctgtgttttatttgtttgtgcatgttttggtggtcgagggatagaggcgtgtgattcgtgcttgttttttttcttattacttatgtgtaatggttctgttgacatggataattcacattagtgctcaaatgacttctgctctagcttgtgcctcttctaatggttggtttttagttttaaacagttttgacattttggacttttgttttaagggaacgcctggagtaactggagcagtg

SEQ ID NO: 25042 - DNA, 558 bp, Glycine max
  Intron number 3 from transcript Glyma16g33600.1 (locus Gly ma16g33600) derived from phytozome v7.0 (chr-ID Gm16; pos 36474697 to 36475254)
attgttgaattgggttctggttgtggattggttgggtaagttcaattgctatctcattctatttgacctgttaatgctaaatagctataattggttcatcatttcttgattagcttgtctttttgcacatggatttaatgaactaggaagatagagctttgagcttttgcattgtttttttacgaccaagagacagtttgaaccaaaggttaaaatataatgaattaaggagttaataacaatcaaatttctcctaccacatgttaaaatctacttttccacctatatttttctatgaactctcatctttctactccatttgttgtgtaaaagttgattttatcttatgggagaagtttgattcattctacctccttaattcttcttattttctttttcttaacgtgtttgttcaaaattttatccaaactagctctaagttgtctaacaaatgatgaggaattatttttaagtttgttcttactcattctatgatacacctttcttattttttcttccttagttgcattgcagcccttttgggtagtgaggtcattg

SEQ ID NO: 25043 - DNA, 992 bp, Glycine max
  Intron number 4 from transcript Glyma14g08960.2 (locus Gly ma14g08960) derived from phytozome v7.0 (chr-ID Gm14; pos 6969556 to 6970547)
gggaaaggtatcattgtatattttaacttattattgcctatttatctagtagtttgtgtatggtgaccaatgggggcaagtttatcaatgagctccttagctgcagtgttgtgtgttagttttcatagttctctgcactgtatctctttgtctctctcttttctgtttcactctaatgcctacaccataaatctcactcccattggctgaatgagaaatgtgaagtgagacatacaaaaaagtctgccactttcacgacaattggcagctgccactccctttggctgacaccaccgcactgcagccatcatcaacaactctgatttccaaaatttgtgtgcatttgcaagtttttgacatggtttattttttaggtccttgaaaaaatgtgcaggtaaatgttattgacacatttgctggaatatcattttaacttttttgcctgtgctttcttaaattcctcctttcattttttggttggtagtttatcctgtatagttactaataagaaaaataagtagtatggatatgctttcggaaaatgactctggaaaggagaaaatgtaaggaaaattggtatgttctgtcaattgcgttttctatttttcaattttccctttctctttcccaccatgattgattattacttattagccattcgtgatagtttttgtaaagggaaacaatgtttggtatgaaaggttaatacacgaatcttgtatacgaagacactcctgggtgatttctgttaattccctaattgtattcattttttaaattattcaattaaccaatcaaaataagacaaatgggattcgtactgttttcatgaaaaaatattcgtaccaaatagcgttactcttttgtaaaaatactctcataggaaatagcattgctacatttaagaattgtagaccaattcccattcccttatctaatctgaggtttctgttgcaggttacggttcttggcacctctggacttgcaggttc

SEQ ID NO: 25044 - DNA, 942 bp, Glycine max
  Intron number 2 from transcript Glyma15g19560.1 (locus Gly ma15g19560) derived from phytozome v7.0 (chr-ID Gm15; pos 16913349 to 16914290)
tgcttgtgtctctcgccttatcaactaggtttccggtttgtagctctctttttcttattcatactgaaaattattttcgtaaatttatgtctgttgttattattattagagtaaatattctatgtactgatttacgtgtgtctgtgtctcatccaatcacaaattgtctactataagtttgtttgaattttacaataactactttaaaagtcatacttacctatcatgattttactatgataagtttgttgacttttattttgggtaagtttatccagaaggacttctagaagaataaaataagaagaaaaaataaaatgagtttatctgtaagttaaaattagcttatgcatcccttaaaaaaaatagcttatgcataagctaatttgtagaaactctctcatatagtttatctaaaaagatgagataatttctacaaattaacaggtgcataagttaatttgagctcatggagaagctgatttcatttttcttcttatgtttttctcctacaagtccttcaagataaacttacctaaataggccttaactaccttagcagtcatacttatctgctggattctaattggttgacagtacagggcctataaattaaactattattattattattatcattattatttaatttaagtgcaattacaatataattgaatcacaaattgttgtgtatgaaaagtatgttgactattatgattatgatgattaccttacaagtcatactcaaggtcagcaactcaccattattttttattgattgacagtgtaacacagaaattaatctcttattattgtttttatcatctcagttcttgtcattttagttattctcattcctctctttatttgaatacttgcgcactctccttccctttcattgtttcaggagttagtggcacttagccttcttggaaacaagct

SEQ ID NO: 25045 - DNA, 688 bp, Glycine max
  Intron number 4 from transcript Glyma13g23700.1 (locus Gly ma13g23700) derived from phytozome v7.0 (chr-ID Gm13; pos 27047562 to 27048249)
agctatacctatcattgaggcaaaaccaactggtaagtgattgaacatgcctttcttcacgaactgctattatgtttctcttgatgcccatgtataaggtgtagaccctcttctttgagttgcactgtagggaaccaacagaactactacgcatgttaggaataggataaaactttaacataggccaattcttcgtagacttgtatactcaacagtactgattgaaaggaatcctatttagaattgactcttttgaagatccatataaaatggaaacatttagatatatcagagggcatgctcaatgcttaatcataacatatagttggccttgtgggtttccaagagcatgttattttggaatttggaatttggaatttggaataaaaatttggaattttggggcacattgttattttggatatgaagattcttgcatgtgataatctggataaagttatttcagatcatatataaatgttatgtaaacctattatggctgatgttattattatttttctgacttatttgaacatttccatcttttcatgagtgtatacttgtaattcatatttttctgggggtacttttgtacagtaatcacagctattagtatggcgtatcaataatggatggtgtgaacatttttgcagatccagaagaggatccttttgccaaaaggaaagaa

SEQ ID NO: 25046 - DNA, 926 bp, Glycine max
  Intron number 1 from transcript Glyma13g25580.1 (locus Gly ma13g25580) derived from phytozome v7.0 (chr-ID Gm13; pos 28798543 to 28799468 reverse strand)
atcttcgctactacgacgctgtcgtcgacggggttagtcgccacgcgccactttctcttgtcgtttacttgcgtcattatgaacttttttcttaacaccaaaagttaagcttttttattatttgagtatataattttgttcttgaaagtttgtgtgaatataatttagtttccgaatctattactttcactgcaaattagtccttctactgtgaagttaatcaagttgactttgattgtatagtcataaactttgaagggccaaatcagtataggttcattaggttgttacttttagtttttgagatggaattgtatatttactctttatgattcagagagactcacataaattttacctaagagtgaaatgtgatgcaaaaaaatgtatttctagcatttttcttactgtcttgtactcttgtaagaaaattaactaccagcactatatcacacgttatcaatgatggatggccgaaattcacttccgccatatagacatgccactgcggtctatgacgccgccatagcaggcctcccttcactgattgcctatggtggttggaaaaaaatccgccatgccattccgacatagcggccatttgacaacactgaattatcagataatcctaaatgttctctatgatagtatgtttagatttccattatatgtcattcctcatttgagcaaatagtaatgtataattcttcgtcacttatgagaaggttacatagtttcttaaaagccacaacgtgaaatggaaactaagcaagtcctactagatactaaattcaataaaatagaaagctgatggctttttatttagtttggggaaaataatgcagtccactattacattcttgattaaattgcttcctctgtatccttatgtacttttgatactgtgcctgcttcacaggtgcaac

SEQ ID NO: 25047 - DNA, 612 bp, Glycine max
  Intron number 1 from transcript Glyma15g04460.1 (locus Gly ma15g04460) derived from phytozome v7.0 (chr-ID Gm15; pos 3124934 to 3125545 reverse strand)
cctcccaccccatttgccaaagtcggttcactcattcttatctcttattacgtttttatgtattattgtatgtactgttctattgcctatttgatatgcatgcatcttcattatggttgatgatcaaaaggctgttccatatgattattagtgggatccaacagctacggcttatataatatacatgtgtttaattaaaccaactcaaaaaattaaaatcacctaaaattaagtgtacgtgcatgtctcttttgtttatttacctttcacaattatggatacatatatagaaatcaagtatgctttcttttcaaaaaaaaaaaaaaaaacagaaaagaaatcaaatatgctttaattcttctcaacggttgaaaatgataagagttagaagctggtaatggattaaagctatgttattttatagtggtggtctaattattggttgaataaacaaggatctaatttcagggagggataccccttttacgcttctactccatcatctaatatattttgtcttaacaaataaattacttcaacagtctgaaatcataatttttttttttgttgttttcagttgtctgcgctccatattgtttgcaaaagagtgga

SEQ ID NO: 25048 - DNA, 916 bp, Glycine max
  Intron number 1 from transcript Glyma16g31540.1 (locus Gly ma16g31540) derived from phytozome v7.0 (chr-ID Gm16; pos 34904842 to 34905757 reverse strand)
ttgcaaaactcctgataatctctcacagtgctcgggtatgttcaatttcaaattaagtcttccttttttcttgaagaacactacactacagtgttatgtttccatttcctatccaaattctgttatcctcaaattctgttataacagagtttgttattatctgctagaaaacaataagcagtgtaagcctataaatatcaagagaaaagaaatgaaaaagcacagaacagaatttgaatttgcttatcttctctttatttccttcgttttgctcttagcagatagcctctgctatcagttcttcagactgtttggcggagaatgatgtgagacacagaatgtgaaattgagagggaacttgaataagattaaaacagaagaagctgagaaaacaatttcccgttgtttttgtttttttggattttagaacacttattttggattggattctccaaacttatatattttggataagaaattgattactaagtagtctaaacttattttataaaacagtttcttaactgagaatactcaggccctaaatcttccaattttagtatatttctaaaaaaatcagaatatttgtggtctaagttttatcattatcaagcctttcattttccttaaagaacaaaagagtgttacattccatttactatgtaatgaatggtcaacaagtcatgtacttcaaacttttctacttttctcattcataactagacaataacacattttaaaggggataaaaagggcagctaaatctgccaattttactttgtttgtgtatctgttatctctgagttttcaactgcgaaagttaaaaatatttgaggtttgattttttctcaagaaattcttgtttgaaacgatttgaacagcacttctgcacttggatcctaaatcacctgaagct

SEQ ID NO: 25049 - DNA, 972 bp, Glycine max; identical to SEQ ID NO: 19051
  Intron number 2 from transcript Glyma15g31250.4 (locus Gly ma15g31250) derived from phytozome v7.0 (chr-ID Gm15; pos 34448576 to 34449547 reverse strand)

SEQ ID NO: 25050 - DNA, 457 bp, Glycine max
  Intron number 1 from transcript Glyma16g24820.1 (locus Gly ma16g24820) derived from phytozome v7.0 (chr-ID Gm16; pos 28786828 to 28787284 reverse strand)
caaacaactcccttgttcaggtatacttatacatacaacttaaaatcatgcttcctgtgttcatttacccaataaaaaagtaataaacataaatttgattgaatagcaatgctaataatatccacaatattgaatgttagttaagtttgatcttgtaacaccaatgttatgtttagtttagtttagatgatgaaaataaagagaatgaaaatataagagaaatttttgaaggtaccagattcacgaggaatacacacaatttcttttctctatttttctctccttcccctcaaccaaaacggctttggttattacctaaaatcaatttcaaacatgtgtaaaaggtaaaagacagtaacacatgaatgtagtacaatatatgattactaactattcagtgtcattggttataacttatacaggaaaaggtgatttgtttgacaaagcccataagaga

SEQ ID NO: 25051 - DNA, 718 bp, Glycine max
  Intron number 2 from transcript Glyma15g06310.1 (locus Gly ma15g06310) derived from phytozome v7.0 (chr-ID Gm15; pos 4458088 to 4458805)
ttcaaggattggataatccatctattggtcaacaggtataattacgtatactagcttttcaatattccttgaacgattgaatattcaatttactactatgaaaaagcaagttcagcggagtaacttctgctgtttgcttcttctgtttttttggcgtatgtcttggcttctcggatgattttaaaatacaatgtttttttaagtgtctaatgtctttgatttgatttgtgtaatgattatacctagtggaataagtattgttgttacttgttaccggctaagcaatctctcatggacatttgaaacaattttctaatgattctataaatttcacgtcagttatttttcaattttcttatcgtagattaatattgatgcggtggtatattactatatttaacgtttttttattaacaaatataaattattagtttgttaatttttgttagtgaaagattcgaatccatcatctatcacaatgtctgaagtgaatctgctcttgtaactgcttggcaactagtgatgaatgatatcacaatgtttctacagccttctgcatccttaattacctctggaacaatgaaaaaagtaaaaattgatttagataaagtattgacgtagcttgcttaagcatgcacaattgtaaaatcatgagttattatttttttgaaactctaatataatctatataatatagcttggaagtgactcctttggc

SEQ ID NO: 25052 - DNA, 388 bp, Glycine max
  Intron number 1 from transcript Glyma13g17990.1 (locus Gly ma13g17990) derived from phytozome v7.0 (chr-ID Gm13; pos 21656951 to 21657338)
agaataagatcgttgatctcaacatcaccaatcaggtctgttaatgggttcttcttacttctctctcttgttttcacaatttcgaaaagttcacaccttcttcttggtttgtttccctcatgaatatttcagtgacatgggaaagaaaaaaaaactatgtggtccttattttgttttgattagaaaactcaagtccactgagcatctatctgttctttttttttaatcctttgaaatattaattcaaacgcacatgtagtctcttactgaattcatgtttataaggcctaattaaataatcatagatgttggaacaataatctgtgcaattctggtgaaaaaaaaaattgcagataaagagggaaatagccaccttaaagctcctccg

SEQ ID NO: 25053 - DNA, 714 bp, Glycine max
  Intron number 1 from transcript Glyma13g24520.1 (locus Gly ma13g24520) derived from phytozome v7.0 (chr-ID Gm13; pos 27877381 to 27878094 reverse strand)
tgctcccttttaatcaggtacatccatcatcaccaacaacatcaacgtatggaacagtgttattaacagtgcctatatgatttgagttttgacctgttgtaattgtgttgtttttctgtctctctggttgagtttccgtttttcatgatgaagctctctatcttttcttttttggtgttttaattatgctgttgccagaataagtattaaattctatttgaatttcggttactgagattccctttttaaccatgcactgaatttgatttataagtgttgatttgacttttgaggacgaaacatgtgttactgtccgtgttttggattatttacaaacatgattttgatcagtcttgatttaataagatgattttggttaaaattggagttgaagagaactgattaatatttagaaacttttatctcatgaaagcaagtttgtatgcacttctttagtggaaaagctattttttcacttctacaactgtacttctaggactcaaagttgactttggtttgatacaaccaaacatgttaatgtttgttgagttttcccctacttcccttatgtttatttttctatttcattcccatttatctttgatgattttttaatataaaattaaaattaaagagtgaatctctggttcattcatatgataagatagtgtaaaatgagaaagtctgaatttcaatgaatttggttcggtgcag

SEQ ID NO: 25054 - DNA, 601 bp, Glycine max
  Intron number 1 from transcript Glyma14g10640.1 (locus Gly ma14g10640) derived from phytozome v7.0 (chr-ID Gm14; pos 8845647 to 8846247 reverse strand)
ctgcctctgttcacgaggtttgccttacagtttcattacttgcacatgaaataattcacaatattttttttgtaattgtttttatttttcacctatttttcatttcttggcatttaggcatctcacaagtattggcaaggaacaactcttgtgtaattttttttatgttgaataaaaggagcataaaatttatattagagaaagacacatccccttataaggttaggaaagaccacgaacttaagcaaatatttatagtggagtttatttgtttagtaatagagaaaatctggtaatcaaatcaaattacaattagtgtgagcagaagactcaactagatgagtcaatcccacttagcatatcttatgcaagaatgatatatgatttttaaaacaattataacaaaattcaacagtcttatgtaataaatcatgactgaatgacagaaaaactaacgcacattctaaatgaaattcaaacacattattgtttgttttattagtcattcttctgtaactaattaagatttgtggagcacataaaatcaatggaacatcccttttttttttcttttcttttccttttttttcccaaaagggtt

SEQ ID NO: 25055 - DNA, 570 bp, Glycine max
  Intron number 2 from transcript Glyma13g29310.1 (locus Gly ma13g29310) derived from phytozome v7.0 (chr-ID Gm13; pos 32216373 to 32216942)
ttgaaacggttagtgtgcatttgttagttttgtgctttactattggattttttatttatttatggattaaagggtcatgtgggcctggtcatattttctgttttggcaatctgattgaagaggcttcacgaatttaggttgtaaagtcatttttttgtaagatgctcccagtccccatgtcaaatacttttatttgtttgatcctccatggttatgttcatcagacaagagttctaaaagccattcagatatacgtgaaagtcataaattttatttttgataaggtttaatcacttatatggtccctgtatctacacaatttttatgttttaatccctacacatacactttttaatccattttagtccctgctgtccaacattgtagggactaaaataaaatggattaaaaaatatttgtgtagggactaaaacaagtagtttctaagtataaagattagaacataaagattgagcaggtatagggatcaaatgagtaattaaatccttttgataattaagtcttgcatcttgagtctgaacttctctaccatttttcaggttttcctga

SEQ ID NO: 25056 - DNA, 917 bp, Glycine max
  Intron number 1 from transcript Glyma14g36050.1 (locus Gly ma14g36050) derived from phytozome v7.0 (chr-ID Gm14; pos 45211473 to 45212389)
gagacattactttctgaggttttaacctttttaaggtatatactgattgattaatatcgtttctctgttcatttttcactttttctccccctcagatagcggtttgtggattctctgaatgattgaatctttgtcaaaaattcgtacttttgtcgttttggcttctgggttttatgtttttcaccttgttttatctgattttggagtaaagccatgttttttgtgtgtttgtagaaacgtttaaatgcgtaatctttttttggggggtgaataattgaaacttttactgacaaaaatgggttcggttgccttgatggtgcccacgttgggaatttgtctgtgttggctattttaaggttttgctattttttgttcttgcttttaatgctttgctgttttgaatctgtcattgtttggattatgtgtcaaagatgggtttattcctcttgattctgttgagaaaatgggtgtctctgttcaatgtacttaggattactgttatcttttggttttgttttttgttgtatatacaacgtattgtggttattgccctttgttatatctagtagcaaattttaggacacatgtttgctaataatttgtattgccctttttaatgactagtaaatcgttgtttttgaggtaaaaaacacgtgagtaacgcagctgcaaaattcagctcttccagcttttaatgcttgaaattcaagtagtagctgcacctaacattttctgaatttgattgcttcatcaactcgttttttttttttttgttcttttctataagcttgtttttgttgaggttgttctttaaaacgttagatttccttttctgttgtcaacattatttttgaaattgtgtgctaactgggttctttataggcttccctaacttgaggctgctacttgtttaagaa

SEQ ID NO: 25057 - DNA, 891 bp, Glycine max
  Intron number 2 from transcript Glyma14g36050.1 (locus Gly ma14g36050) derived from phytozome v7.0 (chr-ID Gm14; pos 45212879 to 45213769)
gggtgttgggaactttccagacagttattcaggtgagttttcttattaacatatgttgtagtttacatttgtgctgttttaaacttgattttctcgttatgttttgcttaatggatagttagcaatttagcatttgattgcggttgaacaatagacattagttgaaaatgtaaaaagctattcaaaatgttggtttggtctttaatcttttgggtttttgcatgggatactgatttctgtcgaaacacagttttaggcattggttccaccagctgctgaagtccaatatgaatgtattagttaaaaaagagattagccagatataatcttttggttagacttaaccagactgaaatatgccattttgcatttagtgttatttctaatttatttttctctttgagaggaagttgcttcaatttgttataaaagaagataaagataagcagagaattcaacaatcttgctgcatttttgtttaagcaccataagaggcaaatatgatttgggggtgataggattttaacctgaacttttttattcatcgagtatttttttgctttaataagatttaccatttggttggatatatgattctggctttaccctcatgatccattagctggaatcaacaaacctattaacaataatgaaataaagtggtttttaacccaattgagagtgtacttggactaatatctagtatgatacgttgtgatgtgacttgtgaggttaatgttaatttggactttgtgcatatatttgtggttggatatatggcattcattcagattttatttttcttatggtggggctagagttgtaacatttatgccttttctccccttgtctgcagagagcaaaaaatttgtggaagactggctctcttcc

SEQ ID NO: 25058 - DNA, 655 bp, Glycine max
  Intron number 2 from transcript Glyma13g35800.1 (locus Gly ma13g35800) derived from phytozome v7.0 (chr-ID Gm13; pos 37179271 to 37179925 reverse strand)
acccggaagcatttgccaagaacagggctcttgaggtagttttttagccttaaactcaaatataatggttctttctcattctttttttaaaactaatttagtgtagtactgaaggttctaactagttttactttagttttaaggttctagacttctattgctcttttacaacaagaatcttaatttcatgcaggactagtatcatttgtcatagtgagaccaatgatgtagcaaattttattttgactattacttgttactactcttaaattgttaaggttaaattattcagcaattcttatagctgtcttcattttatgttttaatctttatacaataaaaactgtaagttttagttcccacacatacataaaagtaaaagttttggttcctgtggctaacaccatagcagaatttttggaagtgtaaaaccacatagtgataaactgctacaaaaaattccgtgggaataaagttacaattttctttatagaaactaaaaatttaaagacaattataggaactaagtgaatagtttgaacatttgttaaatttgttcaacaaggggatcatacatatcaagtgtcataatttaatcgaagtgattttttttccaatgataaacactaaattattatgtggaataaggttatcc

SEQ ID NO: 25059 - DNA, 987 bp, Glycine max
  Intron number 2 from transcript Glyma16g28980.1 (locus Gly ma16g28980) derived from phytozome v7.0 (chr-ID Gm16; pos 32898340 to 32899326 reverse strand)
cttgacacaaaggttggttagttcttcgctcaaacattttgttttccttttcgtgtttttagacagggatctgctgttcatgtatgtttgctttgtcacaatgttgtattggacataagtggatagtttcctcaataatggtttaatgcaatgctgctgttgatggcatttaccaaattactatcataaaatgttataatctcaaatgctggtgtcttattaagtgattcagtagcaggcagatttggtatcgatataggtaattattgatattcatttcactttttgtttctgttctgggaatcataattaaatggccaagaggtagtggtttgactcattgtgctacatattaccataatttaatttggaagcttgtgccattactctccgttgtctaaattctatttaatggtgtcatagagccaggtataccttatttgatgggtgacgatttctatcctctttctttaaccactgagaaatcgagaatgtgatgtatttgtatttaggccttatgttaaatagaatgattaccgttcctggataggggcgcttaattataattataagattaaaaattgtctttaaccctgaaatgctgagcagggtgaccactttaacaaaattataaatataagattaaaaaattatataattcatatgcaaacaatcagaagtttaaaaatgaccaagttggaaattttatgaaaaatagatagtagagtgcatgtctgatttaattaaatttgagaataattgattttctttttcaaaaaccctctcaggaagcttttggttataagctgtttcgaacaaaaaataagctaatatgaacattcacaggatcaaatatgtggcatatgcacacaattcctcccaaacatttttcttttcaaatcatgagtatttgattctgtgttttctaatatttctttttcttctttctcagggtcctgaagttaggagtggggatttgccacaacc

SEQ ID NO: 25060 - DNA, 499 bp, Glycine max
  Intron number 2 from transcript Glyma15g05940.1 (locus Gly ma15g05940) derived from phytozome v7.0 (chr-ID Gm15; pos 4227695 to 4228193 reverse strand)
taaattcccaattgggtgcatacgtgtcctcacaggtatctccttgagtccatttttaattggtatgtgaattttttgatttatttcaattttatttattttttatgtttcctttttctttgaatgcgtagcaaaataaaacttaaagatccttctgaacaacaattaaatacttcttatgacaaaatgtgtgtgtatatatgtgtatgactatcttcgactatatattatagtagatgatcaatatctgtattgaaagtcttagtattgtgctattgcttgcgatttttgttgaaccaagtttgccaataaatcaacaggtctcagtcatctttcatcagatcttgaactttccctgtgtatgattgttaagaatacatagaaattaggaagttccactgccagctttagtagtgataatgaaagatacagattaattttattcaaaacctagtaaattgcagaagaagagaaggacgccaatttaattccaacaaag

SEQ ID NO: 25061 - DNA, 990 bp, Glycine max
  Intron number 1 from transcript Glyma15g42110.1 (locus Gly ma15g42110) derived from phytozome v7.0 (chr-ID Gm15; pos 49508926 to 49509915 reverse strand)
caacctaacaagtgtttcactgaagaagctgcaaggttagtatacaactacaacctcatctatattctaaatttaattttgagacattatcaatggaaagatttttacactactgttaactaagaacaaaagttattaatcttatcatttttttttcagcaaaaatattatatgtattaattgagtaccaggggtactaaaaaggtacaagatactgctcaattttaggctcgagactaaaaatgctctgaaccaccaactgagaaagattaaaaagctacatatttggttaagcaaaaagtctatacatcactaatagaaaaagctgctgtaatattagtagaccactggttgtaatggatactaaagtccttctccaaatgtgtgagccatgtccatgttaagaaaagtgcttcatccagtattctgttagcattaaacgccccattagaaaaaatcacattattcctttgcttacaaatcgtccatgtcaatgctagccaccaccatctcgatataacaatctattatcataatgtcgatatattttaattaaatttgcattacaatactaagattattatacatttctcataaatgacacaattctatatgcataaaatattcgtatgggttataagttaaaaatgctattagatactttaattttataaggataatagttattttgataattgtgattagtgaatagggaaaattgttaaatttttttaatctctgattaaaatgttaaaaatggaagagaaaaaattaaaaaaaaaacatttacttccaaacaattaaacacacacaattgaatgtttttaattactcattagcatttgcctatttaaatctttttcatattaacaacgagtgatattccccccactttcataatttctcttaaccatttgatttcaccttgctaattctagtttgtaccccgatttaagaactcatgtgctcaaatgtcttgtgatagatttt

SEQ ID NO: 25062 - DNA, 964 bp, Glycine max
  Intron number 2 from transcript Glyma17g04780.2 (locus Gly ma17g04780) derived from phytozome v7.0 (chr-ID Gm17; pos 3211074 to 3212037 reverse strand)
acaaggaggatatagagccacatatttcatctttggtgagtaaattatatatgttcccctcactaacaattattttacctacttttttcttctatttggtggaatagtctgttcaacgaaggcaaattcattggttttaactgcagcaatgatgttgctggataacattggctttgtggccaacatggtaagcttggttttatatttcatgaacgtcatgcattttgactactctggatcggcaaccaccaccacaaacttgttgggtactgctttcttgctgacgatcgttggagggtttatttctgatacgtacatgaatcgtctcaacacttgcatcctctttggcatcatccagttgttggtaaagtataaacaactgagctgattaatgttaattgaagggttaaaacttaagtctgtgctaattgaaataactagcatacaagaaataatcacagttgtttgctgattttttatggctgtatatggtgatgcaattattcttaatttatgtaagatataatacaagtaagatacatatctagatatgtataaaaattcataaaacataataaatatataattgcagttctgcatatctaaattaagaatatgcttgttggacataactaaaaacaaaatagaaattggaataatatcaatctcattcctttcttgatatcatccataaagaggacaatttctatttttggttcatcaagggacaatgcttctatgtttttactaaatttctatcagtaaattatccaagagtgttggtattaaatacagatacatatttgtgaagtaaatgaaagtagtagcagtgcttcacagctgctgatagttgaacacagacacgtagacacacaaaagtggaagtaatttttcctcattgtcttgatcttgataattttgaatttcagggatattccctacttgtgattcaatcccacgacaa

SEQ ID NO: 25063 - DNA, 596 bp, Glycine max
  Intron number 1 from transcript Glyma15g03880.1 (locus Gly ma15g03880) derived from phytozome v7.0 (chr-ID Gm15; pos 2725601 to 2726196 reverse strand)
tcatcctttctggcttaattgtaaatataattcaggtaagataagattcaatctacgatcattattatattcttcctcttttttgtttttggtttaatggccgctttaatattgatacttatcttgttggtatttattaatgcaattaatttgcatgcacattgctttccttccaatccgttaaaaggaaagtataacaaaaatatataaagcaattatgatacattgatataggatgcaaatatgcaatgcaattgtttctattcctttgttgtatacttattttcctcgtttaaggaatattatttttcccattaaaattggaatttgtcataaagctataattacaattgcctacgaacacgccaagtctgttgtatttctaattttctttgtacatcttgatcaactctgctttgttattgtgaattagaatctttaaaggaaagaagcagcaaggattgcttgaccagaccatagaacttaatttacaaaatcacatttctttttttattttgatcagttaattgtttcacctaatgaatatatatgcatttgtaggctgtcttctttgtccttcttcggccactatcaaa

SEQ ID NO: 25064 - DNA, 553 bp, Glycine max
  Intron number 1 from transcript Glyma15g06380.1 (locus Gly ma15g06380) derived from phytozome v7.0 (chr-ID Gm15; pos 4513786 to 4514338)
tccacgatttctccgagattcgcagggaaattcaggttcatcacttcacctctttccgcttccctactcactcaacttcttacgtttagcttttacacgtcactctattatgtgcttgtttggtttgcttttactgtgtattttgattgattagcccgttcagcactgctttgaatttgtttttcaaaaaaaaaaaagaagctttgaatgtgaattagttgaatgaacttcgagacatattgttttctgattttgacactctagctttgactgtaaaatcaacgttattatcatattaacagttaatactgtcttgtttgagggtccattatccattggaacttattttcatgttttaagactaaaaaacggttgaatttgagatttccattatttgcaattgcatgtgtagaatgtaaatgtaatactcttgatgccgatttgtatacggtctacttgtttaatcccccctcctatctctctgttgactagtatatcttcactcactttttctgcaggctgaaactgatagggaagcaggtgggaacaaagg

SEQ ID NO: 25065 - DNA, 606 bp, Glycine max
  Intron number 3 from transcript Glyma13g40190.2 (locus Gly ma13g40190) derived from phytozome v7.0 (chr-ID Gm13; pos 40738504 to 40739109 reverse strand)
ctgttaaggagacttgcaaacttgatcgctcagaggtatccatgggagtagcttttttgttttttgctataaagttgctttcaatttatagtgaaacgtcaatactaggttggcttgttttgatatgttagtggtcttgagttcattgttggtgaaaactgaattcaccatgtttcgatcaccttatggtatccagacctttacttgaaattttgtgaaatttatttaattttatttaatataattacaaaaaaacgcttgttaacttttaatgactgctacatgataaagggaagttgggtttagttttagacactatttttaccatttttggtgacatgacattgaattagggatgaactttgaaatgttttggtgcaatttctttctcgctagttgttgctttgttctactttccttcacttgtaagttgtaaccataaatttagagattacattctacatgttagtcttggtcttgaatttcttgtcttgtcagtgtgtttaaacctatctgaatggtgtgatctgtattcaggcaaagtttgtctactgtaataaatatctttttattttttttatcatcgcctttatttaaatattcagg

SEQ ID NO: 25066 - DNA, 669 bp, Glycine max
  Intron number 2 from transcript Glyma14g01820.1 (locus Gly ma14g01820) derived from phytozome v7.0 (chr-ID Gm14; pos 1049874 to 1050542 reverse strand)
agggtcaaaattttcatttttccaggaatttacaggtcagtacttaactgcatattttttcatactactttttgggtgttgttttctattataataggagtttcatttcagtaatatccatatgcatgctgaagattttgattaaattgtcaacttgaattattgaggtgaaactctgattttgatcgaagaactccaaaatctaagttttgtcctttttttctgaattatatgaagtcagtaaaacaaacacctaatccatgaatatctgaactcgagtatccaggaaaaagcaaaatattttatggaagaacaggaaattctttttaacagcctgctataatggaaaaaccttatattttgaaattaattcatcaagttgatgataaaatacatggattaacaattagattctattgtgtcattattattcagttctaatcaaaagcagttgttttaattctttgcctgattaatccatattttggaaaaaatacagtttttttttttgtttttggggtaacgagctgggtttggttggtgtttttgatccaacagttacatttatttggtttcctaaaatttcgcgagtcatcaaggccttgtccttacgtttgtttatatgcaatttgtgcagagaaaaagtgcgtgtgcctgtgaccaagcctt

SEQ ID NO: 25067 - DNA, 788 bp, Glycine max
  Intron number 1 from transcript Glyma13g03170.1 (locus Gly ma13g03170) derived from phytozome v7.0 (chr-ID Gm13; pos 3118635 to 3119422)
ccaagtcaccctgcctcgataattgccctcccgatgtattttccattcactccttttctcttctctcattctatctaataatgttattttctctaatttgatttatttctttccttagtatttcaatttcatcatagaaggattttttttttttatgtttttaattttaaattttggtactagtaattcctgaataattggagtggaaattttaaaaaaatctttagttgtaccaaagaggctgattttcaccatgagcagcctgaaagggccatattgttttaaagtttgataaaattgattttgatgttattaattttgatagaattgagtgtgatgagggtctaaattaattttaatcatggattttaagttggaacatgtgctacgataggaaaacaagcatgaatttgtgttgctgcattctatctgggagtaccgatagggaaaaagaggctaatttctgggaaaagatattttttcttttcgaattgggtgctactgctactccttccttattaatttgaaaaaaaaaaatctttaatttcgtctaagaaactaattgttgctcaatatgatattggtcgcattggaaatgaactgagactccagacatgataaagctgccactttgggtgcactactattgtttctccttcctttacgaaacaagaggcatttccataatttcattccaagggttattagtttggcttccttatgttttgggcgttgtcatgatgctttcccctttcactgattatattttggggatattttgtagttga

SEQ ID NO: 25068 - DNA, 1059 bp, Glycine max
  Intron number 3 from transcript Glyma13g06090.1 (locus Gly ma13g06090) derived from phytozome v7.0 (chr-ID Gm13; pos 6384063 to 6385121 reverse strand)
tttggatactcaggcagttgataacaaacaggtttattgcaagattcatgttaaaatttatgttttgattagtacatctgctattggattttattcacctgcaattcctagcaatgtttttcaacttattgaaaacctgaaattgtatgcggaaatcattgagtagctttgtttttgtttcaaattttcttgtttaagtgtttcacatcgactaggtaatgttttccttgtaggagtaagacctggtttggggggggggctagtttttttttttaaaaagcctatccagtcttaatgtgggtcacaagtaaatgtgtagttgttggaaaagctgccttaattgcagacaccccttagcccgccttagttgcagcctctttgggtgttgcctgaagtgcggccttgagggtggtggcttagtcccacattgactagagaaatgaccaaattaaaatatataagtggggggcaaccctcaccttacaagccggttttgtagggttgagtcagggcccataacccaccttttagactagtctagtagtcttgcaaactttacattccacgtatccagtggggggtaagttgttcctcttaggcttggaatatggtcaaaatactcctatgacttggacaatcttctcgcctatagctaacattgacctacttcatttttttgtatttacatcaaatggagttgatttcagtactcaatttattgtttcttaaaagtttgtaggattttgctaaatgatgcatgaggtagtttatgtattatgaactcttgttatgtggactatacatctgatatatacattagtgtcaaggaaagttgttatttcttgtggattatagctcgtgtagagaactatagttttgaatatttagcttggacatgaacattattatgtaatttggtgttgtggagtgtttatacttatcttttatttagcttgatgatgaaggttgttttatttttatatgggatgtaaaataaaaatttgctgttccctgctatttacagaaagttggacgatctctcttctgtcttgggttgct

SEQ ID NO: 25069 - DNA, 437 bp, Glycine max
  Intron number 2 from transcript Glyma13g06090.1 (locus Gly ma13g06090) derived from phytozome v7.0 (chr-ID Gm13; pos 6385200 to 6385636 reverse strand)
cctgtatcaagtacttatgatttcttaccattgttttcttccgttagctctgttattttacttctgttctttatcctggaaatgaccaactgatagattcatgtgatgtggagttcttaaattttcctgatggttaacagtttatagttgctgcataaattttttatgcataatgtgagaatatctataaatatttttcttatgtaatacataactacctgagcaaaaacatgtttctttgaacagaaattttttgattgtactttatgaaatgtttctgaaaaccttgaactgcatctaagattctagtatgtaattatattatgttacttttgtggattagtattagtagaaaatttgtttttctcccctttaacagaagggaaattgcttgacctttcacctacttatggatcttattattttttctttatcag

SEQ ID NO: 25070 - DNA, 864 bp, Glycine max
  Intron number 2 from transcript Glyma17g04770.1 (locus Gly ma17g04770) derived from phytozome v7.0 (chr-ID Gm17; pos 3204103 to 3204966 reverse strand)
gttcaggatcaaacagttggctcatacaattggaggtatgtgagactcctgaactttgaactaagttcaccaatgacgggacacaatggttgttttcttgttactaactacaatcatccctttcagttttttggtttctgatggcgttactgtgatgagtgtgatgcactgattggctagaatggttatgacaatgcaacttgaaattgacacctaagcacacttaactctttgtagttcaagttaatgacaagttgcatccaatcttctccttctttcttaaccaatataggttggtaaagttggaaacaaaaaggttgctctgttaaaatatataatgtacttggagagaaattgtaaagagatgtcaagatcctctggtgtttggttttatgacatgcaacttatttttttatccttactttaccctttcatgcaagtaaactatgcaccaattgacaatccacctgtcaatcaattacctttctaaatcttgttggataatgtccttggtgatgcattagatgtgattatggcgctagtcctaacataatttgtagttggaattagaaatttcaaccaacactccttctaacctacaaggctatatagttagtcctaacagattaccttttggtttattttcaatgttgggcctgagcagtaaaatttggtataaatatggggaaattaaaacgtatatatctgaaacacttccaaaaagtgaaaaagaagagaatatagccttgagcattgaaattccgactttgttttaacatcctgcagatctgtttagccataataatttcactgaaccttttggttacagggaggaggctggtgtggaactgtaaaaaattgtct

SEQ ID NO: 25071 - DNA, 794 bp, Glycine max
  Intron number 1 from transcript Glyma16g27090.1 (locus Gly ma16g27090) derived from phytozome v7.0 (chr-ID Gm16; pos 31119455 to 31120248 reverse strand)
ccttcttgtttgaaacgactaaacctccggcacaagtaacaatttttttgggttatgatgtttacacttattgttttttattatgtgttgtgtggatgataaagtttagctatatattttatgttattaagtgaattatatacgggtctagatcgatctcatgcattcaataaaatagaatttgcatataatttattgaacatataataaatagtgtgttaaaagttgtgattttatattatttaatatgtgcaattttaattgtaacattacaggtttcttttttttttaaccaagaatgagaatttacatagcaaatgcatgtgattgaaaaacaagtaagaatttacacttatacgtgtccttttttaaatttctcttaggaaggcacaaattaatattcctctttgcatcttggcaatacatcagaactagtttattttaaatgagcttactgttggacaatcatactgtctcttcttgttactcacactgaatttttttgttttatttagattaataacagttattaataaattgaatgtagaaatgttacaattgtcatagtaataattgcttgctcatgtttagtatgaaatgtttgatttgcaagggttgtttgtttgaaactttgttgaactttgagcatccacaattgtgttaaataaatttgttgccaatgacttaagaaacttagtttatcaaaaatgaatttcatttcctataagaattgacttagttgtttcttgttcttttgaatttagagaagcattggacaaccacttcgtgtatac

SEQ ID NO: 25072 - DNA, 753 bp, Glycine max
  Intron number 1 from transcript Glyma13g18640.1 (locus Gly ma13g18640) derived from phytozome v7.0 (chr-ID Gm13; pos 22312939 to 22313691)
tcgacattcaccccgccgtcaatcacaggctcaaggtataccgatcacaatctctacaatttaactgttttgattacgcaattgaactgtaattcgcgatggtgataatgtttactttgagatggattgtggataagtaaaagaaattttgaacacgctgagatgtataatttcattggtttagttgttgagtttgagtgaatgaagcatgatttaatgttgtggttaagtggatcactgagatgatgcttgtgttgagcttaattctttagtatctactgtatgctattttgttgttgtgatgatgaattaggatctgttttggataaacttctccatacttatagaagaagaagaaaataagaacataaaatgatttgagcttctcgtataagcgaaaatcaatttatgcacttaatttgtatagaagctcttttcatttaacttctccaaaaaaggttaggtgcacaagctgattttagcttgggtaaaagctcaatgcattatacctttttgttttcttttcttataagtgcttatagataagttaatccaatcagagccttattttgctttggtcaaatctgattttttagagcaatttctaggggggtttcagattttgatgaatttactttttttctcttgtcttaacagtatgtttttcttactccgtggatcatggcttttcctgtatttgagatgggtgtgtttgttattttggcctgtaggaaggggaaaccattaggatta

SEQ ID NO: 25073 - DNA, 740 bp, Glycine max
  Intron number 1 from transcript Glyma15g40160.1 (locus Gly ma15g40160) derived from phytozome v7.0 (chr-ID Gm15; pos 47120889 to 47121628)
ttgctctctccagcggccaaatcttcttcaacaaggttaccgtcgatcacttcaaattcacattctcttctccgtttgtttgtttccccgtgaattgcgcgaaaacgctttgccacatagatatcgctaaaatggattcgtgctgatttcgaggctaggattggatgttctgtttgtttgtttctattttgattttaattttagttttatttgttttcttatgttctatgaattgttttgcatgaatttgcggtgtgtgttgttcattggaattggatatgctgatgagtgatttgtcagttgtggttgtgagtggtagttgagcattttgttcaattgtaaaggaagcgttttaatttgaccgtttctggagtagggttcagtgcaagagaattgaaggaattaagcagatttttattcatttttttcccggaaatttacgtgtcgtgtcttattcgtgaaatgatggtggtaaactggtaatggcagagtgccttgtgtcagagactcagagcttgttgcttgaattttggttttggtcttttgtggtttggctgtctttttggattgatttttggaagtattattgcattctgggttttattctagatttatgcttaaatcgtgattggtttaatctgaggaatgaatcgaggagaaaatgtgtctgatgcatattttgtcttttcaatttgttatctgcagtgggttttgtcctctaaggaaattaacttccctta

SEQ ID NO: 25074 - DNA, 794 bp, Glycine max
  Intron number 3 from transcript Glyma13g34740.1 (locus Gly ma13g34740) derived from phytozome v7.0 (chr-ID Gm13; pos 36279566 to 36280359 reverse strand)
gtgcagtgtgaggggtgcaaggattggtaaaaccagtatattctgcttttttttgtttactgttattacatttgtgagtggtttttggttgtctggttctctaattttagcattagatgcgttgtttgcttggatgaaggaattttgtgctcctgcagagccagctaaaaggctgctgaccctaaacaaaaggaagaatgataaagatagcaaaaagacttcaaggagccttaggaaaatgttttcccaagtccaacagttataatgcactcatgactttcgttgttattcaaactctgtcttggtctatgcacatgttttgcatgtcgctctttacaaggctttcagcttgttccgtcaaaggaaaaacaattgagaacaatgcaggaaatggagaacatataaaacatttttcgtttacaaaggagctacatgtaataaaagaaatagcaggatggattttatggagtttaaacttttgatgtgtctacatcaacagtattttgtcagcctataatatcttgattctggatttctttgtttctatttatcaatatgtgtcagccaatccaaattgaatgatgcaggggctgatttcttgtgctctgataagctttgacctaatttggctacaagaattcatccattgtaaaagattgttaaatttaaggagtatctgagaagtagtgctacttttttttttttttttctgtttgtgaccctatagattttatgaaagaaacactgttcaattttggtaggttttttgtaggtaccatcctgcttgcgtgggc

SEQ ID NO: 25075 - DNA, 368 bp, Glycine max
  Intron number 1 from transcript Glyma13g22700.1 (locus Gly ma13g22700) derived from phytozome v7.0 (chr-ID Gm13; pos 26196156 to 26196523 reverse strand)
tcgactacgagtgtgcccagcttctgcgaaatcaggttcggcacttgtctgtctcttctcgctgcaatccaatttcaatttccaatccgattatttgtttttctgttttgggttccttgatctgctgcatcctcctcttccccggtcgattgtgttctagctaagcccttgtttgttcatgcttctaatatatgcattttctgattgacaaatcaaatcaagatagattagatacaattaattatatttccgtgtgccatgctcgtttgtttcatgcttgtgtgttttcaatacttgccaccttcacaattatataggatttccttttcttcaataatttttttttctgcttgtgtcagttttctaca

SEQ ID NO: 25076 - DNA, 588 bp, Glycine max
  Intron number 1 from transcript Glyma13g33480.1 (locus Gly ma13g33480) derived from phytozome v7.0 (chr-ID Gm13; pos 35314215 to 35314802 reverse strand)
gatttttgctatttctcgtaggttccacaatttctaaccttttaaccaattttcgctttcccccttttgggttttgattttcattccccaaaattaaggaatccattgcaagcatcttgattttgtgatgttaatgtaaacttgaaaattttagaggtctctcttctaagattgcagaggaaagcatggaggggggaaacaattaaaagttttttgtttaaatttttctgtttattggggattctttattctagagtggagataaatcctcttgttcatttcattatgttgattcgttcatcctcgttgaaaccgaatgatatagtttcttctaattctttgaatttgaactatacaaccctgttctgtcggctcttgttttcctttcttggtggcttcagatttgctcaatagtttacaatgactttagtgtgcttgaatttcctcatggatttgtagttagatcttgattgttcgagttggacttttcttttgcttgggaacatagactttctcagccttacctggatgattggatacgcattcagtttttttttaacctgttgtcgtgattttggtttcagagcc

SEQ ID NO: 25077 - DNA, 521 bp, Glycine max
  Intron number 2 from transcript Glyma15g22170.1 (locus Gly ma15g22170) derived from phytozome v7.0 (chr-ID Gm15; pos 20851900 to 20852420 reverse strand)
ctcagcctagtcaatttgctcggtcccttacaaaggtaaataattacatgtaaatgcttagatggtgttctgtctttcaacttctttttcttttatcttgaatttcaaaatttaagatttttatatgcatcttcctatcttgtagtttaaagcttaaatatgaatatgccaaagagcacaagaaaccttttgtagacaatatggtggctcactagtcactccgctaggtttatcataaataaggaagtgattgttgcacaatcaaatttgagatgaactccttacagatgttcaataaactatttgtcaaactgatttaataacttaactacttataggtgaccacaaatttatgaccagtcattatatatatgttgataatggtttagggttgtttgaaattatcatttttgagttccactctcatgccccacctctaagcaatctcataattggaacttatttatttttggaatttgttattaggaagttggatacctccaacgtgttctatctcgaac

SEQ ID NO: 25078 - DNA, 893 bp, Glycine max
  Intron number 6 from transcript Glyma16g00340.3 (locus Gly ma16g00340) derived from phytozome v7.0 (chr-ID Gm16; pos 98067 to 98959)
ttgataacaaggttgtagactcattaactgccaaggtaaattactaaagggaacttgaacaattcctttcactttcattctacgaccaaataaattagaattcaagaattgcctataacttggaattcagtttctcttcaatatattagaatttagtaaataattaaagatcttttgaattcagtattgctaattttaatgttagttgttcaatgttgtgatgttatttgtaatatataattgttttgttaaagaagcctgtgcctgaacagtaaatgaaatatcagttaatatgcatgttaaagggaaaataaagagttggataatcacactttgttcgtctaacatatactgtattgccatgaatcacaggcatttgcggatgagcttggtatccctttccttgagacaagtgctaaagactccatcaatgtggagcaggctttcttgactatgacagctgagattaagaagaagtatctaattctagtttcccctgttctcatttagaatcattatttaatcacaactattaatcagtgtcacaaaatttctttttccatatcgagtttttcagcatgtttaaaattgaaacccaccatctgtggaataatgggttttgatgaaaagaaaaaagaaacagaatgtacatcttcagctaaattttcataatcaagattttgataatttacagataatgtgccaatttttattctttaacaagtttagatttattttgtggagtgttagttttataatcatgtaattccattacttgattcatgcaataatatgagttccaacataagacaagtaagtcactttgagatgttttgaacttgggtgcaggatgggaagccaaacaactgctggtaagtcggcagaaactgttc

SEQ ID NO: 25079 - DNA, 925 bp, Glycine max
  Intron number 1 from transcript Glyma16g01030.1 (locus Gly ma16g01030) derived from phytozome v7.0 (chr-ID Gm16; pos 679107 to 680031 reverse strand)
gcgataaaggtgtcattcttcaaagaactcaaacggtaacatgtctattttttttgttaattgttgaatttaaccattatatgtctaatttttttgttaactttagagaataaattcacggttgttagcaaaaaaacaaggagagaataaattcatggttgaaattgtgatacaatatatgcatacgtattatgaagcacctaatatataacaaaatatctaaattgatggtatattcatctttttaaaccaactttctatatttttttcaagtgtattaattgtgtaaaggttacggctttaagtgtttaaacaaaaaataataattttaaattaaacacctaattagaagtgtccgacgacaagtgttcgggtgtgttggtatcggaaacgtgtccgacacaacaatactttgagcaagaggtgtttgtgcttcataatagttataataaaaaaaaaacttcaaatttgttaaaatttaaccatgataatagtaagtagttatgagtgcacttcatcttctaaagtacatttgcctcactttagtggagcaaaccatcaaaatatacccctttcattttatggacaggcgtatattttgatgttttggccataaggtgttattacttattgattattgagtattgatatgcctgctcttgttcttgagtaattatgatggtcttgaagaaaatgggcaggtgactagcattgtagaaatttaagtaattaatttttttccagtgatattttagctacccatttggctttagaatttattgcttttatgtctaagaggagtaatatctttttgattgttgtagaaaacttttagatccagcttaaatatcatgcaacttagttgtgaattagaagactaaattatttatttattgtgtatcgactgttataaagtgtatataca

SEQ ID NO: 25080 - DNA, 576 bp, Glycine max
  Intron number 2 from transcript Glyma13g22230.1 (locus Gly ma13g22230) derived from phytozome v7.0 (chr-ID Gm13; pos 25822726 to 25823301 reverse strand)
ggcccgtgcattggttcgcactacattggcaagatgtaagttttattattctggtgttgttgtccttcttagtttttcttcttccttttgcattctatcatttgtataacattattctaatatgcaccaatctccaagtatatatttatgttattgagatctacgtatgttatgtatttcagtcaccatttagaagttaatggaccaaaagattgtggtttcgtataatggttgataccaccatagtaactaatattctagtggcaattttgtggatcactcattttgtctttgtttcatgtttcatctagaatcaacatgatagtttactcctacagcttaattacaattttaacatgatttgattagttttcacttattaagcatatcacatacatgtttcatgaatatgatttatatggaactatctgccatgattacatctgtaatttgtatgttgtttcaattatgcttcatttggttttgatctttctacatcatgacagagatcatatatctaaacaatattgtttactgctagatcagacgaattttcaaattgatccaaaatcctta

SEQ ID NO: 25081 - DNA, 1011 bp, Glycine max
  Intron number 2 from transcript Glyma13g30330.1 (locus Gly ma13g30330) derived from phytozome v7.0 (chr-ID Gm13; pos 33008644 to 33009654)
gatttttcaggccaagcggcagaggatcacctcaggttcgtggttaccttctcatgctctttttacctgtgttttgtttgctcaaatattcttggtttatttaccttttgataaatgtagttttgcaataacttttcctttaaaacatttcatcttagctctcatataaacttatggatgtaattatatatagtgatataatgagtataaaatatgtaaactaaaacatcatatttcttttatatatagttataaatgaatgcaatgcatcttgtttagtttactttcaatttaaatgacattatgtgtctcttgagagtaacataaaaagaataaaaattacaaaataaaatactttaagctgtagagactaaaaattgatacaacactgaaaaatcaaaacaatattttcttttatctcattggagaaataattatatttggacaaccgaataactttttcaatatttatttcttcttactataccatgattatcttatctcccttctatctttctctcaaagtatatgttcatgcatcactatctaccttttagatagagtgaaattggtgaatctttatttagtttcctttatttacatattaaatgtgtatatatagatgggggctcttgtaattagaattataaatcttaaacaaatgaattatatttcaataattaatattaaaaagatatatattctttaaataattatttaattattaaatattttttaatattaatcattcatatataaataattaactttttatggggtttctctttctcctataaataaataacttaaatttatattttttatataaaagagagttctcacactccttcaaagactatgaattggaatttttttcccttccccttgaaatgacttttgaaccgttaattaatcttgagctattttttttattgcacggtccaaaatatcttcaaagaactgtttgtttgtgcagctcagcatcaaggtcaataaaatcatctacgaaaa

SEQ ID NO: 25082 - DNA, 615 bp, Glycine max
  Intron number 2 from transcript Glyma17g02970.2 (locus Gly ma17g02970) derived from phytozome v7.0 (chr-ID Gm17; pos 1976773 to 1977387 reverse strand)
gcgcaaacctctccttacagggtacactgtctactgactcaacgcttgcttttccttcagtttgctatgaaatcgaatttctccttttaatcacgcattggatgtgtagggcggccttcttatccttttagctcgagatacacgatgtgctcgatgaattgtctaagtgaaaattgaaatggttctttgcttttaccaaagtcatgtgtttgcaattttctctcattcttttaaaatcaccgtaaaagtttggaatatggttgcttgcttgcgttgctgtgctcccaagaatgttgttgaataacttatttttttagttttttcaaattattgtgttggaataaatatttaagtgtgaattaggcaatggattctttgttccttgactgttgagagtgttcgtagttaaagacaagtaccaagtaaacttctgtttgattgtaaaaactaaagacctactaattctttatatctgatggtttgatggattactctctctcttctataataatctgtagtgtactacaatggtattctcctcctacatactttctgttgacatgctttttaactttctcaggtgctgttacgaacagcttgttcttcctccaggag

SEQ ID NO: 25083 - DNA, 733 bp, Glycine max
  Intron number 1 from transcript Glyma15g14320.1 (locus Gly ma15g14320) derived from phytozome v7.0 (chr-ID Gm15; pos 10768940 to 10769672)
cccaatcaattcattttcctccaattccaattaaggtttcttcctctttttcgttctctctctctcttttctcactatttcctcgccgatatctcacaaattccgctcttagggtttcgtagaacaaaccaaaattcaattgttttaggtccgattttggtatcggtattttctattttattttggatgaacaattttgattaggttttctgttgatgttgaattccatagttttgttatttgattggacagtggtttgcatgtttctgtagcttctgttcccttagttcaagttaagaatggatttgtgggttttctttgcacgctcccgatcagcttcctccgttgaatctctagtttttgtgctatgtgtgaccttataaacacatccttgaactatctggtgtctggaatcaatggattaacaatggaagtagtgaattgaacaatttttaataacatgagtggcgtgatttgtacagttattggattgtatgctgtcattaaaaatcaactcaagcccaaagttgaaattttcttagatattttgattatgaatcttgagtcaagaatttgtaaaattcaatatttaaagggatataatttaaagtaattggaagagcttctaatgtgttatgactgcaaaatttgtgattgtgtatttagagctaaactcaatgcttatttaatttactattgctcgccagctgagagtgtttttgatctacacgcg

SEQ ID NO: 25084 - DNA, 333 bp, Glycine max
  Intron number 1 from transcript Glyma13g28700.1 (locus Gly ma13g28700) derived from phytozome v7.0 (chr-ID Gm13; pos 31688471 to 31688803 reverse strand)
ggatacgggtacctcatcttatattattgttcttccatgcccttattcttttcattttgaatttttttgtttttcattcattgtgttttgatttcggataaaagttcgatacagttccttaagtgttgtttgtattgttctccaattagagttgttaattcgtgtaatcctttaatgcaagcctttgttatctgaattatggaggtgaaattccaattctgattgaaaaataacacaaacaatacctaaggaactgtatttaagttttgtgcattggtttcttgttttgatgatgtggatggccttttgtaggtgcaagcattatagaagaag

SEQ ID NO: 25085 - DNA, 1029 bp, Glycine max
  Intron number 1 from transcript Glyma15g42980.1 (locus Gly ma15g42980) derived from phytozome v7.0 (chr-ID Gm15; pos 50396140 to 50397168 reverse strand)
tgagggatccgtcatctcctggaattatttacgtatgtgaatttcgacatcaaaattttaacaacaaatagcaatattcctttctcgtttgcatttatacaaaatatgtttctcaacttctaaaagaactatagcagccatgatatatatacttcatcttagcctagtcttcccctcccaaagtatattgaaataattgttatacaaagtacatattttagtatcataatttatggctttctgcgttagataattaggaattttgggaagcctcggtacatgtttgagtacatcttttgagaacaataattgttttttaagatttctaaaaaaaatagaatttgattaaaacatagtaaaataaggatttaattaattttcatacgttattaatgtacagattttaacacaaatcaattagaaataactttaaatatgacttgtgacgaaataattgttacaaaagttaataatactacttacacgacagtttataaataaattttatattaggaagaaaattcatgataagatgatagagcgaaaattccttacattgctattatattctaaataaataattgtaattaaaaataacatctaatttcatttccaattaattgatagtgtaaaaatcttcacattgatcatttataaaaaaaaatcatttatcaaaattaaactcaaaagatgaccaacaaaaggattcattatatttttaaaatatgtataaccacacttaattaattggatgtaatgtgaatttttttaaactgttcatttgaaaatagaaaccgctgagcaaagttgactctatatattaatttccaaccttatcaactttttttatgtcttcgaatatacaaaaaatggcttcactatcaattatgtctgcagttgctgcccaaatggttcgtttcatattggccttaaaattttgtttcattactatctactctgatataatataaatatctatttgggttttgattttgggcaacagagggcaaagtttgtgtggctaaggag

SEQ ID NO: 25086 - DNA, 351 bp, Glycine max
  Intron number 1 from transcript Glyma15g20230.1 (locus Gly ma15g20230) derived from phytozome v7.0 (chr-ID Gm15; pos 18050294 to 18050644 reverse strand)
gccgtgtcattgtggattttataggtatgccttaatatatatatatatatatatatatatatatatatatatatatatatatatatatatatatatatatatcatattttcatactttcaattttaaacttcaaatgtagatctctattattttcaatgttaataactcattgatcattgattcaaaaagagatcataagacacgttttggctacttaaaaaaattgttttcttgttggaattcttctttgtttttgaagacaatactatactttgtccttggtgtgtgctaaattaacttttttttcattacatgctgatacaactgaatattttttgatacagctgaat

SEQ ID NO: 25087 - DNA, 838 bp, Glycine max
  Intron number 4 from transcript Glyma14g14000.1 (locus Gly ma14g14000) derived from phytozome v7.0 (chr-ID Gm14; pos 13745073 to 13745910 reverse strand)
cccagaggtctgttttcgattttggttattagaaaagaaatactagttctcgtaaactttggtgcacttgagttgtttatttgcatttttggttatgaagaaagtgtgagaattggtttggtgagggagtgggtgggcaggataaggtagagacaatgtggcattgttgggaattgatcctggcctgaagggacttggtgccacttgatataaggcttgatgcaattttggtttgtctttatcaggattaaattcatttgtgatgcagactttgagtattttcttggtttgtttttgtagaagatagttgtcttgaaaattacttaatgaagcatgtttgtttttatttgaatttcacagtgattttgtgcctcagttcgagtttgggattgatttggacatttcttgcttttactgtaattgttctaagtttcttgaagattggattcgatctatacactgatggtttatttccattttcatgattttaaaaatgttagttttctatgattgtatccctaggattaattttagcattttctgtagcaatatgttaaaactatagcacaccacatactttgtgtgttgaaagccttaatagttttctgttcatacttcatattttaggttatatctgttcatgtgttgtacatgtagctcatgaccatttttatcatcattttggtttggtaagttacataacaaaatttgatatattgcataaactttatgaatgatgagaatgtaaacacttgactattttgtagatggttatctttttggtttaattgtatattgcctagtcactgacatcttatcttctcttttctggcaggtg

SEQ ID NO: 25088 - DNA, 721 bp, Glycine max
  Intron number 3 from transcript Glyma13g23630.1 (locus Gly ma13g23630) derived from phytozome v7.0 (chr-ID Gm13; pos 26992025 to 26992745 reverse strand)
gaagtaagtgaaaatgtagattttaatttcttcttattacgatcttttgtagctttcttattctttatttaaagacggtttaaattaatgagagccttcttgtgatatcatatagcaattgctcgttttgtacaaaaattcgaacagcaaaaccatagacttcgttaaaatttagatcgttcaatgtttctggttttgttgagaagttttatacgttttcctaaaaaattgttatgccaatagttaagccaacgtcttcaaactttaaagtctagtaccttttaaagcttatcaactcaactgcttcctatttgagttgaattcaccaaatactgatatcacattaaaaaactagtcatatagtcatgctgcttccggtgggaatgtggtatactttttagttcactcttagtgagagaagccaaggttagcctggtggaatgttcacgcttattatgtatttgtttcagttaattgttgatgatggttctctaccgtgcatttacattcagaagaataccgataatttttttttatgaagagtcaggattttttccatgcatatttgtggcctactgattttgcttcatgagtacaacagaagctgcaaatttcttgaagagatagctgatatgttcagttttttcttcctttccattagaaacatcagtgttcaactcactggattgttatcttttgctcaacttccaggtgcaaaatc

SEQ ID NO: 25089 - DNA, 390 bp, Glycine max
  Intron number 2 from transcript Glyma13g23630.1 (locus Gly ma13g23630) derived from phytozome v7.0 (chr-ID Gm13; pos 26992778 to 26993167 reverse strand)
ctaaagttccaagctttcagtccttgaaggttaaggtgaaaattgagattgattttagtatcccatttacaaataaggtgctttgtgttcagtttttttctttttatgtaaaaaatgctaccatgagtacatcggtttggtgtataaatcaagtggtttatttacggtttgagatatgtggttcataggctgaaaagttttgtccagtcacatttggaaaaagtgcgggctaagaaatagaaaatggcacatgtaacttgcacatgcgtaaaatgtaactggtttctattattgtgtttgacaatgcataattgcatatattttgaatccctctctgattttgattttaatacaggctacagaagataaaactacacaaagcaaaacaat

SEQ ID NO: 25090 - DNA, 895 bp, Glycine max
  Intron number 1 from transcript Glyma15g27510.1 (locus Gly ma15g27510) derived from phytozome v7.0 (chr-ID Gm15; pos 29738425 to 29739319 reverse strand)
tttcttcttctttgtttcttgtttgcttcaattttgtaagttttactcttcaccccgttgttttttgagttacggtgtggcattttgaatcctggcgatgcccatttcctgtttttgtaattttttttcgtgaaaagaattgagctttgggaaaatgagtgttttttatgatctgggtattgttcctttttgttggatctttggtgattgtgaaaatggtgtttttctctgttctcgattgcggtgcttgatttccacgtgagcatttcaactgctggctgggtgaaaaatagatctgtgttgtgtttgcaattctgggttcttaagtatgttaggatatgctcaatgtgtttggtaatgttgaagaaaaataattgttgcatgttgtagtgtttgtgaggaagtttagtttttctgtggcttgaattttgtgcattccatgttctgttgtgttttgtcttctctgtagatgttgaggattggaacttcttttttgcattttatttatgaaaaatatagcctttttttgtatcgttttttgtttgtatttacatattgacttactaaaataaaaataaaaataaaaacattttgttttgctttacccttttttttctcttggactcataatgagctttggagctataattccgttatggttattttctcttttgaactgatagtatgaaggtttgaaagttgaaagtacagaatcctgctaactccgccattgctttaatctcctcaaaagttctttaaaatttctgttatggttttagtatgcctttattttactatgagcttttgtaaaaaatgatattttaattattttctgtttttagttctaattgattttttttatttgtatttgattttattgtagaagttgcctgat

SEQ ID NO: 25091 - DNA, 1006 bp, Glycine max
  Intron number 2 from transcript Glyma14g33850.1 (locus Gly ma14g33850) derived from phytozome v7.0 (chr-ID Gm14; pos 42188073 to 42189078)
caacttcccaatagcagcaagtcgagcatccttctgtaaaagctctacgaccaggacatcacttgcctgacaatcaagtataaacccactattatcatttatcaatgtgaacactcgaatttcaattcttttagttttacatagctatagagttaaaatgtcaaaaacatattgaataattatttattaccaatagcagcttgacaaaatatagggaaaataatggaccaagtgagactagaatcaacaattgaggccatagagatcacataagctctaagtgaatcactccccagttcaacattaattcggaatatatccaagacttctttaacatcagaaggaacctaaaagaagaaatcaagataccaattagaaatagctaggaacatggaactgaaaaagaattaaatgattacaagtcgttcaattcttggttactttagataaaataagaatgtaaaagtatagttaactttgatctggtgggcacaacatcatgaatgagaattgagaagggaatgaaagaaacaagcaacaacaaaatttcttttttttttcttaaaaaaagcaaaagaagaattatctttggaatgtatttgtgctcaagctaaaacaattaactcttgtatcatggttgcattttcaaaaataaccttagattctagctttggattataaatgggacataaaaattagatatttgtgccataattagaatataaaaaatataaatttatttaaggactaaattaaaagggcttggaatgagcatatagcatctcaaggaattttatttttctaattttgagtatagattttgatcatccaaagatccgagtgtcatcgatttggttctttgacagtaaacacatcataatggtcttccaatgttattttttttttcattgaatagggttgacatcaaaatttgacattggtgaactattttagtgtatttgccattgaaggacaaaatttaagacacttgtatcagtgaccaata

SEQ ID NO: 25092 - DNA, 369 bp, Glycine max
  Intron number 2 from transcript Glyma13g38740.1 (locus Gly ma13g38740) derived from phytozome v7.0 (chr-ID Gm13; pos 39467821 to 39468189 reverse strand)
gtctttgcagtgtaaattcactgacttgtccccttgtgggcccaatattctactatctcggctcataagaacaacatagaatatagacacatttcaatagtgctagcttactaactctgctaagtaacatttataccttttgtcactgcttacgacatcttgagttttgatatactatatttagtttctggctatgattattggaagataaaatgtaattctggtgatagcactatttaggtgtgaaaagtttgaatgggagaaaaatgattgatttcatgatgctttttacctcattgtggccatatacgtttgcaccatcacatgattatatttactgcactttctttgtaaagacaggtcagaact

SEQ ID NO: 25093 - DNA, 934 bp, Glycine max
  Intron number 1 from transcript Glyma15g10770.2 (locus Gly ma15g10770) derived from phytozome v7.0 (chr-ID Gm15; pos 7833717 to 7834650 reverse strand)
ttgagttcctatcaagccaaactgttgttgatgtatggtatacaatttgttgatgatgtctttataggttgaattttacttactgtattgcttgtaagacctgttatctgctccttttaatttttttatgaaatttagaaattctctgttttctgttgatgacttgcatcttgcaagttgcaattaccaacttagttgaaaatatggatgtgcgttatgttctttttcatgtagttatgttttttgcttgacaataccgttgaagatttttctgttctggtatttgcttttcaccttttatgctttcctatctgtgatatttgttgtgtggttcttaactggttgccgtattctgttttacatctcaaattgaagtttgctattattatctaactactggttaactacatgtagttatcttatttctcaatattattctttatgtcttgcttcagttgttggattttatgacaacaaatttgttttattggtatttaatacctaattatccttatgagagaaggacatattagttaactggcgtaatcttataacctcagtgtcataattatgtaagcttgatctgtaaattgttcacaagattaagtactaattgttagtcattctttgatgtcctaaatgtttacacaatctgtgtaggttgttctgtgagggatacttcaattttccacagcttgctgctgatcatctttgatttgttgcattactgcattagtgtacacaaatattcgatgtttactgccctgtttaatatgcattcacaaattattgttaactatttgtgtaaaagttaccttccactagttaacatttctaagatgagtagatgcagaactatgattcaatgtcttatctttgatgaattctgttattccttttgtggtgtaggcagcaagttattcagatccccgcg

SEQ ID NO: 25094 - DNA, 859 bp, Glycine max
  Intron number 4 from transcript Glyma13g23240.1 (locus Gly ma13g23240) derived from phytozome v7.0 (chr-ID Gm13; pos 26684410 to 26685268)
ggcttaagcacattagtggtagagctactattcttatgattaatttgttttctcaccagaatgcctctattattttacgaacataggaagatcatactaaggattcaaattagtttgggtggggcttgaggttaatgttttaataccaatcttgcattctatctgtataaaaactatgaatcttgtattgttgttttttatctctctctttttcttaaacaactaattctattgtgttttcacaaagattttggacttttggtgtttcttacaaaagaaaattggagaaattcattcgtgtttgaatagaattcaccttaattatgaaatgattctaattgattttttcatgacatattcaaaagtaattcagagttataccggttatacttttcagcctcatttaaaatcctcccttgtgctggcctacaaaagtttatctgattgcattgctgaatattaagttaaatgtcttgttctagtgaaactttgtagaagtctgattttagatatgtaaattttttgtttgtactttcttttttgtgtcattggctcattgcttgtggcagtgtggggcattccgtgcagaattattcaccgggatcaattaatgttatttttccatatgattgttgtgaaatgaatataaataacgaaattcaattttgaaatggaaattgaacattatgtaaaattggaattacgcgcaaccaatacaataataatattatttgctctgagatatcaaatggattaggtttgacttgctaaaggttaaagagtcctgtttgattaacataagcaatcaatgccaatttgtgtaggtctttcaaacttgacttccttgagtatcaggaag

SEQ ID NO: 25095 - DNA, 316 bp, Glycine max
  Intron number 2 from transcript Glyma16g06110.2 (locus Gly ma16g06110) derived from phytozome v7.0 (chr-ID Gm16; pos 5533378 to 5533693 reverse strand)
gggaacccacgcttcaagagctcatcaacatcaaggtttcatcttttcttctttttcttcttttttttcagttttgagttacttctttgttggagtggttatgggtcttgaaaggtaaagttttttacgttccttttttgttttaatcggcaaatgttaattgtagtttatttagtttttttcttagcagaaacgatcgatcgaacccgtgacctttttcttcttccattttttattaaccatgcaaccaaccttatatctctgtgttgttgatgttgttgttcagttgatcgagaccggagagaaggagcgtctc

SEQ ID NO: 25096 - DNA, 823 bp, Glycine max
  Intron number 1 from transcript Glyma13g24410.1 (locus Gly ma13g24410) derived from phytozome v7.0 (chr-ID Gm13; pos 27827240 to 27828062 reverse strand)
cggcaccatcatcttcaccgcgcgcaacgaacaaggtaaccccatcataacccttttcgttttttttttgtttttactttcttaaaaatcaaaactttttcactcgggcaccttttattttaattattttctcaaaattgatctgcggtgttcttgttcttgtgggattgtgtttcgaatagtgggtatttttcgggatggggattggaattttgattctgaagtggctgactctgtgggattagaatgcgtatgtttcatggatgaatttttgcatgctttctcaagttgctcgtgtcattcgagggagtaactgtgctttgctttgaatgggttttttttttttactttttcgatggaaaaattttgctttgaatgtttctagattggattggggcttattagttctttttttaaaatccaaatcagttactatcctttggtgttaccatgatcttactcttcatttagctttattcagttatttcagtgacatgtgtttgtgaaattgcatatcataactttgtaatcagagagtgatgtttgtttctaaatttgttttcttgaagaatttgacatgccaataaactagttattggctgttttaagatgagtatcgttgatcttagtctgcatcatgtgtcaattatgctataagtttcaggtgattttagtataagttacctctcacaagattttattgattggtaacacttgatatatggtatgtgttgggtgtgttagataagaccctagcttatgttctattatgtaagataaagatgtaacttttttccctacctcattacttgcagttgacata

SEQ ID NO: 25097 - DNA, 880 bp, Glycine max
  Intron number 2 from transcript Glyma13g43420.1 (locus Gly ma13g43420) derived from phytozome v7.0 (chr-ID Gm13; pos 43119160 to 43120039)
ctagcaggccttacaaggcacaaattgctgttaaggtaaacccaatttctcagtttttaatttatgccactcctcactcttctctgtcttttttactactctagaaccataaataaatagttgttgttactgatacgtgataactgtagtgaggagtggaaaaaattgtgactattcttggttaggttaaactaatcatttagtcctcatagctaacactttttttaagaatcaatctctttatgggaaaaatctaagttttaattccttcgcgcccttattaataatcagtagttcttgtagttagcatgcttcttaagttttagtcccctttcagtcttataatgaccaaaatttcattttttttttcactcaggcaccaattcctaaatgagtgtcacctgtagataatttgttctctgaacctgtcaatgattagtttaagcaattcctagagaccaaatgattagtttaacctagtaaataatttgttctctgaacctgtcaatggggtatatatggttaccataaaccccttagaaacttgggcagcattatattatgatagtgtttcaatgtgcataatttactcattcaatttctagattttgattggatactctactttcaagctgacattactaatagtagtatggcactgcatctgcatgtaaaacaaaagacttggagcaatgaatttatttaagtattgctgcaatttagggtatttcagaaaacaaaatgatgggataagggttcctataaaatacagcttataaatgttttctaattacttgctagttacacaggctaatttagcaaattacatgatactgcttgacgtttggattcttgcagagtttgacggtgcataatttct

SEQ ID NO: 25098 - DNA, 345 bp, Glycine max
  Intron number 5 from transcript Glyma16g03190.1 (locus Gly ma16g03190) derived from phytozome v7.0 (chr-ID Gm16; pos 2748802 to 2749146 reverse strand)
gaggggtttatactcaccctgcagttgctattgtaagtctactcttgtgtgtgtgtgtatgcatttgtaataatttatgtttattttttttttgtccatgaattagttgattacaagtgtactttaatttacacatctggactttaaaatgttaggaatgtattaagatatgatttctttttttccttggtattttgagagttattcatgtgggtgcatttcagctgttattaacctcttgattttttcattctttgatcttcttaatgtaaaaaacctttgtggttggaaattttttttatgtactcattaattatattggtaaaatataggggccacactcac

SEQ ID NO: 25099 - DNA, 913 bp, Glycine max
  Intron number 1 from transcript Glyma16g34120.1 (locus Gly ma16g34120) derived from phytozome v7.0 (chr-ID Gm16; pos 36792003 to 36792915)
ttccgatcaacgcttttgccttcgtcgctcgccaggtacttcgccgtttttttcaatccattccgaaaatataccattctcgatatagcttttctcggaattttttttactgggtatttccccccggaaaatcatcgatacggatcggatgttttcgacaccaaagtagggaattcggacaagtagcagtttttgacgcttctttgtttttaaaccctaaaaaaattgttcttttttcgcctttttttacttgggtgtaattcttgcgtgtttttatttaattgaacttcaatgctagaattcccttttttgttaatgggttgaactcttgattttttttccaaacgggtgtgcgtatcccttgaaagtgcgggtttttatttgttgggtgttttgtatgaggattctgagttgaaagggagagtgcgagtacatgatttctgtgtctttgacactgtagaatcttgtaatttgacaattttggttccaagattaattggtgtattttggagtctcagaatctggttttggaatctttgaaaagtttgtggctgttgctatgattagttttgattaatttgtgtatatctgaggtttttgcttgtgaagaatgtcatgttggcagtgatataaggaagatatatcacaaaatgttgattttgatagactaatagaattagatttaaagtatataactgtaagactagttatttctttttattttgacgtgtattttcagatttacttatttagtctgtgtcactcccctatccccactacgggggtttttggggaggttgagttggtggttctctttttgctctcttggttttcattgattaaattcagatatctgatgatctttattcttcatgcagtttgttagcgggagctcagttattctgttttattg

SEQ ID NO: 25100 - DNA, 853 bp, Glycine max
  Intron number 1 from transcript Glyma16g05140.2 (locus Gly ma16g05140) derived from phytozome v7.0 (chr-ID Gm16; pos 4431331 to 4432183)
gtttctcccaccattgcctgaaccgattctctgaagtaggtttttcttcttcaaatctgttatcttttttctttcagatgttggttttgttttcttcaaatctgggtttttgtatatatgggttttgaagatctgctcttcaaaggtgttgtgcctcaacaaaggcagcagaaaccgtaagaaaattcatagatctgagattttgtgacagagaggtgatggacattcatagattcaagtttttttctttacagatttgggttttattggccagaatttctttattgttgcagtgaaattttctttttctgctggtttaagttgattatggatgttgtattttaattgaaatggagataatagaaaaatttgcaatcgggtggaatttccccttgttcatcgatcggctttatagcattgttaatttcttcattttctacaaatgttgtattcaatttgggaaccatgtgaaaggttttgtgtacaagcataaattaatgtcttttgatttcattgtgatggcttcagtggttcatacatgcgttaaatataccaaattaaaaattgtccatgaactgtttgatagaatgactgagaatgaattgaaattttcttggaaagttgtattctgaacttatttttcttacaaatcaaacttggtactttgaaatcagtgtagtttgtgttgaatgtgatagaaaagattcagaggtaatgtgtttggaagaagacaaatgaacagtataggatgaacataggagatcctcatttgcaaattttataattttcatgtaaccggctgttacctcctataacaggtcatcagtggtgcctcacctgtgcatcagacttt

SEQ ID NO: 25101 - DNA, 704 bp, Glycine max
  Intron number 1 from transcript Glyma16g01630.1 (locus Gly ma16g01630) derived from phytozome v7.0 (chr-ID Gm16; pos 1204885 to 1205588 reverse strand)
cttttcctgtcaccgctcaaaacatcaaccccaaggtttgggttgccttcaattctcttttcagacccacccagtttgttgtttttcgttttttacttctggttgtgctaaagttgcaagctttagagtttttgattgcgtttttttttttatctgggcatgtgtgatgtcgagttgatgtgtatggttttgctttggtttcttcttattttagtttgtgcatgatgtgtaacgtgtttatttggcaaaagatcgacctttgattaaattattgctttgttttggtttgcaaggattgctaattattattattgttgatcagcgactcgggtttgactctgatctttttctccgttgttttctgtcttgtggtgtgactgatgactgagtaataactcgtttttctactattatatgcccatttaagtatataattgtgttcaaccctagaattggtggtatgaatagtagaaaaagagatatgtcttattatgatcatacttccaattgaggctaatttaacatagttggatggtttattctatttaatggattcttcttattaacagtgctttatttatttatttataaagtgggattgtttgcctgaatattttcccactaatagctggttatgatgtcaccgatttttacactttatttgctgatttgaaactaatgttttttgttgtctaggttctgaa

SEQ ID NO: 25102 - DNA, 444 bp, Glycine max
  Intron number 1 from transcript Glyma13g26760.1 (locus Gly ma13g26760) derived from phytozome v7.0 (chr-ID Gm13; pos 29969817 to 29970260)
ctgccatcttcatcatatgtgagtccaagtcaaaacctctctatctcttctctccatcacccatttcccctttctttccttttttttaatccccccataagttttctatcctgatcgagacactcagacactaaatatgaatatctctaatgaaaattcaaatcttgatttacttgattttgtataaattaagggtgtgtagagatttcaattccatatcaatgatgttgcttcttcgtctcttgtgactctcaaacgacaatccaaacacacattaattccatagacgtaacccataattatttttctctctcttttttcagtcttttgcatcatcacaagtttgatcttgatttcatcatgtatatgcctgtgatgtgatgattatgttttttttggttatgggcagttgtggaatttgctgagagatttgcttatcaaggg

SEQ ID NO: 25103 - DNA, 649 bp, Glycine max
  Intron number 1 from transcript Glyma13g27740.1 (locus Gly ma13g27740) derived from phytozome v7.0 (chr-ID Gm13; pos 30873950 to 30874598 reverse strand)
cttccattgctcttgtttcctcacaggccggtcaggtacaccgtacacctctttgtgccctctgttatttattgtgagataatctaatttgtggattattattattaggtttaattactcatttgttttctatgcatgcacaatttttatgttttagttcatagataattgttttaatccctatgcttacattttttaatccattttgtctctgccgtccacaactctaggactagaacaagtttaaaatgtacgtgtagatactaaaatgagttgtgttttaggtgcatggactaaggttctgtttgagtaagtttatccataagcacttctacggaaagaaaatacgaagaaaaaaatggaatagtttttctataaactaaaattagcttaaggataagttaatttgtagaagctctctaaaagatgagtttctgtaaattagtatgttcataagttgatttgagcttttatggagaagctcattttatttttttcttcatatttttttctcccaaaagtgtttttggataaatttacccaaacaaactctacataaagattgcgtaggtgtagaaccaaatgaataattaaaccttattattattattttgatgtggaatttatgtttatgttcaggtgggaattt

SEQ ID NO: 25104 - DNA, 688 bp, Glycine max
  Intron number 1 from transcript Glyma13g01760.1 (locus Gly ma13g01760) derived from phytozome v7.0 (chr-ID Gm13; pos 1459366 to 1460053 reverse strand)
tctctttctctttcccattcttaaacattaactacgtaattacctctttctttctctagtgttttctgttcgtttggtttgcatctcatacacgacatcacgtgccaacaccacccaaccttaacttccccgatttcacttctttctttctttctcacacacccaccgcactttataatagctatttcgcatcccaaagcttttgaagattccagaacaaaagcacatatagtgtctgaaagagtttttattattagctttgcggttctgcttttcaaggttcgtcctttctgcatcaatgctcgaatttctcgccgcaatttgcgtgctgtagtttctgcttgagtctgctttagaatcacgaggtggcattagtgtgtttgtctcttccttttgacttgtgttacatcattcatgtcttctgttcattttgtcactttgtttctagttgaattgaattcccagtacatttctcaagagggtgttgtgttttgtgtgtctaagaggggtttagaatttttatgaagtgatctggttttgatattttaatttggaatttattggtggggtgttggttcttgaattttcttagctgaatgtttggtatatttaattgcttttctgattattgttcttcatctgggtatatataggtttatttggagaggaaaatattggtggagatttg

SEQ ID NO: 25105 - DNA, 884 bp, Glycine max
  Intron number 5 from transcript Glyma15g07970.2 (locus Gly ma15g07970) derived from phytozome v7.0 (chr-ID Gm15; pos 5610387 to 5611270 reverse strand)
caaagtaagtttgactttctttgaaaattttatacccttggatttccttaatgtttgttcccatcctgtatatccatgccgtgccgtaggattaaaattaagctctatcaaacttacatttccttttttgtgagtcaatgtgtccaattgataactactgttattataaaataagaagtgcaccaagacaaagagaagaaaattacaaattgtttgaaggattatggaacctctaatattaaaatgaaatgcgaacaacaaagaaaaatcaatgaagcaaagctgctgcctttatgtgtgttatgtgagtgcaaactcagaattagtttatcatcagttcttacattgctttagtgctgtttctatctgaattcattgcttgccatttttggtgaatgtagtgtgtggcctaggttttcagatcacttttatatgatgatcttaaattgttttagttgaagtaaagaaataaaattttggtagcaatgtgcaatgtatgctacactttggggtttggggcacttggttggagtatagaactcatctttatggaggttttattgcagcagctggtgtgggataagattaggcatttggcttcgtttttggtctaaaagatatggtcttttcaagggagttttttttacagatatgttgatggattgactagctgtccttcatttatttcttcttatttattctctgtttgtgttgtccttttacatacaggaggatcctctatcctccaaactctttgttataattttctctttgtcttaataaattctttcttttattaaaaaaatgtgtcttattgaatcacttatattatctctctgtctctatcaatatcatcaatttcttgctgcgccatgtatgcaggg

SEQ ID NO: 25106 - DNA, 614 bp, Glycine max
  Intron number 1 from transcript Glyma15g07970.2 (locus Gly ma15g07970) derived from phytozome v7.0 (chr-ID Gm15; pos 5612059 to 5612672 reverse strand)
ggttgtaaagatcaaagaaagcattttgtgaattcgtgagttgtgacagtaaggggttcaagaattgggggttagggtttgtgattagttgttgttgagcacgaattgctatttgattcagattctgaactttcataggttgtgaaatcgggttgacccggttacagtcacaaaattatccaattcggtgaggggtatatagtatatactatatagtagtatataacataacctctaggtagctagtgagtgtgttgtattgtacggtagcagcggtgatactgttcaagtcataaggtgcatggttttcttttcaatgttgggattgtgaaattctatgacttggtggagttttgataggttatggaagttgtaatttaatctgggggttaacaaatttaggggcttttaagctgagtaggtgtgaaaggagggttttgtgtgtgtgcgcaccaggtgtttgaggaatggctaaaagaaaatgataaaatactgcgttttcgttttttttttaaatttcttcttgcttttattttcatttgtttgttcttatttggttttatcaattgttggtatcaggtgttcgtttctgaaatttgtggcacagcaagtga

SEQ ID NO: 25107 - DNA, 983 bp, Glycine max
  Intron number 1 from transcript Glyma15g16870.1 (locus Gly ma15g16870) derived from phytozome v7.0 (chr-ID Gm15; pos 13127675 to 13128657 reverse strand)
ttctctggtaattgtttttctctcttcttttttattgcttttttggtttttcttttttctctttcattgttgtctgtctcagaaacataaaagaaaagcaaaggtttttgagtttttgggtggcgtgcaaagacacccttttaaagattcagattccgttttcatgatgttagcacaagatctcctttttttcttctctctctcagatttcgatgcaacagcacctcaactgaacccagaaaaggcacacttaaccgaacaaaacgccatctcagcgtggtgacggttgagattctcccgtttctggcgtcaccttgaatctctccgagtcaccaaacgcaaaaaaaaaaaaaaagtttttttttttataaaatattcatgtgggtccttggattgtgattcttcctttgaccctctctcggggtgtgcctttctgggcttgtggatgagttgacacctgattcaaatgagattgtgttttgcgtgaggacagagaagaaagagagatcagaaaaaaattgtgcttttgtgtgattcttatatatctagtggtgctaatgggtcaattcatgacacttgttagttcactggagatgcttgtttgacaagatgattaataataataatttaatactctgactgggacatctgagttttttggaatgggtagggtggtggtaggagggtatatatgctactgctttatgaggaccagattttgaaattaaattagttagcaaaagggaaagaggatgatgtaagtaagtatattgtttttgatggtgacaattgttttttttttcttcttctaaattgtgtgtatggcttgattaaagttagaaataaaggggggaaagaaaacgggaagaacaagttagctttgtttgttcttgttgatggatgtgattgattgcgtgaatgtgctaagtacctatttgaaatgaaatgattaggtattgagacaggagatttagaaaaaagag

SEQ ID NO: 25108 - DNA, 182 bp, Glycine max
  Intron number 3 from transcript Glyma14g06470.1 (locus Gly ma14g06470) derived from phytozome v7.0 (chr-ID Gm14; pos 4728225 to 4728406 reverse strand)
ggtacatgaagctgatgatcaagtccattttatagttacttttgactatagtgaccccggaaaagaaagtttgctttctttaatggtcttaattgtaagaaaaagcttactaatttgttttttttattttctctcacacggaatcaatgcaggactctcacaaaccctgcttcagttatcaa

SEQ ID NO: 25109 - DNA, 702 bp, Glycine max
  Intron number 2 from transcript Glyma13g37180.1 (locus Gly ma13g37180) derived from phytozome v7.0 (chr-ID Gm13; pos 38338897 to 38339598)
gtaacatcaaagaagttaaagataaactcaaagtggtacgttcaacgtaattgttttttatgctttaaatgtcactttgaacgtttcaattagaagaatggtatcagtgattttttttttgcctttaattacacagacctttttgagcattaaaataagatatattatcaataaatttaaattccctttcaacatttccttcacctttattttaaataagattaagtatattacaagaagttaaaacattattgacaatttttttgtcactattaataatttttgtgactattaagtttttttttttgtaatacgtaacaattttttagaaaataaacatataaggaaattttggttgatattttattttaataacttatactttgttagtttgaatcaatttgagctcaattgccatgtacactaacattaatcatctttacatcaataatataattttaaaaaaaacatatattttagtaggatatttttgttttgcgatgatttatatatatgatgttacatggccaagatctgaaataaaagtaataagctgacaatttgtttttttctttcgtaactggtccttttcttgcccaaaattttaaaaacaatataaactcgtgatgtatgtagtatttcttcgaaaaaatatatcattaattaatttaatttaatttccctgttaattgtagagcgtaa

SEQ ID NO: 25110 - DNA, 715 bp, Glycine max
  Intron number 1 from transcript Glyma16g03670.1 (locus Gly ma16g03670) derived from phytozome v7.0 (chr-ID Gm16; pos 3085375 to 3086089)
gtattgtttggtaagcccagaactcttttatttgctgaatttattagcatttgttgttgttgttgttgttttttttttgggcaaaggggtatccttgttttgagctgacttaaggagcaagaactagtttttgctactaatcaatcaaaccccttttgttaagaattgaccttgttttttgttaagttgatgtttggtctgtttattgagtgaatgaatattgaattggttattttggtttgatgatgatgaagatcacttttaaacttgaatttttcttatttgctttttaagatataggataattaccaatttgccatgtcttgatgcgattcgtgagctgaatgaatcatatgttactccttagattactatctttgtagtttttaaaatgtaggccaattgtctcattagataatatactgatgctatgattctgcttaagtcaaagtggaaaatcagatggggtcgttcttctggtatctctgtgtgctcatgacttatgtggtattgatgctgttaatagcatagttcttggtattttaaaactcaattacatggtgtacaatgtatgtgttgtggatggtttattaaaatttggggtctgactaggagtaggagttcgtttttgtcatccatgtgacatagattttctgctagcaaaaaggatgtgaggaacactattaattttttgtttccttcagcgctgctgtaa

SEQ ID NO: 25111 - DNA, 760 bp, Glycine max
  Intron number 1 from transcript Glyma16g01760.2 (locus Gly ma16g01760) derived from phytozome v7.0 (chr-ID Gm16; pos 1310493 to 1311252)
atcttctccgcagttcttcttcttcttcttcaacggtaactatcaagtcttcatcttttcactgttttcatttctgggtcacactgacactcaatattttgtattctctacactcaaatcagaaatgtcttatttttgttggatattgtttatgaggtggggaaattcatgaataatgaagctgcatcttaaaaaataataataataattatgggttatgtgaattgtgaaatttaaggcagtctagtagctgggatattcacatataaggttgttagcttttacgtgtagtgattctagaaaggaatgtggggagggtatatgctggatctgtaaattttttatttttgttttgttggaaattatttatggggttttgttgaagagtttaatttatatacaccatcggtctaaaaaatatttacattatcaatcaacccgaaatcttcgttaaacttatcatatacttgtgattgattgacaaatgtaaaaactctttacaatgtcaatgcatacactatttatcctttgttgaattttgaaaagtttgaatatttgatgattcctggctgctgtagctgaaaaggtgaatggaacctaagccattatgattgtttcttttacagcatatttgaaaatgttcttacattacaattgcaatttcatatactaaacataataaaatgcataactaactcagctgatgttctgatttttgctagcaggttcaaacagacagtgggaattatcagggtgatta

SEQ ID NO: 25112 - DNA, 556 bp, Glycine max
  Intron number 1 from transcript Glyma15g01250.1 (locus Gly ma15g01250) derived from phytozome v7.0 (chr-ID Gm15; pos 758446 to 759001 reverse strand)
acaccgaggtcatttctatctttcctttcatctcttttctgtagtatttggtaatccttgtttccccccccccccccacaattgcaatgatgaatttgttgttagagggccccaaatttttaagcttttgagcttatttaatgttgtggtcttgtgcgttcgttgtttttttatataatatttttcgtgatcaagaaaatgtaatcttgttgactgacaattttgaacatcataatgctgtaaacaaacaagtatttctagagattctacagcgggaaaatcagttacagttagggtcaatcaggtaggagggtaattgggatagttcttctacttaagcaaaatattaagattcgtgtcttgcaaaatgcttaggccaacaggaataaataatgcagccaccatgaaatatgtgataattttgaatgcaagggctaggtaggattaggaatctccacctgcaactgcaagcacaatacacaaccaccatatatcctgattctgtttatttatcttttcaggccttcctggaggcttggaaaatcgcttgttctct

SEQ ID NO: 25113 - DNA, 898 bp, Glycine max
  Intron number 2 from transcript Glyma15g39820.1 (locus Gly ma15g39820) derived from phytozome v7.0 (chr-ID Gm15; pos 46677287 to 46678184 reverse strand)
ccaagatcaaggttggataattgtatccatttgtaataataatattccattgctttcatatactagcatctctatatctatattctctgattgctaataaacttaattttatgttttctttctgttttccttgttcatcaaccaagcaatgcatgtcactcttagtgctgcttatatgtatcattggtgcatttgtcaaagttatatttgtatttgttttccctggttccaattttattgatcaatccgcactatatatctttagctctccctctaatgaataaaatctgtatgatgaatggaaatgtatcatatctgttaatgatgaatggaaatgtatcatttctgttaatgatgaaaactacttctgagccagtacttataagctaagttttgggttacattggttgttgagtttttatgagcctctttgagcgattctcatcacacattgagaaattctgcataacgtactgatgccttgttagataaaaattgttctttggaatctgacggaacaagtcaagttttgaagttgaaagtttttttggcaatatcagtacgtggtgatcaatgtaaggatgaaggttctgatcaccattgtgaagactgttgaaactgaaacaagtggtttctttgtctgcttctgcctttagtatacaatgttattattgatctctatgctatttatcatgttatgatatatttattgaaaattggagtattacaaacacaattttgatgtggagcatgttactatgttgtgtcccttgatgagaaaaggcagccaattctatatccatttttcagttaactggtagtttctttaaatagtttttgatgaagccttcatttccaaccagggggtctgagttgcctcaaaggcagtctccacgag

SEQ ID NO: 25114 - DNA, 303 bp, Glycine max
  Intron number 3 from transcript Glyma15g16030.1 (locus Gly ma15g16030) derived from phytozome v7.0 (chr-ID Gm15; pos 12353895 to 12354197 reverse strand)
ctccaaaagggagaagggtatgtagtatatatttcatttttttagcaacaaatgttaattacttgtattcatagtttttattagcaagagaaaatcaaatttgtttttcctgtcttcttttttttttaaccatccaacttaccttgtatgtattatattaatgaattaattatattataactatataggccagtttctaattaattcaccttacaaaatctcctttattattattattaagtggtgatagattaatttgaatctgatttcagggtagaactgccattttggctgtgattttgg

SEQ ID NO: 25115 - DNA, 594 bp, Glycine max
  Intron number 1 from transcript Glyma13g43920.1 (locus Gly ma13g43920) derived from phytozome v7.0 (chr-ID Gm13; pos 43468950 to 43469543 reverse strand)
tcatttcagtgctgttttgggggtttgccaatcaggttgtttcattgtttgaactttgagcttactttgttagttggtaatttgtttctagcttgaattttgttatagtatgtgttggtgtcgttatcagcttatcattttttaattgtggtatcatgaacatggcatcttttgatatcatcatcactcatttgtattgttttacttttcagctattcgtttttgtcatattcatttgtattctgcctctttctctatagcttagccgctgagcttttgatgagtcccttatatgttactattatttcttgtttgtttaattcatgatagttacatgcttgtttcacttgtgataatatgaatacaaatcttatctggataagattcaatcatgtgatggcagggcaaggtgttgcatgctctaattttatattttaaattccaattttgaactgctttatgtgaattctaatgaatataaggtgtaaagatgaatatgatgctaacatgatatgtggttcttctgctgctgctttgtgaaggagaatgctaatattgactctttttttatttctttccagattactaccattg

SEQ ID NO: 25116 - DNA, 317 bp, Glycine max
  Intron number 1 from transcript Glyma13g34050.1 (locus Gly ma13g34050) derived from phytozome v7.0 (chr-ID Gm13; pos 35698466 to 35698782 reverse strand)
ccctctggttgtgaccttccaaggtaatgtttattcttgttgctgtagattaattgacacaagtttatttttgtttaacctatagtcttgagtttaaatcttatgttagttcaagtaagattgtttttcaggaaaaaaaaaacatatgtggtctcgtatctttgtaatgtctaatcacatggaaatttaccatatttgtttaaactttttttttctgacttgctgcaagatggcatcttgaagttcaaatttgacttttttttttcttccctctccaaacggtattatttattgtattatattggttaacaggtttg

SEQ ID NO: 25117 - DNA, 770 bp, Glycine max
  Intron number 1 from transcript Glyma14g02180.3 (locus Gly ma14g02180) derived from phytozome v7.0 (chr-ID Gm14; pos 1314450 to 1315219 reverse strand)
cagatctgaagccacataaccctaaccatcaaacggtacgcattcttctctctagcgatccttcttcttcttcgtctgatctccgcattcccctagatctgcttcttcctcattgctctgtgaatgcaagtgagctccgtctcaacttcttgttttacgctgcgtttctctctttctttcgtctattcttttcaagcttcgttcttttcttaagcttcactgtgaacatttccctttttctctctcgataatcgcattttcttgctacttgttgctgatcattgggttattgtagcttccgtttcgtctactcatttcattctgttgtgatcgttagcttaattagcttaccctgcattggattatgatcatgtcatatgtaatcaacaaaattcgacttctctacagatgcaattaaaaaactttttactttttaacaataattaattaattattattgttattaatattaagattttttttttttggcttatctattcaaagatccttatttgaattcgttatgttagtttagctgttgggatgggtaattttgggttaccggaattcaacatttacccacgatggataacggctttgcatttaattatgctttaattgcatttgcattgtcttatagcagatgtcttctactttcttgatcttcgtagaagagaagaaatgtttctctgtgcgtttggtggaagcagaaagaattttcaagtcatttttatattttgaggtgcaggctaggtgtcgctgggacttca

SEQ ID NO: 25118 - DNA, 938 bp, Glycine max
  Intron number 1 from transcript Glyma15g40060.1 (locus Gly ma15g40060) derived from phytozome v7.0 (chr-ID Gm15; pos 46891024 to 46891961 reverse strand)
agaatttcccgaacaatcgaagggtaggattgttctgcctttgatctcacatttttcggttttagtgagggtttttgcagggttgtgtcgtcaattttgtgtatggaaatttgatacttaattaaaattttcatgtgacaatgtttttggctggtaaagacagaattttaatgaatttagtgaaagaccgtgcatgggaaaccaaatagcaattactgttaatccagaaaggaaaaaaaattcacaaaggaaattccaattgcaccacctaagagaaacggcaccgtagcggaatgtcaatattgctttgaaacaatcttaattattcagtgaagtgccaatatttttgtgtggctataaattctaaattgggatgaattgaattgagtctctggtatttgattgtagttatatacatcctatacgaatggatgttgtttttccatgttatatttgcatgttttgtgtttattatagtcatggctggcaactaaaattgtgaatgcaatactgcagtttggaagctttatgcaatgcattgtgaccacaattgtggctgcatttgcctgcaatcttctacaatttcagtaatcacaacacagctagacaaatttttgtttttctcttcaatttacattgtagtttagtatgtttttcagatttgtggcactacctacaaattttgtcgtgtctgttatccgtcctcatgttgtacaattaactccaaattgattatatgacacgtatcatgctacgatgggcctataacattttatttatgcgaagattccagtttctgttgaaatgatttgaatgatatcattgatgtggcattttatgtgcaaattaatcctgatgccaattgcgtttactgaaaattttcacttttgtcatctcttgcagagaagaaatagttttaaccaaggaaggagaaaggt

SEQ ID NO: 25119 - DNA, 679 bp, Glycine max
  Intron number 1 from transcript Glyma15g06110.1 (locus Gly ma15g06110) derived from phytozome v7.0 (chr-ID Gm15; pos 4333507 to 4334185 reverse strand)
aactcggggcttacctcattcagaaccaatttcaggtttgctttttttatttttttttattttttatgtaccctgttactattgcaagtcagaaggaaggcatggcatgatgttatgataagcatggtcttgtgcgaggatctgcaataaataatggttcagttctttctttgcttatttattactttccctgtttaaaggaattttggcctcatttgacatacataggtgcttaaagaggtagcaatgggaacatttgatatgttagcatttgattttcctagatgagtatatcaattgtattctgggaggttctgtgaagaagaaaaaatggataataattggttacttatggtctgcagagacagttttttatttaatcaattaatcatagattttataagatttacagggtatttttgaatttatgttttgtgaagcgacttgaaatctatcttggatattgccggcttggtctatttttcttggtttgttttgtttttatgagacatggtggcactattatgattgtgtgcatatattctgatgttgctgaaatttcttctgtgttctatcttttgtttgcatattgctatcatgtaataatgaagtgacttgtgcattgcctctgtgacctatgacagtctgctggtaactctagtgctcttttcctaactgc

SEQ ID NO: 25120 - DNA, 705 bp, Glycine max
  Intron number 1 from transcript Glyma13g38660.1 (locus Gly ma13g38660) derived from phytozome v7.0 (chr-ID Gm13; pos 39411800 to 39412504)
ttgctcttcccaacccatcattactattccccaaggtaacttcacaactttttccatcaattcccccttttaccctttctgggtttctgttcaaaatcttatcaatagcctctttcctcaaaataactactgctttcatcaagccatgtgcttccactttagatctgcttccatgcttctttttgtatgtctatttatttattgttgttactatcataaaactagcttcagtaattcatgaatgttgtatcacgtgacggtgtggggctatagcttcccttaattaaacactaatcttctgcttaagtaatatgatggaaaatgaaatgttgttaatcaattacctgtgtcaccgttttgcttggaaatgtgcatttgtgagatagtcagatagcattgaccatgaagtagcatattcactgcaaagtgcaaaccgacaagccggagtatccctgcttatggtttcaattaaagcaaataataacctaagcacaatagccttgaaacatttattaagcccatgcttgcatatcactaataaatttctgaattatttatctctgtactcaaagcaattctagtttcaattgaagattgttgctggtttctcttgatctagcatcaaatcaaacatatgcttactccagtttgtttatctgtatttgtgcaggacttagcaactcttcatttgaaggttggtctctg

SEQ ID NO: 25121 - DNA, 718 bp, Glycine max
  Intron number 2 from transcript Glyma13g38660.1 (locus Gly ma13g38660) derived from phytozome v7.0 (chr-ID Gm13; pos 39412459 to 39413176)
tatttgtgcaggacttagcaactcttcatttgaaggttggtctctggtttcctgaatgaactccagtgaaatatcccagttggtgtactgtacatgagtaaagcttatcataatctctctctatgactgaatttgaagcgcacttgtagttgtatgatgataagagctcaagtaacataattactctcacttaattaataagctaacttgtttctccttaggttgggttgggttgggtgactatcaggatctgaaatctcatgtgtcttttataaaagacaattcattatttggccaacttttcttgtgtttgaaaaaatctattaatgaaagattgtgcagtatataatatagaattttgttgtatgtcaatctagtactttacagtgctaaacaaaattttggtgcttaactagtgttgaaaaattttgctctatgaggcaacatataatctggtgtgttcaattgaaggtatgagcttgcttgagttagatgttacttcatggtttgagtgtgatgtatcattttcaacattaataagaaatgaatcttttactagataagtgtctgcttggagatacaataaaagcttaagggctgaatttttattttgcctgcagttgtgtcatcataaaaatactgcttctatgtctttttcatatccaactccttttaccaactgctatttcttttcttgattaattgaattgttattaga

SEQ ID NO: 25122 - DNA, 187 bp, Glycine max
  Intron number 1 from transcript Glyma13g10000.1 (locus Gly ma13g10000) derived from phytozome v7.0 (chr-ID Gm13; pos 11572889 to 11573075)
ctcccagtttgtcactaattcctccacttgtgcaggtattgttttttagttttctttatggatcaatgttagttgttaatttttttgttaatgaaagattcaaattcacgacttctctcactcaattcttccattaccactaagtcagtcttataattgttatttcgtgcaggtattataaccattg

SEQ ID NO: 25123 - DNA, 894 bp, Glycine max
  Intron number 2 from transcript Glyma14g02130.1 (locus Gly ma14g02130) derived from phytozome v7.0 (chr-ID Gm14; pos 1268004 to 1268897)
cggttgaaacgtttctgcttctgctcgctcttaaggtgataatttattcttcttctcttataaaactgcaagttagaagcatcttctgtggtttatgtgtttattttatgctctttttttttttctgtatgttagatctgttttggctgccttttgacattttaaaaaaacgtcccagtcagtttaacctatgattatcacagaagtgtggttggtctccgagccatgggcttggtggtcactgcatttattgtttttgtgttaactttttcaattttttttcttttttgagaacacattttgctactgctggaatgaaattctacaagttttttctatgggatagtgtgagtaatgtaaggatgctttgttattggtgatgctttattaatctgttctggtactaaggttttgtcaataaaaagtagaataaaattttgaattttgttcttttggctgttgtttggtggatttgaatacactgaaatttattcagcagttttgtcctttcaatctcgtcagacaggattttatttgcttgctctagggactcgtttgtttataatatgaaggactactctttccttttgagcttatgttcttttgtctatgctgttttctttaatctattttctgagaggatttactgtcctcattctttctactttgtctcttgatgaattctttttcttatgatttttctaaaagaactaaagaagaaaaacaaaagataaagttttttctgacttttgactactaggttctgtcagatgttgactactcattctttttgtgctcttaatgatgtttctttcattttattcgttattgttgtaactaattaatggcatacaatcaggtgaggtatccggatcggataacactcattagggg

SEQ ID NO: 25124 - DNA, 864 bp, Glycine max
  Intron number 1 from transcript Glyma14g07080.2 (locus Gly ma14g07080) derived from phytozome v7.0 (chr-ID Gm14; pos 5249367 to 5250230)
tttgcttgaactcgaagcccccatcaagatttgtggtaccccttttgctttcttctccttgtctcccctcaatttgctcccttttgtgtttagggtttaaaagtacttctgggtgtttcttgtttgttgcaagttcgaaccttttagtttttgggtgtcatgggttgattgaaaggaaatgtgggttacccctttggttttttgggcatgtgaatttgtttgtcagcttttctgtgtgagccattcatgtttgttgttatgttggctgcctagggtttaactcaacctcttcctttacctgggcttgaaaccataagggtggctttgtctttaaccgaacacaatggcattgagctattgcgaggtcacttggtgggataatattgggaaaaaatccaagtcccacattgactatagtagactttgatgctgtcttagaatttgggtttgggtttaactcaatcctgaaagctagtaagtgaagtgagggttgctccccatttatatacattattttggtcatatcattagtcaatatggtatcttcaacagataagacttttgttgttgttgtcgttgtttgttgaattgtttgctagcttttgatatattgacatgttttacattgaccgctgagggcctgaggctaacacaaccttcctctttatgaaaccatgagcaaagtttggtctttaatggaacaacatggtgttgaggaatccatgcagccgacctcacttagcgggataagatttctgttgttgttgttgaattgtttgttagtttttctatttagcattgcctgtagtgttattttatggcatggttgagatctctctctcttcgctttttcaggtgacattc

SEQ ID NO: 25125 - DNA, 567 bp, Glycine max
  Intron number 3 from transcript Glyma13g21400.1 (locus Gly ma13g21400) derived from phytozome v7.0 (chr-ID Gm13; pos 24883585 to 24884151 reverse strand)
gtcggtgctcctgaacctctggtaagttgaaatttcatacattaatctctctaaacgagtttttggcgctttattaatttagctttttcctatcaatagaaacttccgctttgtacacgagttcctattatgccattgttgaacattttgtgtcagagtacagatattaacattttttgtttgcacaagttttgttatgtttttatcaactctgaccttgagttacaattttttttattccgtaatgtagcaaattctgctttccttttccttccataaattagcactaacaagaaacatgctatgttattgttttggcctccttttgtgtgattttaaattcatggaattgatatttcttaaaaactttctagtgttagaatctatgtttcttctgtcttttactgattgtcctacttattagtttgaagactaaattacatttaggtggaattagtttgctaccgtccttgttttgatactcatattattttctctatcctataatatgtttatatttgattgctttctctgcagttatatttattaggtgttcacattgccctt

SEQ ID NO: 25126 - DNA, 763 bp, Glycine max
  Intron number 2 from transcript Glyma14g26690.1 (locus Gly ma14g26690) derived from phytozome v7.0 (chr-ID Gm14; pos 32749714 to 32750476 reverse strand)
agggaaaaagttaaaacttgctatttgggacacaggtaatctgaatttgttaattgtaatttcttgaaagtccaatccttttattctatgttgtttgcttctggtttatattttcaaaattacatattagttaaggtgaagaattttttccattgctagaaactcatgctgcagagtgactgtggagctttggggctctgatgtacttaactctttcgagctttatttgagagttttgccataccaattggaacctttgaattttatttttgaatattttactgttggttgattaacatattattaggatgacatgtatggatttggaggttgagattataagtcataacacccaagttaaacagaatttggaaagttctgcaatattgtttaaaatcagcatactggaatgtaccttatcttttatcagagtccttaacagagtattagactatagaatcatatttcaaatatatgttattgaaaatgtggcatatttaaaatgttccatcatgtatatttaagagaacatatagtctaatgtaatgcttcagcaattatgtgcagtataatttatattatttcttatatagagaaataagaagcttctgatatacttaattctcctctctttgttgcaaatttgtctaacctatgctttagagaagtctggtcatccttcattagaataagctaattgcaatcctttttattttctctttgtgcagctgggcaggaaaggtttagaacacttactagttca

SEQ ID NO: 25127 - DNA, 624 bp, Glycine max
  Intron number 1 from transcript Glyma14g26690.1 (locus Gly ma14g26690) derived from phytozome v7.0 (chr-ID Gm14; pos 32750490 to 32751113 reverse strand)
ctccgataccttcgaggatctttctcccaccatcggttagtaacattttcttttacatgatatttgttttttattttgaggtttagattttcgtgataatgtatgttgtcccacttgtcaatgtttcttcgtggcggtggtttattatgttatctgttttgtaacattgagttctggaggttctctctgatggtgggagttggaggaaaattttaaaggattaagggtcataccttgcaattggaccctaaaagtatacaacatagattatttaatatttttagactctctcaactttaatccaaacatgcacagaatttgcaacattacagatcacaaattcactatataactaacgcttcaaaccctcacactagaatcccatacttctaatgtgggactcaagtgtcataccttgcaattggatcctaaaagtctacaacatagattatttagttgttcaatcatggagtcatgataatccattagaaaaggtgatgtccttgttatggttcattatttattaaggagactatcatgcaattatttgtaagttgtactttttctcaatcatatgcattgatttttatattcacgatgcaggtgtagatttcaaagttaaat

SEQ ID NO: 25128 - DNA, 1024 bp, Glycine max
  Intron number 1 from transcript Glyma13g16610.1 (locus Gly ma13g16610) derived from phytozome v7.0 (chr-ID Gm13; pos 20529456 to 20530479 reverse strand)
aagcaccttcctttctccctcctcttaaccaaaaggtgattttgcagcaatctcttgtcacttgtattctgggcttttctgttttgcttacaagatgccaaattgggtgtcctataataatcaccagggattttaatttgtgtttctactgtgggggagggggggcggttaggattggtgactttggtggatgtgtttgccaaattttttctacatgttgtgcaaactcatggtgctttattgcatggtgcaaaatccatgcatttctaatgcatgagctactcatgttgttgggatgttttaataactaactaggagtgtaaaaatgttcaggaaataagttactgtgttatcacttgtttctgatactgcccttctcttccttacccttgatgttttgatatgttttgtaccacttgtcctctggtcgttggtggtaaacatggtcattgtccatcgataagtgttatccactgaagggctaggagggaggaaagtgaattttcttgggcattttgatgccttttcagattgtaaaaaaatcatcactgattgggattttggtaccatctgactccttcttgcctctgattgttttgacatgtttctgtctctttagtgttttttttttttttttttgtgttggcagtaaacatagttgttttcgtctttttgatttgaataacttgatttgatacaatttggcaagctcacaatttgtatcatgtgataaatcacaaatgcctttgaatcttatgatacatggatgaatagctatgattccacatcacacaatttagtaattagcaatccactattttttatttttaacttttctttcaattagcaattagcatatgttgatatttctcaatcatattggggaaaaagaggattaattaatggattttgaaagtgtgtaacttcaattatttcaaactgaatttccacaatttctgacacttcacctcaacccttttttgttgcagttgaattatacccataaaagcttttctcccataaa

SEQ ID NO: 25129 - DNA, 912 bp, Glycine max
  Intron number 1 from transcript Glyma14g37670.1 (locus Gly ma14g37670) derived from phytozome v7.0 (chr-ID Gm14; pos 46981206 to 46982117)
cttacagtgtacagttcaagaaaatcacgtttaaaactaacacattaactaataaaataatctattttaatatactttttaatcaccactattttaagtaattcacttatttagccgtacgatgcggatcgatatctattttatgtaagtactcattactttctacaaaattctcttatctaggaaaaataaataaagaaaagtacacaactagtaagtaaggaaggaatagaaaactgcttgttcgcattgtaaaaaacgaaaaacaaaaataacaactcattttcttcttcttttttatttattatgacaaatagttaacattgtataaaaaaaatgatatgatataataattactctttgcacagaaaaagtgtgaccatgtcggttaactatgataaatgcggatcgtattcgagttcctctgcgttttgaaaaaaaaaaaaggaaaatcatataattttatcttctgtaaattagtcattacgtgataaaataaaagttaaactaaaatctattgaaaaagtaaatgcagaattcgtgatccatccaatatttttccacttcagaggaagaaggttatatagtagaagtgagaggaaaaagtgacttcataagtcataactagaaaatcttattgttacagaattatcgttagttagtatcaaataatcgttcggaaaagtccgatgaatcaattcaattcataaataaagtcaaactaatctgaacggtcagttattctctaattactagtattagtactagcacactttacgttcggttgcacaatttgctccaacactttgtgtttctctctatctttttctaaccatgctcttgggaagttcttcatccatctatgtctcgctctcagatagagcaaagcttgtcccttctctgtcttcctct

SEQ ID NO: 25130 - DNA, 992 bp, Glycine max
  Intron number 1 from transcript Glyma15g40930.1 (locus Gly ma15g40930) derived from phytozome v7.0 (chr-ID Gm15; pos 47921254 to 47922245)
aagaattgcctgcagtttgtaggtttgtgattttttgactatactgtttttaacatggataaaacttagattggtgttgttctccgatcagatttagagttttacttcggtaatatgcgaaacaaaggaaaccattaaatgccattgcgtattcctgagttaaaactttaaatcttgatactatatctaagttttttccttttaatgttggcccttggacatgttgtgacttgaacttaatttatggggatggatgactaatctcttaggatagtctcttattggtgatgatatctacacaacaattttaatttggtgatgggaacataataaattatctattattagttaactccctattcctcctgtccttgccttggtaagtgtcttgctgttttgcccatttggtgcagaaagtcttggttagatttatgtcctctgtggataaactttttttataaacacttacgggaaaagaaaattagaaagtaaaataaattaagcttcttctatgagctaaaatcaacttacacacttcaacttttggagaaattagatgagaaacttttataaaaattaaatgcataagttgattttagctcatgagagaagctcaattcattttaacttcctaatttcttttccaattaagtgcttgtttatccaaacagaatcttagtcttctgatgtgaagtcctagtttgcatattttagttgtcacagttattgacttgagcaattcatgcatgagcaaggtatctatagacacaccaaatcaaaagctttagaaaatataaaaataactttcaacaatattcttttttattgttatcttcatacatccttagcttttgattggtcgtgcctataggtactttgcttacatatataataagtgctcaacctgatcccttaaactgagacttatctgtctttgatgaatttaataacatacgtgcagagatattgtgcctgagtactcaacaaaagta

SEQ ID NO: 25131 - DNA, 866 bp, Glycine max
  Intron number 1 from transcript Glyma15g21240.1 (locus Gly ma15g21240) derived from phytozome v7.0 (chr-ID Gm15; pos 19471471 to 19472336)
aagctgaagatttactgaaaaaattggatattccggtgcactagtcctactagctttatgttttaatttggagtctcaaagtgaatagttatagagtaaattcggcataaatcttaggctgtttataaagcctatgcaaatggcaaacatcccattatctagtttcagaaactgcattgacatttttcatatcatgtacatatactccttgcataactttttctgacatgcttaataaacaactaaatatgatataaaaccagagagggtgttttcataggtttcacaaacttgagattttgatgtaatttactaagaatataatttgaatacatagacagtgtaaaggttttttacactaatgtccaatcatggatttccatataactgaaatttgttttttttaataattattttaaaagtcatgtttagggtgatttctaattgattgatagcagaaaaatctttatactagcactatatcaaaattaaactcattttggattaattttatatttggtgtgtcagagttgaggaagttgtataatgatagtgggattttttagtagtaaattaatttgttgtgtcattgtattatttgaacgtttgcttttcttccttttcaattactggttaacagttatctaatatttttattttccctcaagatatggacctgttatatatcttttaccacatgttatatatcttttccctcaagatatggacactgtctctatatttttaccctcacaccctactctgtttagattttggcttaaaaattcatcaatgtacattaagtaaataacatttagtgtcctcattcagagtccttcgttgagaaattcacctcgtggaatatt

SEQ ID NO: 25132 - DNA, 475 bp, Glycine max
  Intron number 4 from transcript Glyma13g27700.1 (locus Gly ma13g27700) derived from phytozome v7.0 (chr-ID Gm13; pos 30854338 to 30854812 reverse strand)
ctgtaggttatccctgtcttcttgccttactagttactacttccattcttttttaattgtggtttaaggtttgtatataaaaattaagaaatataattaaaattctcatttttattaaaattattgtatgattttatattatatcttttgtttattaactaatttttttatatatctctctctctgagcatataattaatgaaatagtgattattcttttgaacttttaatatcagagataagaaaatcattttttttctcaaaaattgacacttaaaatgaaacagaggtagcaggatcattagcatttgaacttgtaaattgttttaccgttttagcctaatgctgtatttacaattttacatcttttacaactacttaggttgaattctttttcttttgggtactgtttacgagtgttgcctttctttttcttttttttttctttttaatttggacttccagattgagtttt

SEQ ID NO: 25133 - DNA, 572 bp, Glycine max
  Intron number 3 from transcript Glyma13g39120.1 (locus Gly ma13g39120) derived from phytozome v7.0 (chr-ID Gm13; pos 39843798 to 39844369 reverse strand)
aaccgtcgcaatactggttagtgactccgtctgcttgtgtttttttttttggttgttttgtcgtttataaaagtgggaaaattttgctggttattggaaactgggcgtaacgtgcaattgatcttcgatgatagtatgaatcgctgacacttggctaatgtggtatttggatttggatttgaaaatttgtcattttgcttgtcttgttaaatattttaagtgttagttattttattccactatgtttgattgtgtgaggtgatatattaatatggttttagaaagtaggtgtgcttttaaccttaaagttataggattggggcttgggtattggctatcgacattgcacacgcaacatcttgcactcaataattgtgagtattgtgaattagtaaatgcataaactgtaaatgtcttttaaaccttgttttaaggattaaataaatgctgtattcttactagacttgttggtggagaactacctaatgcccatgcatgtaacttgcattttactcttttccatgctggcataagcagaaaatttggtggagaatctcttgggcgattttgag

SEQ ID NO: 25134 - DNA, 576 bp, Glycine max
  Intron number 1 from transcript Glyma17g01680.1 (locus Gly ma17g01680) derived from phytozome v7.0 (chr-ID Gm17; pos 1021351 to 1021926 reverse strand)
tcttgtctttttctgccccctttgtctttcttcaggtaccattctgtgagtgagcctgccctcttgaaacctgtgatttcccttggagctattaagatccggggaagaattttcaagcctttgttccctttttcatgtttgggttttaaaagggtttatcagggttcccatctgagaaaaaaataattcaaaagcctttcctttttggagggtattgaaacaagggcaaggtagatttcctgatagtattctcttctcttacacctttctgctttttaattcccaatgaaggggaacaatatatatatatatatatatatatatatatatatatatatatatatatatatatatatatattatctcattagttagtaaccatgatgcattcaggtgaaaaaaatgtttcaagtcatctatgtctatatatatactgaaataagcacctgtgttatctatcacagtatcactccctctcttacctcaatccacttcccttggtttgttttctcacaagcaccccctttatctgtatttgcaggcagcagataagattgcagaactaatagataccaa

SEQ ID NO: 25135 - DNA, 612 bp, Glycine max
  Intron number 1 from transcript Glyma13g25430.1 (locus Gly ma13g25430) derived from phytozome v7.0 (chr-ID Gm13; pos 28669204 to 28669815)
tcaggcgacgatttcgagcctcaaattttcaagtgtgtaagtctgcccatgtttttgtgtctaatgggtttacccacaacttgcagaattttaatttcttccatatgtattttgtgcatgactgcttggttgtacctaatattatagagaactttgattttctaaatagtaatgctttggcatgattctatttttggatcattgtattttttagttagaaagtcttagaagaagaatcttggttatgttcctcgagtctgatgaaattcacatttttttactgcatctacattcgattagtttgtatgtgcagaattgcattgagattaagtacaatctttcatttttaaatcaccgtaagactggggaatattagtgttaaaatagttcttattatcatccaatgtcattctttaggtatactgtgatgtttataaaaataaaaagattaggaaaattataacaaacatttttgctaaaacaatcttgatatgttttctgaaatacatggatcccatttctttttgaaatactgtcaaatatggattacaaatgatttcatgttctcttattttcatgtcataataggctgtcactcgggtaaagccctac

SEQ ID NO: 25136 - DNA, 703 bp, Glycine max
  Intron number 1 from transcript Glyma14g03500.1 (locus Gly ma14g03500) derived from phytozome v7.0 (chr-ID Gm14; pos 2263836 to 2264538)
ccaagacattttacttaggtacttgctgctcttttgttttgagccttttctcattcattatttctgattcaaatgaattttagccctcttattttttttccccatcatatctaaataatgtctctctgtctccagaaaattatttcatgattcaaagttattatgtgttcatgatctcagttaatctttgcacgatgacacataatgaagttttttaatttacgacaaatatttcataaaattcatgggcggtaaagttgtgccttggtgacttattggtcatgggttcgaatccggaaacagcctctttgcatatgcaagggtaaagctgcgtacattatccctcccccataccttcgcatagcgaagagcctctgggcaatggggtacgatgtttttatttcataaaattcaattatgtgtcatgtggagattgttggagacaagaaacaatgatgatctcgaccatgtagtaatttctcctcttccaccacaacgttaatataattgaaatgtttgttttgttcctaaaccttaagtctaattacaaagttcaattcatatgatatatgccttttgttttgttgtgctacagaaaagtacttggcagctagattaaaatatttttaaattttatttgttaataatatattttgttgttgaattgactcatcttgaaaactgtactctaggcacacaattg

SEQ ID NO: 25137 - DNA, 707 bp, Glycine max
  Intron number 1 from transcript Glyma13g22640.1 (locus Gly ma13g22640) derived from phytozome v7.0 (chr-ID Gm13; pos 26133835 to 26134541)
ctgccccttctttatactcttcttcactccaataggtactttatactttctctgtcttgcgttttcaaacttgtaattgatttactttattcattggccttttcccaagtttttattgatctttattattatttttgtatgatcatgggttgggggtttcatcccttgagtgtttagtatagttttcaccatgtattgaattaatttcttgatttttccttttctctttatttttgtatttttaggttcttggcttcttgtctcggttgctttcttttaattctcatgatatcaagttttttttttctcccccccttctcttttagggagagattttaattttgattttcaattctttaaaatattcatattgctttccttgtaagttatcattatgacttcattgatcagtgtctttccttcttgatttcatatgggaccactgttccttcgacatatcatgattattccaattctatcaattcgtggttctgattatggatggcctttctaattggggtttctagactttactcttttgtcctttcatgtgcgtctacttagtaacgattatgttcatgattggcaaaataatgttagggatatcgaagttgctagcgtgtattttttgttggctacatcatgttaatggagctctaccctccctgtttgatttccagcttctgtgcaagcgttcaccggaacct

SEQ ID NO: 25138 - DNA, 502 bp, Glycine max
  Intron number 1 from transcript Glyma14g05570.1 (locus Gly ma14g05570) derived from phytozome v7.0 (chr-ID Gm14; pos 3997630 to 3998131 reverse strand)
ttctgaagactcaggggatttctcgtatcctcaatgtaagagggttgttattgtctttttcaatctgtgattgaatctggcatcttttgcaatttcaatttttcgatgatcatctatgaatgtatgcatgtgttgatgtttactgtggaattgtggggatgctggttggttaaatgtttcggggttttgtttttgggttattatgtgttcttgtttgaggtttcagtttttattgagtaattgcaggtggtgtggtttaggttaagggtttccttaacaatactcttctagtttctaagtggccaatgatgtttgagtctttattttcttatactgatttttattgagtaatttgtaggtggtgtggtgtggtttgggttaggggtttccttaacaaatactcttctagtttctaagtggccaatgttgtttgagtgttaatacctttgaattttctgtttgtgcagaccgtcccttcttgtcaaaatctctacaagaactc

SEQ ID NO: 25139 - DNA, 613 bp, Glycine max
  Intron number 2 from transcript Glyma15g08630.1 (locus Gly ma15g08630) derived from phytozome v7.0 (chr-ID Gm15; pos 6110015 to 6110627 reverse strand)
tctagagtcccggaagaacataaagtaattcttctaattacttttatcaaatttttgttccatctagacatgataacatttacaataaattttaacgacacagttaattcatttagcttcaatttttgtttttagttgattatgcttttgttgttttaccctttccaatgcacgtttaacgtcagttcttctcggattgggcgatgaacgtgggtgaactcattcaaatcacgttatatttggttgtttataaagtacttcggatggtcttaatcagccatttgacgtgaaattgatacaaatttgtatttggtagttgatggtaatgcggtctaagttgattggcaaattgttaaactttaattacatgcaaaatacacaatttttcataagagcaactcatacattacttatgatagacaagtgtataacaataataagttatttaccttttcacttcttgagacatgtccccgttggtcattatgcaagaaactcagttttcaattgagacttaacatgtaacaatgacgcaaagtgaagaatttctccattcaaagcaaatggaatcagaatattgcacttttatgttgacaaccaatatgtgttgtag

SEQ ID NO: 25140 - DNA, 767 bp, Glycine max
  Intron number 1 from transcript Glyma13g17660.1 (locus Gly ma13g17660) derived from phytozome v7.0 (chr-ID Gm13; pos 21415385 to 21416151 reverse strand)
ctgcactcgtcggaggtacccctctctctctccctctcactttcattcactcaagtactgacacaagataattgttactaaaccttagagactgatcttttttcttgttttatttgtttgtttgttttgtttaattattaaggggggttgagttagtcaacttcctaactatttcaattcaactaaaagcattttggatgcataagaatttcctcgacaaggtgattgattggttgcaatatcagatgttatttaatttctattgtttgagtttcatcttttgctgcgatttttcacgaattgtagggcaatgaaacacgcttcaaaattagtagccatgtcgtgcttgacatgcacgtgtgtctaaaactttatttttttggacttctataccaatactgatattagcaattagtaataattacttaaattataacattgttaatcttatactacattgcaatttggatcttagttgtgtcgtgccttatgatttttagaatttactgtattctcatgtatccccgccatcaatgccctgtgtggccatatcatttttgtgctttctagttatagggtcctatacagctcctgcacaaggtagaaagtgatttttagagtcttagtcacgtatttgggttgttcacaatataatatgtccaatggattggactatgatcttgcattatcttctttatttttttgccttttccctgctgacatctgcataatgatctttttgatggtttttggcagtgggtggtgta

SEQ ID NO: 25141 - DNA, 612 bp, Glycine max
  Intron number 2 from transcript Glyma14g03950.1 (locus Gly ma14g03950) derived from phytozome v7.0 (chr-ID Gm14; pos 2624789 to 2625400)
atcaaaagagtaagtgtaatatgatatttttgttcttatcaagaaaatgatattatatgaagtgatctgttgtctttaatgcttatgcgtgagaataaattattggggtgttagctataattccataaacatattagacagggtagccatttttataatttaatgtaattacccaattctcttgtcaaaagtaatatgattttaattttataggaatatttttttttcttaaaattggttatttaaaagtaacgacttcatctaatgaagctaattgaaatctgtcaataatggtattgcttatcacattgtaagtaatggtattcctatccatcatgctgattttcttcaggttcttgggggaaagacaactttaagatgtatgttattagtttgcctagtaataacattatagagttttcaagaaatatattagtgtctttatgttgtggtatcatacttattggcacaaggattgatttgactaaactgtactatttttctacattacgttttttatatctactacaattttgttattgctatatttaatgtatttgattggcacatgatacagagattggattaggattaactggctttggtatattt

SEQ ID NO: 25142 - DNA, 915 bp, Glycine max
  Intron number 1 from transcript Glyma13g22870.1 (locus Gly ma13g22870) derived from phytozome v7.0 (chr-ID Gm13; pos 26364882 to 26365796)
aaagccaacacttcctttgaactcacgcgttcctggtggtgtgcttactgcctgctttccttttctcagtttttgtaccatgctttctcactatttcttatttctgtttgttaatacttatttccttattaaaaatttcttattgcaaatatgcaattacttgattatgaactagttgatgttgatgactatggtatgtgcttgattcgagccttcgagggttgttgttcgtgaattcaattacttgtttcgatgcttatttctgtcttgttgatggcattttcttaatagcgtcgtacctgcaagaaatcttccaagcaattttttgtttgtttatttccttattgcaaaatggtgactgcgagtagaatttcatgctaaaaggaaatttctgaatcattgattattttttgaaattttttaagatatggtgtgattattttttaataacattttaagtataaaatttaacatattatatgttgtttaatttagaccggtcatgcgagtgaactagagactcataggttcgacccgaaatccagtgactcagtagtcagtacccgaccgagtcaatgatattgagcgagcttcatttgaagcatccgtctaaggagagttgctccattggagttgctcttagaatttaaaaaaataaaggtgtctcatttgattcttagaagctggcctctaaaatgtccattagccactaactggaccttaacacaacttcaagcttagacagtttcgtgagttcatttttcacactttacacttgacccaattcctgaattagcagaatcagtgagtacatgcattttactgtgaaaaattgcgttatcttccttttaatgattctattatgtgaggtttattgcaggagacccaaaagttcgaaactgaacattttcacaa

SEQ ID NO: 25143 - DNA, 664 bp, Glycine max
  Intron number 3 from transcript Glyma13g39300.1 (locus Gly ma13g39300) derived from phytozome v7.0 (chr-ID Gm13; pos 39951619 to 39952282)
gattcaatcttggtatgccttcttgttcctcactgcttgatttatattatagcatatattagcctgctaagattctctaaaatttaagggggtgggtaattcatcatagtgatctgttgctgtctgtattattgcttttaagatgtattgtactcaaacttgagttgggacatgttttgggttgtgaacatgatgaacgagaaccattaagtttgattggtccggtaattttaattgtggaaattgtttatcttcaaaactgaaggctttaattttaatatttagaaactaaactattgattttaaacacggaactctataaatgtgtatttatacttatttcttagatgattgcaatattatactgaatcttcaaagagtttcaataggcatgtactgttggagaaagtttttacgtggttaactaatcagaaatttttgttggaatgactttaagatagtgattataaaagtcagcgaacttatcataatggtttgtgattgaatgtcagtgtaaaagacttttatattgtcacttgtcagtgcatgtattttttcttcgaccttcaatccttctctggcactgaatctcatgtccatgaagcctacatattttcacatatgtaatgtattcagaagtaaatttttgttctctgatgcagtt

SEQ ID NO: 25144 - DNA, 189 bp, Glycine max
  Intron number 1 from transcript Glyma15g06600.1 (locus Gly ma15g06600) derived from phytozome v7.0 (chr-ID Gm15; pos 4669257 to 4669445)
tttacttcttcatagctcgcatctctattcgctaggtttgcgttccgcaatttcaatttctaacttcgtttttagcttttgtgttttcttgtttcttcggcgattcgaatttatttgtttttatattttcttttaataatttgaattcaattaggaagctgaaagagaaggatcattcatcagtgtttc

SEQ ID NO: 25145 - DNA, 654 bp, Glycine max
  Intron number 1 from transcript Glyma15g03210.3 (locus Gly ma15g03210) derived from phytozome v7.0 (chr-ID Gm15; pos 2225465 to 2226118 reverse strand)
gagcctaagacacaacctcaaggttcgttcacattattttcattccttattcaatttgttatgccatacaatagattatgaccttcaccgctattttttttcgttaggccttgctttcgttgctgttaaatgcatcgaaaccctaaaatcctagcattccattatttccatataattaacaatcaatttctcctgctcgttccgttgatctatatctgattgtcatcaacatcgtccatgtattatatatttgttttttttctctccccttttttatttatgaattgatgcatgtatagtagaatctgaatattctgaatatttgttggcctcatagtggaatcatgcttgaattatattctaatttagttaattttgattttttttaattgtgtgaaacagcctaactgcacctgtgcacacactttcaatgaagttcttctattctgtgtgaaattgtgaattgtagtctcttattttatttttttacttgatattgataaatcatcattcatggcctttcaagcctcaccgtttgaagtatatgacactagaatatgtataaattaatctttaatatctgaaattttactaatattttagttgtgctgtgttgcagcgaatagtcctccaccaaaaccttgggaacaagcg

SEQ ID NO: 25146 - DNA, 700 bp, Glycine max
  Intron number 2 from transcript Glyma16g26350.1 (locus Gly ma16g26350) derived from phytozome v7.0 (chr-ID Gm16; pos 30488512 to 30489211)
attaactttaactttggaaatcccttctcgaagtaatatctctttatttgtattcttttttctctttagataaattatctgttcactctgctgtattttgcagtttatctattcatgccacagtgacaatttcttacttttaaatttcaatgagtgagtggattagttattgatttaattttgtgtaattggttttattattggcctatgggttgagtttaccagcattaccaattgcatatttcagccttaaattctgtttggtgcttacttttgaaattcaatctagattttatcatatcttactgcatattgaccagttttctatggtcttccttttgctgcagacaattttctcaattttgtaacttgaaggggttttgtttggttgaaattcttgtttgttcttcatagttcctatgcttacattttttcatttacgttcatttgagaaccatctatatgctcatttgggtagtgattgtttatcaatacttttttggttatggcaatatcatattgcaatctcaataagattcttttgattttcctattttgtgagcaaaatatcattaagacatgtaaaggtatttgtttagtttgctaatcattcatgaaaatcttctttttccgagtcacaaatgtcttaaaatatatatttgcaggggtgcttcgctttgtttaggtggtcttcatccag

SEQ ID NO: 25147 - DNA, 347 bp, Glycine max
  Intron number 1 from transcript Glyma17g04640.1 (locus Gly ma17g04640) derived from phytozome v7.0 (chr-ID Gm17; pos 3098953 to 3099299)
gaaaggtgagaattttaatgtgtctgtcatgttttgcctcagataacatgaaatgtgtttgaactttgaatgcccttaaaaatttccaattacgtcttgttttcttattctgtttataattccaagtgtggttaattcatttattagagacatcaatcactttttgattggatttcccttgttaactacttagtcttagcttatacagtggtacaaaaatgagatcaaatatctgttttatgcataaaaatttatttgtcaccaactgtgcttggaaatgaatctgattattttttttcttggatgaagaaggggccaattggagaacaccagagtcccaaatttaa

SEQ ID NO: 25148 - DNA, 428 bp, Glycine max
  Intron number 2 from transcript Glyma13g30800.2 (locus Gly ma13g30800) derived from phytozome v7.0 (chr-ID Gm13; pos 33329176 to 33329603 reverse strand)
cctcgtgcggccataacattgcattcaaagataaggtacttattatattgtcggtaaatattttgttttataatttaaaatttataaaaatatattatttgcattaattttatttttataaaaataaaatatttatcttagaatttgttacataaaattaaaattcttattttttgagattttacttttggaggatcaaacgcaattaactcattattttaaattttttggaattttattaatactgttgttcttttatttaatctggggttatgcatcttctttttatttatttattttattttctaacacttataacctataaatgtttgtgctttttctcttttaagttgttttttgtttatatatgaaccaatctcttattagtttgtgttgtacgtgtgtggtgaaatattagggtggaatcc

SEQ ID NO: 25149 - DNA, 896 bp, Glycine max
  Intron number 1 from transcript Glyma16g19250.1 (locus Gly ma16g19250) derived from phytozome v7.0 (chr-ID Gm16; pos 21223627 to 21224522 reverse strand)
taagaatacaacagatactgaaattaaatctaaaggtaccccttctgctccaaaattaaaataggttctgttcatcacatgttcatttaccaatgggtgtgcatggttatccaaattaaaactagatatatggattgaattttgaaaccgtatcgcttttttcttttttaaatctggttttggttttttggccaaatcggtttatggagaaaactggatttggttcaaaaccagtttttgaatgaaacgttattctaaaaccagttttgaactgatgtaaaattagttatatatatatgaagtttgtaaaaaaatggttttgaaactgattaaccgaaccatttgttaagaagtaataaaccggtttggtttgaaaataggtttacattctatggatttttggaatgtggtttgcgttgggttatggattggttaagtttaattgcttcttttgcacaccctaatattctactaccatttttgtgttagcaaagcaaagtgcaagacacggtgaaatttgttgtacttgtattaacttaataacttgtttgattttgttgatgcaaataacaatctgagctgttttcttttgccatacttcaaagttttcactaaaaataacataaaataaaattctacactatcctgtcaaattaaaatatatttatattttgtctgaagtttaagaatgtccatctgcttctgctgttaatacttatatagtatagaatctctcttttcctccctccctatctctctcttacaacccatcaaatggaatttctttttaattgttttacaacttttatttacaaatgactttaatgtcatgaaataagttaacgaacatgtcttcaacagcaattgttcttccggaacagagtcttgcggcagag

SEQ ID NO: 25150 - DNA, 858 bp, Glycine max
  Intron number 2 from transcript Glyma14g36570.1 (locus Gly ma14g36570) derived from phytozome v7.0 (chr-ID Gm14; pos 45921507 to 45922364)
atctctatttccttggaagaagggttcaaaaactagtaagcaattttttttaatcattattattatattgatacttataagagaagtcacttttacaatgatgcttatttgaagattggccccaccaagggctgtgccgtggggcttccaccctaactatgctactgttataattgttttagagtcttaattcatttcatgtttgaggtttgcaataatagtattgtcagtcatttgtgaagatatttttacaatggaaaatggataacattatatgtttatatatttatttaaatcttatatttgagctaactgaaacctgtttctgaagcatttcaaattctctacactccttgtggtttacttcccggttgaatcttctattaatagagtttcacatattttcctttccaacattttcttgaatagttgagccatataaaatgtaaattgagaaatatagttggaaaccatgcatttagttttcagtgaatgctcacttcagtttgaaactttttgttatgaaatctttctgtctccagtttgcccattttcttgatataaattacgtaggtgatgcaccccttgaatattctggaactggttctgccgagcagcctaactcaacattaacttctaatgatgaaccaagctccactgaaatcggtcattcaaaaggtccacttgctgatacatctgatattaagaatgtaaaacctacgtcaaatattaatcatggacatggagggatgaattctctgatgtcatcaacagtaagtcaatatagattgaatcatgaatagaaaatggtatcaaactccatacagcgtcaagagataggccattggctgaccgaaa

SEQ ID NO: 25151 - DNA, 916 bp, Glycine max
  Intron number 1 from transcript Glyma14g05160.2 (locus Gly ma14g05160) derived from phytozome v7.0 (chr-ID Gm14; pos 3576377 to 3577292)
attgttcttcttcgctcacccacgcacgcgttacggtaaccctttctctctttttgattcttcacctgaagctatttacatttagttagtttgttttttcagtagttcattccctttgttggttccaatttgcaatcatgttctagtttgtatccatgattgagtcaccctatatcacgttgaatcgtagttcataacttgtgttggccgggctgtaacggctcttgtgatttatctaacttgcgtgtctgcctaccacctgtttgataaaatgcctgagctaatgccattgtactgacacccctgatgaggtttcgtcaattttctcccgacgcccttcttttttttacccctacacttcttaattgtttgaagaacattacgccgaggcctcttatacattatattaactcccttaattgtttgaaaacattacaccgtgtacccctttaaggtggttgctttaaacgttaaaaataaaaataaaaagagggttatgctatgtgttatctcaagaaattttagtggagtgtctgtgtaatctcactcttttattatcatcttttttaatcttttcttgtttcaatggcaaggaggttttataaatgcttccttacatttccttcactatttatttgcatatacttttgtctctctctaactggtttcttcaatgtgagttattcaaggtaagattttctgtgctgcttccatcaagtagtttcaaatatacagtattgcagttgaatgaagtgtgtggattttgtttcttttcttatcaagactgattttatttaaacttgtttttttatctatttttttatgataattgttaaattttggtatctagttagagtatgaaaaacatattaacttgatttgtttcttaatgctgttctgattttaagctgaaggc

SEQ ID NO: 25152 - DNA, 774 bp, Glycine max
  Intron number 3 from transcript Glyma13g18850.1 (locus Gly ma13g18850) derived from phytozome v7.0 (chr-ID Gm13; pos 22498316 to 22499089 reverse strand)
cccattgcagtgattccccctggtatttgatggactattcccctattgattttttccttttgtttttagtggcacggcatattatttgcaactagcatgtttggattatagtttgcaacccattgctttacccatcatacaagcaatttttcctaccttcattcaaacccattggggtgtgcacaacctaaccatgaatttgccaaacatgttagttgtggttgaaactctccaaaccttgaggtttggggtgtccaaactgcaaccaaacatggtccagtatttgcttagtagcattgtgtattagagggaaattgttttcgtatgaaagtacaggaaaatccttattggtaccatccaccccaagaatatagaacacaacgtacaaatttggtatggagtttgcattattgcatcacattagttttcaactgatagaagtcgggcactgaccactttttatgctctaattggcatatacaatatccaagtaattactgatttatgtgtttatagaaactgtcataactcaaaagatggtttatgatctccgttgctcttttttttttttatgtaaatatagccagggttatggtttcagactccgtctaaatgcacaaataacatgttacttttgtctcaattattcttttaactattgtgttaccatttttttagctattatgttgccaattaacatttattcccgtaaagaggttgtttaatgatttttcttcctctcagaatcaagtgtaaggaactcgtcaattaaga

SEQ ID NO: 25153 - DNA, 896 bp, Glycine max
  Intron number 1 from transcript Glyma16g03550.4 (locus Gly ma16g03550) derived from phytozome v7.0 (chr-ID Gm16; pos 2982795 to 2983690)
aaccaaatactaaaaatcaaatctgtattgaaaaggtaccattgcttttacaggtttgttcttgctgtaggatctggaccggtgcctgcaaaatgaacttaattgctttactactattatatgaattgaattgacatcattagtttctttactacttaatcgtgttggtgatatttgactgctacatgctgttaaaataaataaaaaaatatttgtaaaaatcacatttatacagtaattctgttttctatcttctatgtgtattaactcccatttttctacacaagtcaaatatacacatactctagaatattgatcatgatgtatttataaaggaacatgttgcattcacgatacagcaatgtacatttaagctttatgcccattaatacagtcaattatagattcttacacacgtaccctattgtacttcatcatatatcatgtattaatgatgctcagatctttataaacaatctcctaccaaacatctaaaatatttttcattatcttcttctctgtaggaacctctacaacttttctaatgatctcattcatcaattccatctaaaaatattaaactagaaataaatttgtttagacacatacattatcaaaatcccttccaccttattactagctaacctggtttatcttcttttttctttttggtttttaagaaaacttttattttcctttaaattgacttgtttgcacctatgtaattgaataagttaatttgtcattaattatcagacttcttttagcatgaaagttcattatttcagttttatatagaagagttggatctataaattccctaacctgctttagcttggttatattggtttctctttgtagcttacacccaatttgcagcacctgacactcggtga

SEQ ID NO: 25154 - DNA, 265 bp, Glycine max
  Intron number 1 from transcript Glyma16g10660.1 (locus Gly ma16g10660) derived from phytozome v7.0 (chr-ID Gm16; pos 10867396 to 10867660)
aatccagaagttagaattagatataagttgaaaaggttggatattattacgactgtaattttttgtttaaagctttctttcctatagttgttgttccttgcttcttcaatgttgttgataaattactttaatgattttatcatctatgttttttgacatcctttagtttttttaataaggaacaatggtatgaacattgttatggtattcactaaattaatgcgcttccctttttctttgatgtatgggcattgaaataaccaga

SEQ ID NO: 25155 - DNA, 931 bp, Glycine max
  Intron number 2 from transcript Glyma13g06660.1 (locus Gly ma13g06660) derived from phytozome v7.0 (chr-ID Gm13; pos 6819631 to 6820561)
ttgtaagtccattcttttacaatgtcgcctattaatatcagaagcaaataatctgattttataattaaacatgatggttctaaatgtttttggctctttttctctctactagttgggcacaacttttgtggtggatctgcatgtttacgccagttgcatgtcatatgttatatgtctgttcttgcttggataatataacttgcttgaaggtttgaaacacaaaattattttgttcctagacaaacgaaagcaataagttctcagactaattctttactattaagagaaattcatgtgagacccctttaaattttgtgggccccacttcctatttaatgggagccagcgccacatgaatttcattcaattcaatagtagagaatgtgttgttacttgttagtattcttcatattccaattaggaatatgacgggctttgaattttaaattacacttggagccatttttttatacaatattcaagtctgtgcttagcatttagtacttcatatgggtttgtttgggtaaacttctttagaagcacttctaaaagaagaaaataagaagaaaaaagatgagatgagcttttccataagcaaaaataagctctccatgaattaatttttagaagctcaccaatatagcttctctaaaagatgagatgacatctataaattagctaatggaaaactcattttagctaatggagaatctcatttcattattttcttcttattttctttttctagagaagcttacacccaaacaggcccataatgtaaggtgtaaaattattgaataaaatcaagtatatagatgagtttatttaaattagttactatagcaatttaaaatgaattgagtttatttgttttcaatcattagttatttagatgtctaagaaacaattgaatggacaggctgttgttaca

SEQ ID NO: 25156 - DNA, 341 bp, Glycine max
  Intron number 2 from transcript Glyma15g27790.1 (locus Gly ma15g27790) derived from phytozome v7.0 (chr-ID Gm15; pos 30447615 to 30447955 reverse strand)
ccgactccaccctcaacaccgccctcaacgaaaacgttcgcttcttatcacttctcatttttattcttctttcaagttaagtttgtagagattagtgaaagcttcagagacgaaaagagaggagaggagtgtcagtaatattcattgtacagcaaatataagatggttggaagagaggatgactgagaagcttggcatttgcataattgcttgcggaaaatttgagattttgaatgttttacacaagtcaataagataatgttattatacttgatggtgggtgattttttttttttttttttgtagataaagcttacgaaggagagggatcaattggcagc

SEQ ID NO: 25157 - DNA, 456 bp, Glycine max
  Intron number 1 from transcript Glyma15g27790.1 (locus Gly ma15g27790) derived from phytozome v7.0 (chr-ID Gm15; pos 30448246 to 30448701 reverse strand)
gtaaaatgaacctaataaaaaacaaaaaaatggctgaaaattttaaaaaatgagcataaagccattttggagggaaacaattcaaaactaaaatcaaaacaaggacgcacaaaaaataacaaaactggaggacaaacacttcacacaaaattcaccagaagaaaaagacacctcgtgtcttatttattgaaattgtcccgccttttcaaatttgaaactgtcaaacaaaataaagtatatatttttaaaaatttatatctataacctataacaataataaataaaataataatataatataatgttttagttgtctctagtagcctctacatgtaataactctatttattgtatcaatttgttttatattaaaatgattgcttatgacgaggtttgggccaaggattgacatttattttagtttccctcgttgattccacaaccagctgggcatca

SEQ ID NO: 25158 - DNA, 521 bp, Glycine max
  Intron number 3 from transcript Glyma17g02840.1 (locus Gly ma17g02840) derived from phytozome v7.0 (chr-ID Gm17; pos 1889060 to 1889580 reverse strand)
gttgaagacttttgcctctggttcttccaaatcaggtattctattttcttattcagtgtcactgtttctttctaggcgaattagaaatcattgttgatttgaattttaaggaaattgtcataaaaaccaataaacttaccatacatgatagtttgtgtaaggatgacactgtataaagctatataatgcatgtattatttattctttttatttttgagacttaattggtgtttaatcacttcggttctaaattcattacagtattttgttaaattcagttataccaatttattttgcataaggctcttttgtggaggagggtgctttctgtagttaatgggtgtgtacactatatatgctagccaaaacctatgcccatacattctgcacactttagaaaaatacaattacttaccaggaattgttctttatcttctccaattctaggattgtgtttgttcattggtttcttttttgtttttgtagagaatcacattaatttgagcccttgtctatcctac

SEQ ID NO: 25159 - DNA, 307 bp, Glycine max
  Intron number 1 from transcript Glyma17g01820.3 (locus Gly ma17g01820) derived from phytozome v7.0 (chr-ID Gm17; pos 1133658 to 1133964 reverse strand)
aacttcattgtcaacggaggttagctctcaattcttcctcatttcaggttctttctgtgtttctttcgcccatttttttttattttttatttttatattccagtgcgtgcagtggtgtttggattgcacaagctagtttttcttttgcatcctaaggttggttagttttgtacctttgttgtgttgtatttgcctaatgattgtaaggttggtatgctcacatagatagagtggcttcttgtttgattaggtgttgatttcggtgctattagatcttccaggactactttttttctcaacatataca

SEQ ID NO: 25160 - DNA, 470 bp, Glycine max
  Intron number 2 from transcript Glyma15g13070.1 (locus Gly ma15g13070) derived from phytozome v7.0 (chr-ID Gm15; pos 9739366 to 9739835 reverse strand)
aagccttgacaaaattggaagaaggtaggttcttttatgagtttaaatttgattcactctcaagcataaaatgctgttaaatattatatgttgacacatcatacaatttgtttattaacatttagacctgtagagaatattattacaattttgaagaggtaaatgtttcaattaatattgcccccgttccttcccaaaaattgaatcattgtggaattaaattattcaaataagtaatctcaaatccaaagacaccggattgagtcttctaaatgaagaaagtaaacataagtaatagttgtactttgaagtggattacataatgtattctcaatcctatggagtacaaaacattgcttcacatttattgagtacatacaaccttttatgatacttcttctgtagatgtccactgtaatatctaattctttagcctaatcaatctgtactttatgttttcaccagaattg

SEQ ID NO: 25161 - DNA, 687 bp, Glycine max
  Intron number 1 from transcript Glyma13g20520.1 (locus Gly ma13g20520) derived from phytozome v7.0 (chr-ID Gm13; pos 23963411 to 23964097 reverse strand)
cggttttttcccttggtccgattccgacaacaacggtacgctcttcctttttcttcttcttttttttttccgattttccaacgcttctggttgtgcaccacgtggaattaaaaaaaattggagttccttttcaatgcttcgagtttaaccatcgcgattgggattgtttctgtgtttattgtgttcaaatagacttgcgtgtttgggttcacgttaaatgatccacaaattatgttgaaatactagttaacgtgattttaggaaaatgttcgcgtgtttgcttccaggttgaggcaattttgagagcttttgagttggattaaaatttctatattgaattttgctactaactttttttaggataaaacattgaaacaattttgtaaccaaaatcagtttcattcaaaattaattgttgcaaatgctcgtcctaacacacacgtattatttaaagtaataaaccgttgcctttcttgttgtttagattaggatttttttgagagtgtggattagatacttttatgatttgaagcttattctttcttatttgatcgttagttgagatgattttaaggcaaatttggacttgattcatgtcaaggctcggaaattatttaatccatcgtgttttcacttgtttatattctgagttgcttccctttatgtttgtgacttctcagaaattca

SEQ ID NO: 25162 - DNA, 981 bp, Glycine max
  Intron number 3 from transcript Glyma15g00930.1 (locus Gly ma15g00930) derived from phytozome v7.0 (chr-ID Gm15; pos 565489 to 566469 reverse strand)
gaaggtaggtggtgcttgcttgttggcatttattgttggttagtatttattgtatgtaggcactgatatagtgctgttgccttattgatgaagaatttggtggtggagatagtcagactaaattgtagattaatgttttgtggttagttatgcaacatacatcccccctggtgacaaaatcacggttatagatgttgatgagcacaactgctgttttatttctgtatgacttgtgtggttgctgcttatagtttttatgttaattctgaaactaccaagatgaataatattccaagggatatggctggttctttcttaagatttacttctagaagaatgatctgttgttgtagaatggtgttttggaagaatttttctttatattgggtaatgcatcccccataccttcgcatagcaaagagcctctgggcaatggggtacgaagttattgggtaatgcatcccaagcttactacttacctatgttattttagtaactgttaattgaggacaaggttagatcaatggtgattgatgaacaaaaccaacttaacaatttctagtctgaggcatgtaattgctggcccattaaaaaagagggggaaaaacaaaaggaaataaaaaaaaaattacggacaaagaaattgctggtccattataaatacatgggcaatttggaagatatcatattaccaccacatagcaaacttatcattttctctctcccccacaggatatctgtttagtcttatcttatgatttcacatttccttttcttatctttgttttttgaaagggctcatccatattgaaccactttttattcttattataagtccttgaagatgagctttgactatgatatgctgtgcttaatattatttgtctgtggaaccttctatatcagttgcatttccattgtccttgatttctatgcgtaagtaattattgcattgttgtgcccccatttctctacagttat

SEQ ID NO: 25163 - DNA, 1030 bp, Glycine max
  Intron number 2 from transcript Glyma14g11130.1 (locus Gly ma14g11130) derived from phytozome v7.0 (chr-ID Gm14; pos 9442414 to 9443443 reverse strand)
ttttctacaagcgccacaaggacagagttagtttttcttagtattattgtgtttgtgttctctgttaatgcaaattttgttgctcacttgtgtattctatcaatactacttgtgtatgtggtgtctcttttttttgtaaaggcaaaaagttgaatattattaataaaaactggtcattaacacaaacaaagagtgtcaaaaaccagaaacaggtcacaaccagtagatccaataatagtggatagaatttacatttcaaatcatcccacacaagcttcccatccatgtagtgtgtgtttgtttttccgttgaacaccccccaaacggacgttcaaggatttgttgcgtctcacaaaacggtgctttgaaatgcatgtccgtggaatgaaacggtaaaactaacatagccgtaatcattttgttcatagtgccacacagcctgataattgcagatgaactagctcagtggtattgaaaatcagcattcatgtatcaacactaaatgcttacaaattgccacataaacagcctcttactttgtattgagtccccacttctcttttccagtacctgtttccactcccaaaggaccatccattttgtgttgtatcctacccgataacatagagactatatacctggtttttctgaattccaactatcttaatattctaccagacatgctctcgggtcattcaacccacatgaatttggatacagaaatggacctttattttttaaccactgccacaaatgaattttaattaattccaacatagcatccaatcctttttttgttgctgtgaacaccaaagagttcctattcttccaattgttccacacagcagcaaaccagacgacctgcctgatttgtgccttttgatatgtcacttacctagttttaagtctctctctctctctttctcttcttttcttttaataaatatcaaggcatttgttatgtgtaatttgactttagtggtaatacctttcttcagttttttaaagatcggcactacttggataagga

SEQ ID NO: 25164 - DNA, 879 bp, Glycine max
  Intron number 1 from transcript Glyma15g12200.1 (locus Gly ma15g12200) derived from phytozome v7.0 (chr-ID Gm15; pos 9028519 to 9029397)
aacgctacaacgttcaccggagattggccttgaatgtgagtcacttcctttttgtctctactttagtttcgtaaaaaaacagactttccctaacttttaaatttttgcagtttttttttatttttataattacaactgagttttcatgacaattttgtgattaagtagtggtgtataataattttcgttatttattctaaaatttattcagatttgatttacgtgtcttgcaattattttggggagtcaatatcatgaccagatatactcaattatttgcttttggaaataattaaagttggactttctctctcaatccaagaggaaggcaattttgtattgaataattctatattttttcttagaatttaatgattatctaataaaataattttatattatcatttaatcataataataaattttaaaattattattgtttgatatatttttttaaaattaataaatttattagagataataatttgtaattgaaagataatataaagttagtttataatttttttcatatttttaattattaaatgaaacaaatatttttcttttgactgaaaatggaacacatattaattacaaaatactaagaatatttaatttttcatttaatatttatgaggaattataagaagataaataagagaaatataagatgatttagtattttctatttgtgtcccgttaaaaatgtgttattattaaaaacaaatattattagggtggggaagaggcaatgtttcctatttctgttgttttatgggaaaaaaaaaaaaacagcgtcgtaccaagcgtgatatgatttgtaaacgtggcgtgggacctacaggtaacactgctgttttgtggcgacccggtgaatcc

SEQ ID NO: 25165 - DNA, 562 bp, Glycine max
  Intron number 1 from transcript Glyma13g37710.1 (locus Gly ma13g37710) derived from phytozome v7.0 (chr-ID Gm13; pos 38714999 to 38715560 reverse strand)
ccatcttgatccttccaacaagctctactttccatgtatgtgtctcttgaaacttgtttgctcatggaatctttttgggaggattatcttctcatgagtaatgttatatgctttcttacgattttttttatattttatagaacaaaatgaaaaagtaaatacatataaataatgtcttgaaaacataaaaaaaaattattcaatacttactagatacagcaagcaggaggattagtatgaagagattataagaagatttagaatattcatttttagtttgaatttcttgtgaaattcatgttttgtttttaatttggtttgtatcatttttattctctagaagagccttgtgaatgggttgttctattcatagttatcatggctaacgttcacatttgtgcattctgttttttttttccccttgctttattgttatgttatatttaaggtaagctttcttatgatgggtggaagtggaatcaagaatatgatttgtttgcagtggatgttaggtttgtccttgcctgatataatgtgacttgactttgttttgattttgaag

SEQ ID NO: 25166 - DNA, 755 bp, Glycine max
  Intron number 1 from transcript Glyma13g20750.1 (locus Gly ma13g20750) derived from phytozome v7.0 (chr-ID Gm13; pos 24227694 to 24228448)
atacgtaagtatgtgatgcctcttaaaattttacaattaattggtaatttgggatgaaattgtgctaattattgagacaaccatcttttgttcttgaagcatccatcaaatatactcttcctgtatatgtatctctctgcttttatctttgtccttgttatattagctgtgactttttcccagcttgaatgcctaatataagatacaaggaaatttacatagacacttcattatatcacagatacaaaataataaatatgtatacctcagacaatttcgttataatatcaggcaggatacacatatacctaattcattaaagcagttgtttatgacatttgatgtctagaaatgaggggttatccgacaattcttgggattttgaagtttgaactagcctaatttatgaaaatggttccaaactcgtttaaattacaatatcataaactatgaagatgctattgtgtgccttcatgattagagtatgaaacctgaattatatttagcatccatgttgatctatattgttgtgagtacttttataaatagcaaaaacaaacttttcttcaagtttgattctgttagtcaaggtgctaataccttccatatcatgcaaaaaccaactttgattttgttttaaatttggaatgatcttttatggataaaatcagctgctcaactatcttatttttaacttttctgatttttctctctgtgaagcttgcccactaggttcttattgtccacttgcaaaa

SEQ ID NO: 25167 - DNA, 489 bp, Glycine max
  Intron number 1 from transcript Glyma16g31350.1 (locus Gly ma16g31350) derived from phytozome v7.0 (chr-ID Gm16; pos 34767464 to 34767952)
ttgaaatattttatctcttatttttaaaaaatcttgtaattttagtctttttattttttaattgagatatttttaaaaaatatgtcattttaatccatttgatcaaattcttgtttttaattaggatattttgtcctttaaaagttattttgaagaaaccaagaaatacaataaattttattgattttaataaaatacttatttcctattctaagaattaagtcggagaattggataataaagtcaataattaaaaaaaggaaacgccaaaaaaaaaaaaaagaaagacacttgcatcagtataaaggaaaccgttctaagaagtgaattaaaatattaaaaaaatattttagtatttggcacaataataaaaaaggtaaaaaataatgaaagtgaagaaaaaaacaggcagggcagcagtataaataatagaagtttgatgatttatatgcagaaccaacaactacacttgttttctatatattcttg

SEQ ID NO: 25168 - DNA, 661 bp, Glycine max
  Intron number 1 from transcript Glyma13g36030.1 (locus Gly ma13g36030) derived from phytozome v7.0 (chr-ID Gm13; pos 37395166 to 37395826)
cttacctcaaaacctgtcacagaatttctcaccaggtgcgtgccaataatttcaaagaccaaaactctttccttgttcttttgttttgctctctcttctactagttacatgatatgagaccacacgtgatcatgattctaatctatctttatatgatacataattaagtttttcactttgtgtgagaaaaaattaataaaacttaattatatatatcatgtaaaaattgatcaaaatcatgttggtctaaaatcatgtaacaattattcttctcatccttttctagaaaaaaaaatatttttaaaaataatttacttctttaagatgttaaagaaggagctttaacttgtgagtaagttgttgtaggtaaaccttttttttgtacatgtttttaattcatactaataaaaaaccgttatgttaacggtaaatattcccatatgcatagataatttttttcttatatcaatatatgatgttacctattttatcctctaaaatgagctatgtcaaaagggtcatgtaaaaattttggttttggtattttttttcttcagttagttttttcatttggtcaggctaattaaactaatgggcatgttttgtttatttctgttttggattttgaagctctggcacatcagggggtgagagaaagttg

SEQ ID NO: 25169 - DNA, 763 bp, Glycine max
  Intron number 1 from transcript Glyma13g29350.1 (locus Gly ma13g29350) derived from phytozome v7.0 (chr-ID Gm13; pos 32265560 to 32266322 reverse strand)
gaaatgtaagtttttttgctttctcagctttccaattttgagttcattttaaataatttctcagctttccaattctgaagtatatgatctttgtttgcctagtgtagtcaatttgttctgaaactttgctgattatagtttatgaaacccattttttatccttcaatagtaccaaccattgatgggaagaccataagtgaaagattgcaccttaaattgattatacagtgtcattcttattttcagatttgttttccacgagttcatgttcatgaagaacttctatctttcagtgaatgacaacttcagatgccattgcttcatggtagtataccatctgtaatggttgaatctgtcatcaatttatagatatatatagcttaaacatctatgattgtgttcacttaactcagttgttttttttagtttttaccatgtggcttctcagtagtaatcagtttcctgaattagaaccacaaaattctaaacttctacaataattacagtactggttttattgattaaagttttccttgtacccaacttattttttgattgttgacttcaggtaaaacaatgtagtccttgttttcagtaaatatagaggtttcatttcatctgtcccactagtactgctctagctgtgttagtgctaatctcttgggttgatcttcttttcactgggcatatcataaaccattgttatttatctttcttgatttattaactttgtatgaatatttttgctgtgtaatcagatcat

SEQ ID NO: 25170 - DNA, 523 bp, Glycine max
  Intron number 2 from transcript Glyma14g40440.1 (locus Gly ma14g40440) derived from phytozome v7.0 (chr-ID Gm14; pos 49372869 to 49373391 reverse strand)
tttgctacatctcatgtaactaactcatttatttgctttttaatttgtttgttactgttttcaaatctaaaatttgtttgtccctatatagcatgtaatttataactttgcccctgagcacttaactaaaacatttgaagaggatgagaaaacatctccataagaaataatttattttatactatcaattaattaaaaaaaaaagttgtggattcaatgctcttgctaataaaaactaacaaatttctcattaacatttgtcagtaagaaaaaactatcaaccaatcagagattagaaattatgataaatatgatcaaagtagttatttctctaaagtcctgataagtatgataattattataaacgttaaaacttatcatatttgtgtgttttttttataagatggcaacataaatcattaacatttttcagtaaaactattttctcatgaaacaaatccaaagtttgttttcaatttcaaatgcaggagctttttgatttcattgcttcggggctggcaaa

SEQ ID NO: 25171 - DNA, 731 bp, Glycine max
  Intron number 1 from transcript Glyma13g24970.1 (locus Gly ma13g24970) derived from phytozome v7.0 (chr-ID Gm13; pos 28262637 to 28263367 reverse strand)
agtgtgcctgaactttgtcgcaattttaggtcagtgctttgaaaattgaactgtttctatagctcaaattaatgattttgttgatgcatttttttttgggggtgggggagaggggagtgttatgaattggaagcttgttttcttagtgtgatagttagtgcttgactttgatcggataaacttctccatgaggtagaaatgaatgaatttagttcctcttataagctaaaatcaacttattgcacttcaattttctgagaagttagacgagaggatttataaaagttacgtgcataagttgattttagttcaccgtagaaaattttcctcttatatgtgattatggagaagtttttccaaacatagttcatgaaatgaagtgctttctttttgtgtattcaaatttgggaagaacaaaaaaaatgctcggtgctgatgtagcttgtaggtcatcccttatgatgattattttcatccttatgctgatcatgggcataatatgtggcaacaattcctaaaagaacgtagactgactttgcatggttcagagtgtacgagtttttcagtgtaaaatttagattctgacatgcttttttttggtcttgcaattcatgtttgtgtactattgtaggtcttttatggcacaataattttggtactatggatttctcacattttttttaatcttgtttgttttttctgcagtgctgtttcgtggtgcggaaaactga

SEQ ID NO: 25172 - DNA, 884 bp, Glycine max
  Intron number 2 from transcript Glyma15g11630.1 (locus Gly ma15g11630) derived from phytozome v7.0 (chr-ID Gm15; pos 8572277 to 8573160)
agaaacttcaactcaaacgtcttcttttcaaagtggtcagcgtcttttcctttttgtttttttttactcttgtcatacaactagtgtaataaccaaaatttctaatacgagtatattatagtccacttgagtaatgctcaaattgccctcccttgatagattaatatgtgctgtatcttaggggtctattttctgtattttttcatggctctgagcattattggtttgaataattaggtttgaatttctgctaaaaactatgggactttaaaaaagatgaaatgaggattctgagttgaaatttcaaagtttactggactagtgttcaaatcaaaacatcatggattctgttaagtctgcaaattgatggcaatctggtcaaagaaaagaagaatactcttattacaaggttttctcatagctgatagtctcatttacattaaaaaataaactaaaatgtgtgcaaattgatctatctggaaatgggagtgtaatttttaaaatgaaggggaagatgatgtagtttaagcatctcaaagatgagtgtatttaattcttctaatatttgtgtggaagagagagtgccagactattcaggctggacttttgggggtttggggtgataggaaattggaactctattgtcaaaagctgattttaaaaaagatgaaatggttgtttttttgggtttcacttaaaaaaaaaaatcaacatgtcgctgctcattctgatggaactacgttgcttgcataatcatttatgttttaactaatacagttatgtgtggcttgcgctttttgtttttatatttatgcattaggagtcatgcaaatcgtttatttcatgcagattttcggagctgcttatcttggaccctttggaca

SEQ ID NO: 25173 - DNA, 719 bp, Glycine max
  Intron number 3 from transcript Glyma15g36190.2 (locus Gly ma15g36190) derived from phytozome v7.0 (chr-ID Gm15; pos 41307386 to 41308104 reverse strand)
acaacttagtggccaaaccccagtgttttccaaaggttagttctcgataagtttctaaatgggtagttcagtgatgctgataatgagcaaagatctcaaatctgtgttcattggaactttttgttgatcatttttgtgattctatcattttcttaaaatatagattgctggtgaagtaatttggaagaatccccaagggttggttagtttattttagggtttttaatggaaagtttgttttgtttttttaattgcattgtcaagactcaaacgtctgataataggttggaaatggtagtttgagttttgaaatttttgttaattataatgattgtgtgtggacctgttctgtggttataatcacattagtggtgggcttaatgaaagtgcatttaaatgccaatttttcttcagaaactcgattcagaggttcatggaagacctgaaaatgaggattctgatatatcttgatcgtatagcttttttcctgcttaatttaatttaaaccttgtgtgcaagggcagaaaacggaaatcatagtctattgctctgtttgaaggattttaagtagtactacttgctttaccagtagtttataataatggttattgtatgttggatatatttggctgtttttcactgttgcttggtaagaaatgttttttctcggcttggttttgacagcacggtacactgttcgttcctttgggattagaaga

SEQ ID NO: 25174 - DNA, 493 bp, Glycine max
  Intron number 2 from transcript Glyma16g00590.1 (locus Gly ma16g00590) derived from phytozome v7.0 (chr-ID Gm16; pos 247819 to 248311)
ctcattcatccctcaaccggaaccgcggtaactgcttcgtttcctgtttaaatttcaacagcaactgaattcggagctaatttcaattcgatatattaggaatactgtgtgttggattgacctaatcgattattcgtgtgaagattcgtatgtgtgtactaattagaaatgtatatagtgtgggatgcttgatttgctgtaggtacattgccaatgggttggagatataaggtgggtcggatgggtaagggacaaaggaagaggggaaagttcgtgggtttgatctcctctgctatcaaaactaacacactaacatttgcctaaaaagaaatttgccaatgggtatataatagaggtgacatgggagaggttacctttattgtgatattggcatgttctgttgtgtgggaactatttgatttgagtgtctggtgaatggtgttccttaagttttattttctatgtttataattgtggttggttatttatttag

SEQ ID NO: 25175 - DNA, 940 bp, Glycine max
  Intron number 1 from transcript Glyma15g41360.1 (locus Gly ma15g41360) derived from phytozome v7.0 (chr-ID Gm15; pos 48463759 to 48464698)
tgcagaggtattgcttccaggttagagatttttcttcaagttctttttcaatctccatgttgtcaagtcaattcctttttgcttgctcttttccccaccatggatttcactgcctccactgccgtatgacttctttttgccaatatgtttttgttggtttttttataggcttaaatatgttttgaatttctaataaatatctaaaattttttttcgtttttcgttgagttcctaataaaataacacttttgttttttatccttcatattttgttttaatctccaataaattaacgaactttgtgtttacgctttaataaattagcaaattttgttttaattgtgactaataacaaatgcaaaaaaatttattagggaacaaacatagaattagttaagttgaggaactaaaaataagtatcaaagataaaaaaaaaattgttgttttattaagaattcaaagcaaaacaaaaatttattagggaacaaacacaaaaattagatatatattagggatcaaattcatagttaaacctttttacatttctttcattcattgtatcttgcatgatgctgtgtgtgtttgaagtagaaattaaagcaagactgaagaaagtatgttttaggctatttagtagctccgaacatccgttcaagtcaatgagactacacctatagattggggaaaacgtgcatcaaaatgttgtggactgcaacactaacacaaacttgttatagagaagtatatcaacataacaaactgaaaaacaaaattaaaattgttgattttcatgtattttccttttgttgtttatctacttcacctgtgccccttaaaatatatcttactggttccacttttggtttttgtgtccctcatttgaaccaccttgttgttctttacaggacaaaattgaattaagggaaggatcttggtttga

SEQ ID NO: 25176 - DNA, 595 bp, Glycine max
  Intron number 4 from transcript Glyma14g22780.1 (locus Gly ma14g22780) derived from phytozome v7.0 (chr-ID Gm14; pos 26887114 to 26887708 reverse strand)
ttcaagaggtattatttgattaattgcccccttcccccctgccaaaataaaaaacaaaaagttagaagtatcttctagaagtgaaattgctatgctgaaattaccaaaatatgaatatcttttgacaagataaactgaaattgttactgacaaattattccagaaaacatgtatcttcacattctgatggaacaagtgcaatctgttttgtgcgtacaaaatttcctcacatatatatcattgtcttggttatctcagacaaaatttagcatacgtcttccacattgctgcatcgctaaagaatccccttgcttttcacccggaaaattatgtttggttgatttgttcatttagctaaatgtggaaatattaagttaaggaggtctactatttatttttttcctcaatgtttcacatatgcaaggataatgatttagtcatactatttgttcgtcacaactgaagagattactagtggttctgtaaaagaagtgtccattggtgaagcagcaatatgcataatgcaatattcttgtttgtgttattgaatatttcaccttctaatactcttgtgactgtcaaattttcaggagct

SEQ ID NO: 25177 - DNA, 981 bp, Glycine max
  Intron number 2 from transcript Glyma14g08660.1 (locus Gly ma14g08660) derived from phytozome v7.0 (chr-ID Gm14; pos 6671935 to 6672915)
cccttcacaacctatcgctttccctccccgtaagctattctttccgttcctcttaagattctgtcatggtgttttattttccttattcagtttgttgaatttttttcttcttctttgttcctttgaaaattgtactttatgtagaggctaatttgatagcagaaactcttatccaagaaataagaaaataagtttatatacatagcacaatcggagatataaggttgagtctgtgtggttgaggtcgcaagttcgaatgctcccaattgacattgctaacaaaactaacaataggaaattttcgtagtctagcttttatttaaggtagttatgtgaaagagtttaatgaatggctatacatggccggtgtaaaaacttctcttcttttttttggtgagcttaaaaaaaacttctatactatcaatcaattaatcagaaatcaacattgtttgatatgacttttaagataaacttttcctagtcagaatctcaactgtataatttaaaatggatggttaattaagattaaaactaattacaacaatctttagcatccaagtatggatatctgatcaagatttactcccttcacttctaatgcatccactatccacatctttggttgcacatattgtgctctgcgacgtgtccatctgaagctttgtgggcttgcttctgtgtcattttcttgtcttgaagtgaatttgaagggcaacttggatcaaggacattgatccaaacacacactaaatgtataagatcaagtgttatttaacgatagttgttgcgttgatgacaatggacaatttgttatttcttacgtgttttttgttgtagccttaacttttattactaacataaacatctttcctctatagctagtgatgtcttaaaagttgaagatattttcctgctgttgtttatgtttatttgttctactcttaagttcagttggcaaaatttgaggattgtcctgctgtt

SEQ ID NO: 25178 - DNA, 915 bp, Glycine max
  Intron number 2 from transcript Glyma13g02760.1 (locus Gly ma13g02760) derived from phytozome v7.0 (chr-ID Gm13; pos 2728213 to 2729127)
ttttcattggtgggattccagcccagaatagagctgtaagtatggatgtcattatatttccacttaagttttaaatggaaaaactgcttcttttttgtttcctattgttgatcatatacaaatcattgtgaagtaccatgctgcttttatgagggtcattcgcttatctgtctcctggacattcatttagattttctgattttcatatattattctattcaagtattgatttaattatcaacctagcctgtgtctggttatgtcgatctctggaatgctgtgatccatgtagcccacctcacctaattgaataagacttttgttgttatttgtttgtttgtgcgtgtatgactggtttatgtggtggggtgggtgggtgggggatcagaagtaattctctgagccgtttagcatttataatttttgctcatttgcagggtacagtttcgatattgattatctttctcgctgttgagattaaagaacataactgaaaatctgtgtatttctctttttattcattgactcagactgtgtgtgtatagatacaaaaagataagctagtaaaatggaaaagattaatcaaaatctaatctaaatattagagatataatcctactagataagataaaagtttcctactttccttgaaataagcaatcatatctcttaatctctaccatattttaaacagaatcatatcttatcatatctcctaagtctctatcatatcttaacactctcctctactttatagaatgaaacttttcgtttctaaattctaattggcatggattttagacagatgcattgcttcttctttagttgatatcataactgaaatgtgcctcattgtgccatgttctagctggatggatgtaaaatctggtgattgttctgtgtaggtggaaggtg

SEQ ID NO: 25179 - DNA, 518 bp, Glycine max
  Intron number 1 from transcript Glyma15g11960.1 (locus Gly ma15g11960) derived from phytozome v7.0 (chr-ID Gm15; pos 8858495 to 8859012)
caggtttgtgaactgttctctttccttttgtttctttttcctgttttatttggtatgagttctataatctgccattcaatttttcttctttcagtaggaaaaagtaacatagtactactttttaatacttttggtacaacacaatgctcttttgtttgcagtaattagttgccatatccactgagaaattggcatgcaaatagcaattttgaaattgtacgatctgcatttaaaatagggaacacgatcatggtcttttggcaattacttttctgatgtgtttgtttccatcctcttattcttcagaactgtggcaattatgtggtcaacattcaataatctgtttgttaaaaccactagtcggagaattaatggaaaaaatcaagttcgacattaactagagatgagttaggccaaaatagaagaacaaatttaactcacataatcacattattattgattattcaaactgtttatgcagggaacaaaataacttagtctctattatgcagggaacc

SEQ ID NO: 25180 - DNA, 518 bp, Glycine max
  Intron number 2 from transcript Glyma13g23890.2 (locus Gly ma13g23890) derived from phytozome v7.0 (chr-ID Gm13; pos 27206623 to 27207140)
cggagaagaagaagcaccgcctcagttccgaacaggttggccagtagcttcaaatttgaatgaattgctatttgttgttgttgtcagactcatcaccaatttgaatataagaagttgttgccatgaatagcttgaaatttgaatgaattgctttgactttggcttttaaacttaatataatatgtggaaagaaaaaaggtggttggctttaaagagaaaacctattttgtagctatgaagagattgaatctgaaaccatttcttactattagtagtaaatcaagacaactttgcttgatttgaatacttggtgttgttattaatttacggattactatatattgtataatgcttttactttactttgttttttagattaatatatattgttgcatccaaagattaagatatgagaaaagtgtgtgatagcttgccatcaacatttccatgtgctgtgacactctttatgtggttgatggttaggtccatctgttggagaagaacttcgaggaagagaa

SEQ ID NO: 25181 - DNA, 423 bp, Glycine max
  Intron number 2 from transcript Glyma15g14930.1 (locus Gly ma15g14930) derived from phytozome v7.0 (chr-ID Gm15; pos 11378387 to 11378809 reverse strand)
caggtggaattcttaacaactctggccaaatttttgtaagtttttgctttgactaatgtttggttaagttctatgtacaatatttgggagtattaaacttcaaatttcaattttgaaccatacaaaacaggcttatccttactccttgtcctatgtcacactccttagttagaacaattgcttatgatataatttagaatttaattagaatatactttttactgtgtgattcaatcatacactattatacatgataagattattaaattttgtaatgattactttgaaaatcatatttaagctcgtttctaattggttggatggtatgaaaaataaactcataatttgtgtaccattaatatgtaaaatagtgatgataggcagaatcttcatgtcaataacaggggggacgaatcaacttcg

SEQ ID NO: 25182 - DNA, 419 bp, Glycine max
  Intron number 3 from transcript Glyma16g23260.1 (locus Gly ma16g23260) derived from phytozome v7.0 (chr-ID Gm16; pos 26993967 to 26994385 reverse strand)
ctagtcaatatatcttcaaattttctacaggtatgcttttgatgtgaaaaatatttgaatccaagatagaaaaaaatatcaatgtcatgtgcagttcaactatattatcagttaatgcattttaataatcaatcttaactcattgaaaggtccgatcctgcattttgttggcaaaatattttttaagagaaacaataattagtacaacctaggatttaaaattgaagaagctataagttttttgctgtataatgacagcattaaagtttgaatctagaacctcatgaaaaaagaagcttaagtcatcttattatattaacaataacatcccttttattagaaaaggtcacaatttgacggaaatgtcatgaaatttaatggaaggaactatataaatttggagcaagaaagattggagt

SEQ ID NO: 25183 - DNA, 815 bp, Glycine max
  Intron number 2 from transcript Glyma13g06400.1 (locus Gly ma13g06400) derived from phytozome v7.0 (chr-ID Gm13; pos 6647745 to 6648559 reverse strand)
tgattgagcttgtccagagtcgaaggttagtaggttttgtcacttgttgtcaatttatgatttgtgtatttgtgaaatggctggtgaagaaggttggaagcaatttatgagagtgtggacatacatgttagtatgatcaagatgagattgaatggatctattaaaatttgattttacttaaaagaaacaagaaagataataagtttgttgtgttctctttaagtcttaataaatgattagtcccaggtcataatttatttagcataaatttgagtgaagttgaagttctggtccaagaggtataatatccaatgcatcaaccatagttattttgtatccttcttcttctttgtgtgaattttttttatcatacctattatagcattataaacattaataatactctgctcccatcaagataaatctgtccccttcccctattcctgccaatgtatgtaggatattttaagaaatgacatatctcttaatagtcggattcagggaaagaatagggatattttaagctatttccattacaatcagagatactgaccactttgctcttttctattacatgattttcacattgcaaaattatttctaccagttgcttgctttttggttcatatataattgataaggtttccttttgtatcatgataacggcggctgtaactttcaaaggcatgaatacctttcttccatggtttctgtctgatggaattttatatttgaaactgcagttcacttggttaactgtatgaatttatttgttgatttttctcgcaggtatatctccattgctgaaattatag

SEQ ID NO: 25184 - DNA, 667 bp, Glycine max
  Intron number 1 from transcript Glyma13g17570.2 (locus Gly ma13g17570) derived from phytozome v7.0 (chr-ID Gm13; pos 21334578 to 21335244 reverse strand)
ctcctgggccctctccgcctctcagaaccccaaaggtacctattctacacaaacactcctccctttcgtctaaaataatctactgtcccaacttaaatataaataaaattaacaacaataaaaaaaaatcattcaaaatagaatcttcattaattatctccgctctttgtttatattaatttttttagtatatttttcactaaaatttatttcttataaaaaagatggaatgaagtattaaataagctaaaaataattaaaatttatttatatttaaatcaagagaaagattatttgaaacaaaattagataaaaattaaaaattaatttattaaattataagaattcggtaaaattaactgaaaaaaataaaataataaaattataatttattttaaaaaaataattaagaaattaattaaatatattaaagataaaatagaaaaatacatataaagaataaaaattagaaattaataaattcaagtaacattaaacaaaaaggtgaaaactattaaaatttatttatttattaaatattcaaagaaactttttgattaataaaaaaaaataaaaaatcttagcatagtaaagtatataaacggagaatgagtcttgattgtgtttggcagggaagcataacagtacggggaatctgagttcggat

SEQ ID NO: 25185 - DNA, 1020 bp, Glycine max
  Intron number 1 from transcript Glyma15g18120.1 (locus Gly ma15g18120) derived from phytozome v7.0 (chr-ID Gm15; pos 14659634 to 14660653 reverse strand)
agatccagagatcgtttcaccttggatcatctcaggtttgcgttccgaattgcgtaaatgccacctaaattgaacacaaattgaattaaagacaaaatctgcatttctctttcggccgatcgatgattcaattatgcgtctctgtttctgttcccgagacctgtagtgtgtcaattttgtttgtagttgtctctgtttgtggttgaatgcttgaattgaagtgaagggtttcgcttttgaactttctgctgttccttacttaccggactattttgtctgttgatttggattataatagttgcaacgtataattcgatttagtgcataacaccagagatcgagcgagcgagagggactgagaagagtaaaaaatgttccattggttttggtaactagatatgtaattggactggttttgttttcagaggagtgatagtaacacactctgttgtaggttaaaattgattggaaactacaaatcatgagtgggtttattaaataaggagtgagtcctacacagttttgtgattcacaatgaattttagctaataataaagagtgtgtttaaaagtgagttcttattttcaatgatgaaaatgcacggagctgtatgttccatagggtatcatttagagcattagtttctttgctgcaacaaatccctggccgtgtctccaacttgccagatgacaaacatgttccccctggtaaaatatatgtattacaaagacaaagattaggcttcactcttagaggcatttgttatttaggttgtcagcattttatcagggaactgggagaggggatagaggatacgaatcttgttgctaatgctaacccggttgtgatttctttaatgttgaattgaagttcattttgtagatatatatgctcaatgataatataaaaaatgattgggtaaactttactgattatttattttgtttatttattaagtgttgtcctgctgccttatggtgcttaggtacttaactgatcaattggcgaaagttcaaatag

SEQ ID NO: 25186 - DNA, 1070 bp, Glycine max
  Intron number 1 from transcript Glyma16g32260.1 (locus Gly ma16g32260) derived from phytozome v7.0 (chr-ID Gm16; pos 35423888 to 35424957 reverse strand)
gcttcgctttcttttttcagctctgcggtttctatgtgagtagttcctaaacgaatcgtttttgccactgaacggttcattcaagggttttcaattttttttaacctactcatccatcttgaactgaaccctttaatttatatgttttaattaaattcctatttagagttgtaatttgtttgctttccttttaatcttttttgtttctttctttcaatttttgctgtgttgggtttaaggttttcgttttccgttgtttggggatgcgagatgggagtttctggtttttgggtattctgaattcgaaaaatgctaattcttacgaataaatcttcgtcaaaaatcgcaccagcgtggttcctgccaaatctgatcctttctttttctttttttttttattaatacttgttatttttttagaatgtcatgattccacgtcacttttcgcgtttttcgtgcgttttttcgttggtaacaaaccgcaatgcccttttgaattttggtgcaatttgggttattttttctctctttccatgcggtttcttttttaggtcttgctatttgatttttgggttttgggttttgggtttttgaacgtgtgaattgagagctttggattttgtttttgtttttctctgattttgtattatccatcttttcatggagaccactgtcctaatgttaattagaatttgatttgggttctgatttactttatgcatcctcattgtttgtcattggcatgcactatattacaatcttaccttacttttctctttgaagcaaattccactctttagaggaggtaaagccgttagaattaggtttcggttcatgaaattgttggattgggattttctttcctggaaaagggtattgggaaattattccatttgtggctgcttttttttttaaaaaaaaaatgatgctattcaagagtttatttggtcatttaattttattagttttagctggattttaagaattttccttgtgctgatgaatatgtgtatgtctttttttctttgttgttagatctatatcggcaattgtccagtgttgagaagaaa

SEQ ID NO: 25187 - DNA, 715 bp, Glycine max
  Intron number 2 from transcript Glyma13g18690.1 (locus Gly ma13g18690) derived from phytozome v7.0 (chr-ID Gm13; pos 22355732 to 22356446)
tacaaactggagaggaggtagctgttaagctggtatgttaaattctcttcaagcttttgtttctttttctgtctggattggccacaaattttttaattatggaaatctttcatgaatttatagagatcgcttgatttatttattttctttttctggtggttctgattgtatttctactatataccatattatcttaaatatatataatgatgttgatcaccttgttttaatctggtttcttgtgctttctaaactatatatcgggctctttgaagtcttttgttattctatgcggaagacattgtcactttgtatgtgatgtgtcctaaaaattttgttagtactacgggagttccaacaaccaaccgtgatacatagaatttgacatgagacatgatttatggataaagtaaataacaaaagaaatgtcatgtcttgcttttgagtgttaacttttgaacaataagtggatgatctgttcttatgatggattgaagtgacatatggaatgtcattatgttttctttgtaagattgtcttgtagctgctggatactcactttggttcatatttttacaacacatatttttttttgttaacagttaattgtattaactactcatgatattctgcatttcaagttcctaacaatcccatcttgttctgtcaaaaaattccaggaacctgtgaagaccaggcatccacagcttcacta

SEQ ID NO: 25188 - DNA, 798 bp, Glycine max
  Intron number 3 from transcript Glyma13g30470.1 (locus Gly ma13g30470) derived from phytozome v7.0 (chr-ID Gm13; pos 33105691 to 33106488 reverse strand)
ggccatatgtaatcaacgcaatatcttcggcattttatttttatttataaaaatcataaagcatataaccattagataaacatatttaaataataaacacattatatatatatatatatatatatatatatatatatatatatatatatatatatatatatatatatatgtgtgtgtgtgtgtgtgtgtgtgtggggggggggggaagaagcaacattattataattgttggttggaaaaagtgtaaaaaaaaaaacccttgtacccataagaaaaatggatttttaagattttgaaacctgaattaagaaatatcataaatggatttcggccctctctgcccaaaagttttaattgttatcatcttggttaattgtttcatcacctattatctcctaaattactgaatcaaatattaatttcacttgtgatatgtgattatcattcatcaaagatattttacataaaataaaaattgaatacaaatcttccattaaataaatcatcttctttatttatgtgaatgtaatgagattttataccagtacactaatcttttatttttttaaagtaaattctaatttttcttgtctaaaattgaatatcttatcacattaatttgatgataaatttttttgaattagtggtaacatatgtcatccgaagatttatctttttgttttataatccctgactattttttttctttctattttagctttgaagaatgctcaaagccttttgtacttttttttcattacaggaattgattggtctaggggctcgcacgctcattgt

SEQ ID NO: 25189 - DNA, 594 bp, Glycine max
  Intron number 2 from transcript Glyma17g01000.1 (locus Gly ma17g01000) derived from phytozome v7.0 (chr-ID Gm17; pos 562594 to 563187 reverse strand)
ttctctgtgccctcttcatcgtcttaactactcaggtttcggttactctgcttcaaattttacatctttcttgtctttttggccttgcaatatttttttaactttttttttttggtatttatgactaaaaaaatatacgaggtgaggcttttagaaagtgtttgtttgtttatatttattatttatttcttaacggaactttttaaaagatgattattttttcttgaggaaaagcgcttgccaaacagttaatttgtgcttggacaaagatttttgggagatggggttgctaggaaataaataattctgcatgtatatataaaaatcaaaatgaagcctagctttgagatttgcgaagattgaaggttctctcatgctatgctttctttttttaatattaaaataaaacccgtttcgtctggattatgttttattgtttgttatccttacatatatttaatttatttattctgaaagacaaaaaagctggaagattagttgaatttgcaatataatattttttttcttcggagcatatattctgatgaacaatctgtttactagaacttatcattcaaaattattgagttgcag

SEQ ID NO: 25190 - DNA, 601 bp, Glycine max
  Intron number 2 from transcript Glyma16g33080.1 (locus Gly ma16g33080) derived from phytozome v7.0 (chr-ID Gm16; pos 36141092 to 36141692 reverse strand)
acaagtttgttattggccaacaaagagccaagaaggtatccttttttcctgaattttgtttgttgtgcctagttcggcttgctgatgtgcagttaagtgtcagcctgtggtttgtttaggatgcaaaatgaggaataaaaggaaattagtgaaaatgtatgtgtcttttctagattcattgttttaattttgaatttgattcctctggttttcttccactctttgtatatccaaaacaattagacttgccaatattacaagtcactgcaaatgcattgttttgattgtaccttgttaatggtttatttttctgtgcttagttcggcttgctgatgtgcagttaagtgtcagcctgtggtttgtttaggatgcaaaatgaggaataaaaggaaattagtgaaaatgtatgtgtcttttctagattcattgtttagttttgaatttgattcctctggttttcttccactctttgtatatccaaaacaattggacttgccaatattactagtcactgcaaatgcattgttttgactgtacctcgttaatggtttatttttctgttgaaggtgctctctgtagctgtttataaccactataaaag

SEQ ID NO: 25191 - DNA, 1055 bp, Glycine max
  Intron number 1 from transcript Glyma14g07360.1 (locus Gly ma14g07360) derived from phytozome v7.0 (chr-ID Gm14; pos 5587264 to 5588318)
taccgcgccggcatcgtccccgtctcttaccgcaggtcaagttctaacctttcatcgcttctctcttttctgtttcactctccaagcttcacacttttcttttttagtttgaaaaatattaacactttcttttgttttttcccaccttctgtgttattttctactcttttgaacatattctcatatagtattatttataattgatttcatcacaaatgtaaacagtatatatatatatatatatatatatatatatatatatatatatataatatgatttttttttgtaaatatatattactatgtaaagtttttatactattaattaattaaaaaatgtcagtgctacaattcttaagataattaatatattaattaatttatcatcagtgaaagtttgtagttttacacaattgtagtagttttacttttacactattgttatttcatataaaagcatttgaggagtgaaaataatttatactgtatttcaattaaattcataagtttaaaaattgtatgtgatggatatatttgtttttcttcatgagtaatgatctgaaaataaatgattgagaatataatgatttaaaaaacataaaataaattgaaatattgtaaaaattaaagaatggaagattttgatgttttgtttttgttatttttatagttgttattgaagaaaaaaaaatatagacaaactcgcttgattggcttttgggcatgtcgaaaagattcgtaattcggaaaaagtgaaaacttatcataaccgttgatggttcatttgagttgagtaaatcgttttggtgggtcccatctagaaagagtgaacctgaaccgttcatctgaaaccggttcaggattttgacaaaggtgcaccttttggcgcgtaattgcacgactctggaaaccaaccaaaattcagattcatctttttattatttcgcgttgaaactctatttgtcctcatggttgtgtttaattacgaatagtgcccttggtgagcgtgattgggtgcggtgatgtgcagggtgccttgccgtaagcagggaggg

SEQ ID NO: 25192 - DNA, 434 bp, Glycine max
  Intron number 1 from transcript Glyma13g06950.1 (locus Gly ma13g06950) derived from phytozome v7.0 (chr-ID Gm13; pos 7116038 to 7116471)
gaggactttgccttccttaaagaaggaagaaagtatgcagatgatctcattttgtttatttgtttacatatttgatgtttggattaaatattcttttggtcttaaaaatatctcatttttttttggtgaacccggatatcccttggcataatagatgttatttttagttcctttgaaaaaattgtttatttttattttctgctttttacaaaatgatgtggttttagtctctcaccaagtattaaaaacattttaatgagggactaaaattaaaactacatcattttgttatatgtaaggacaagaaatgaataaagtttttatagaaactaaaacaaaattctgatatttttaattttaaggatttaaaacatatttaaacctttatttttcatgaagttgttgttaaaaggtatttttttgtgtctgtccta

SEQ ID NO: 25193 - DNA, 569 bp, Glycine max
  Intron number 1 from transcript Glyma16g17520.1 (locus Gly ma16g17520) derived from phytozome v7.0 (chr-ID Gm16; pos 19036030 to 19036598)
gaggaggagtcacgtgctcaataaattttttcaaggttagtttcgtttgctcattctttgttttttggtttatttcttctgtgtaggttggtaggttttaaattgctgtcgcggtagattttaaaatagagggaaaatggtgcatttgtgatgtgaagtcgatagagagattgaattgttggatatttgaaggattaaatcaacaaaattgatgaaaaatgcattatggggtgaaaattgggtgttactcctttattctactctcttgtttgttcatgcttgcattgtaggttgtttatagtgatatattgtttctctctgtttcaaaacagtgtaatatttgttgatttcaccttgtggtgattgttgaacggtttctggttgaactttatttatatgtgttgggtgctgtgattttcattaaattggactttacttactatgatatgtgaatttgtgatgatagcgaaacaattgtgtgtagcagctgtccattttgttgaacttgttttgtgggtttgattgcttatgcaggtaatcctaagcgtgtattgcagtggttttcctgc

SEQ ID NO: 25194 - DNA, 741 bp, Glycine max
  Intron number 1 from transcript Glyma13g41360.1 (locus Gly ma13g41360) derived from phytozome v7.0 (chr-ID Gm13; pos 41670897 to 41671637)
tcaataaagaggtagttactatgtttaacgcttattagtattattatttctctctcaatagtgtgtggatttctatgggtcagttatcaaaatgttaaggttatttgacaattgttggtggggttattccgttagagttaagttatcgaaagcaagtatttttaccatgttatctggggaaagaaaacatagatattgattatgatttgggggatttttttatgattagggggtttatccttttgttaggattttaatcgttttaaattgcagccagccatattaccccaattcttctttattgtatgtttctctttggattgattgaggtcgtgttttattgtttatcattgtctctgaatcaagtttttgcaaaattgtcccatcaatattcattggttctgcaaaatctaactaaaactttgacttatctccgatggaaaggtatagtaccagtactctttatctacaaaagacacaaatcagaaaccagaaaagaaaaaaacaaatgtaaacttgatcacgaggacaaaattgtaaaagattgctgtatgcactatgctgaaagtgcttcaatgatgtaactgttctgttttggattgtgtgttagtgatctcacattcacttttactatatttccaattaatgtataaataattaactatcagaacattggaatctgtggtgcttacttatgtattttaaagtttcttttcacaggataaggcacaggagaagttt

SEQ ID NO: 25195 - DNA, 716 bp, Glycine max
  Intron number 4 from transcript Glyma13g18090.1 (locus Gly ma13g18090) derived from phytozome v7.0 (chr-ID Gm13; pos 21751005 to 21751720 reverse strand)
tctcaaaatcttcaattatcaggtagttaattctgcacagttccttctgtggagattgtttatatatttttatgtatttgggcatatactagtctattatgtgattataatactttgctataacaataaaaacaaagatatttttccatgactgaatatctattgggagagatcaatctcttaaatgaaccttggtatctcgagagattagtttctaacccttgattgggataccttgcgttcgaccccccaaaaatatattaatgattcagtattgttagtcaagaagatagttctagtcagagactctgagggggataacctgtgtgagaagtttagcagcaactttgacaatcatcttgaaccttcactttgtccggctttatgcatttagtcttttttgttctcatctgcctgatatatgcaaccaactttacatgaagattgtggcaagacctcatgtttaccatgcactgttaattcataatcgaaacgttatcaatcaaatatcaattgaattataagaattatattttttaagtttaaataaatcaaagacaaaattgaacaaagtatcatgctattgtgatatttcatattataacagtattgctaatatttcttcatattgacattttttagtttccatattctttggttattcatggtcatggctgcttgtatggtaggtgcactgattgtttcaactcctcaag

SEQ ID NO: 25196 - DNA, 488 bp, Glycine max
  Intron number 2 from transcript Glyma13g18090.1 (locus Gly ma13g18090) derived from phytozome v7.0 (chr-ID Gm13; pos 21752106 to 21752593 reverse strand)
aacatcaatacaaagcctgaagtcactcgtatatccttttctttcttttgatggaaacattcatcttaagtgccatcggataacttcatgtatgtagctattaatatcaatcaaagtttgctttctaggcccctgtttgaataaatttctccacaagtatttgtgagagaagaaagtaagaaggaaaaattaaatgaaattatgcatatgttaatctgtaggggctctttcgtatttgcttgtctaaaagctgattttaacttatcaaagaagtttatttcattttttccttcttattttctcatctcataagtgcttatggagaaatttatccaaacagaaaccctactttccgcattccaccaatggtggtcataatgtcaaagcaatatgacttatatattaagcttagttttgcggctaatgcttccagcttccattacagttaatgctaatatcttgctgttgatttgctttcagataagaaa

SEQ ID NO: 25197 - DNA, 379 bp, Glycine max
  Intron number 2 from transcript Glyma15g19210.1 (locus Gly ma15g19210) derived from phytozome v7.0 (chr-ID Gm15; pos 16360623 to 16361001)
tttccacagtaacgaaacttcaagaacataagaaggtacttgactcttgaacctccatttagtatttaacacaccaaaattatatttaaagttctttcatagttcatttttagcataatgattaaatcaaaattgatatctgacttaataattgactaatggtttaacaattattgattacagtcatagagttttataatgtaactatatgctagaataacggaataagtgttttttgaaaaagcattctcttccctagtttcctaggaaatgctagaatttgtgagcctccgcatcatgttaatatttttttgtagtagttaaattaaagcttttgacaacaggttatcactggcatcgcaattcctgttggatccga

SEQ ID NO: 25198 - DNA, 698 bp, Glycine max
  Intron number 1 from transcript Glyma14g17190.1 (locus Gly ma14g17190) derived from phytozome v7.0 (chr-ID Gm14; pos 18818435 to 18819132)
gacgcttccaacaagaccatcgtcgtcgaacactggtgcgtgcgtctctttttccactttcttctttgaaaaaccaaaataaaaaaataatactaacaaactgtttcttttgtctttttgactccgtgtactctgtttgtgttttttttttttaatttttttttactttaatgcctgaaataactttgttaagattttatttaccgaatgtctttgaaaaaaaaataacaatgacctagccacaacccaaaaacctcgggtgtttattttattttattttactttcacttgatcggtctggtgtttgagccctaatttatctgatttgaatagatttgtctagtgttgaaaatatttgctctctgctacaaaagaaatgacttatatatacagtaatttccggggattaaatgaaaaaaaagaaagagaaaaaaattaggatgcaagaaaatgtttgttatgatatgtagttaattatctttttttttttcaatttcattttatgtaatattgttgaacacttgttaagaggtcaataaatatttgttgttgctgttgttacttggttcgtttgctaagcttaaaggttttgccctatttattcgttgatgaaactattattattgttgttgttgttgatgttttctgtcttattatatattggatgtgttaatttgtttttttttcctcagcaagca

SEQ ID NO: 25199 - DNA, 663 bp, Glycine max
  Intron number 1 from transcript Glyma14g33790.1 (locus Gly ma14g33790) derived from phytozome v7.0 (chr-ID Gm14; pos 41985817 to 41986479 reverse strand)
accttctctcctccctcgactcatcccacccccaggtcaacaccactttcttctctagtctccacactcttcactttcccaacaattctataagctcaaattattatcttagtctcataccatcttagtactcagtgttgtggcttacgagcctaactcaacttaatacaaaaccgttttctaaaatagtccacggctgtgatttcggctgcaatatcaacatttttaagaacttcgcaactgcaacatgacaagtaaccgtgacttcgtccgtcgtatttgtctgcaattttctaccatgttaaaatttgagacgaactttgattcaacatattaatcaaggtttaaaattgcggtgtcatgattgttggagaacaaatgcggtggatgcagctgcaatagttgtcgcgaaaacaggggtggccgaatgttttttttttatatataatcctcaggaatactagggaattttaaaaattcagacacaatgctcaaccatctgaattaagcttccttggtttttcggaattttgaaattaatatgattgtgtagaccaaggtgcatgacatatgtggttgtgtccagagttaaatttctgaaggttgttttatgtggtgttttttacaggtagtgagggctatatcagggtgcagaagggaggc

SEQ ID NO: 25200 - DNA, 638 bp, Glycine max
  Intron number 3 from transcript Glyma15g01150.1 (locus Gly ma15g01150) derived from phytozome v7.0 (chr-ID Gm15; pos 695643 to 696280)
aagaactcctagttgcttgccataagtgagtatactgttctgccattatatgtgatctatgtatgtataccttacccgagagcattctgtgaatatttgattctgaactagtgaaggaagattgaactttggttgctagggatgtagcagacaaggaaatggggcagatgaacctgtatacctgaatcattatcatttatcagtaaaagctaaaaagtaaaaactatgataggctttgcataatttgacttttgtattttttttagtccaaaaagtgagaacaaattggataacattagttactaggatattttaagacaatgtcatcattaatggaaaaattgtaaatgaaacttagaagtggaagctaaccactgacatgcaaacttgttacatgaattttagcagtttagaagttttagttgataaaagtttctctaaattttctgtttttcttcatcaccaactattgttcattcatattcctttgttttagaaaatgctctgtctcatctttatgagatgatgcaggttttcttttttcttttttccttttttgggtacatgctggtataatgttttacttgtacattttatctctatcaggtcagtttacattgtatacacagtacttgggg

SEQ ID NO: 25201 - DNA, 986 bp, Glycine max
  Intron number 1 from transcript Glyma16g17640.2 (locus Gly ma16g17640) derived from phytozome v7.0 (chr-ID Gm16; pos 19197228 to 19198213)
cttgcattaactgattgatttactccaaaatttaggtaatgtaatcatgtctgtgtgcttttgctacttccttatcctttctctttcttcttcctccctgtcactgtttttgtttttgtttttgtcaaatttgttttcgctaaataaaacctagaatcctctatgtttctttctttctcccaacttggacttactctttccgtttctgtctcgctttgttttcgtgagtaacagttggaaactcgtgttcaacacactatcattgttcgtaacagtgtttgtttgcttactctttaaccctcataagtagtgagatttctgtttcgattttgtacttgttaaatttgctattgttgtcgggagagtggcagaaagaataacaaaccggttcactgattttagtttcaaatattgagatttctttatatccaattagtgcttgttttggtaatatgggatagtagatatatgatgaatatccaagaaagataaagtttggctaattgggttagatgagggtgctattcaagtaaattgaagccttttttttttttttttacaattgatgtcattcacttgtaatgttctatacattccccaataattactggttcttcttgctatttgttaacctgttcaaacaatatgttgctatgctatgctgttttgtagtgacacaccatagttttgagaaaccgttgatatatgtttaaggctcttaaagtctaaaaggcaagttctagtttgttgggtagtttattagaaacacaatgctgatgattataatacagtctaatgacattttgtttggtgactgtggctagcttgctgtgtttaatatctaaagattacttctccattcgtgcatgctgctcaccactatgctgaagtgatgataaatgtttgatcatggtttgctagtttactacaggtttaaacaaacattttttttgtttttgagatttttcttattttctcaggttcta

SEQ ID NO: 25202 - DNA, 765 bp, Glycine max
  Intron number 1 from transcript Glyma13g06170.1 (locus Gly ma13g06170) derived from phytozome v7.0 (chr-ID Gm13; pos 6468109 to 6468873 reverse strand)
gtggtaagagtatcatactttactatatgtacacttgtttgactctatttactctttataactcctcagagcgtaaaatttactacttcgattcttatttataagatataattatctaattcatcatgataagacataattatctaattcatcacgatgaaagtgattaatttgtccaaaactaccattggaattaattctcttctatcacttctaaatgtttgtcaatacaactctcttcttttaattagggataatttattctgtaaaggatattattgacttattcttataaaatagaagaaacactattttttatttggatcttataaataggaataggtagtacaaaccaattgactcttagtaacaaataaaataaaagtcatatgaatagtgtgctttttgattggttgatagtgttggaagattgtcttaattgtgatcaccttttgttgtggtctctttggaggctgctggaattggggccactagagtggtggtttagttctacatctactagaaatatgatcaaaataaaatatataagtgagtgtcaattcctattttagaagcagtttttgaatattgagttaaatcttaatccaaattttaagagataatgtaagtttttgtttttacactgacaccgtatgtatcattaaactccaataaataaccataaatttgttgtatattagtatttattttgtgttgttttcaattgcaggattaagaataactactaaaaggacaattcagata

SEQ ID NO: 25203 - DNA, 667 bp, Glycine max
  Intron number 3 from transcript Glyma13g26640.2 (locus Gly ma13g26640) derived from phytozome v7.0 (chr-ID Gm13; pos 29806424 to 29807090)
cttcgcttctcccgagtataattactctctcaccggtaccatttttcttttactttattagggtcttgtgtttttctgttaatggatcatttcgttttattagtttgatgttggctattattagtccctagcttgaaattatatgtttgccattgatgggtttattttggtttggattttttactacatacattctttcttagataaattgtctctgtcctgatcttattaaatctgttttgttctttttttaaaaccgtcatagttatttacgtattttgaagagagagagagaaaaaacaaacttttagtacttttttctcatgagataaaaaaaaaaaaagtttctgaacaaaataatgttataacatgaaattaacatttgttttaatttaaataaagggattgatgaattcataatcgagatctcaagcccaataattttgttttgtatttgataaagaaaaatgctagcgatacagtctactattatctgaaaaatattagaaatcataaaattttgtggagattacttcttatttaataaacccttaaaaggaaggttagtagattacattgcaaatcagatcatcatagatagttttagactactaataaatcataaaatttgtaataattcatttcttggtgatagctccactgaaga

SEQ ID NO: 25204 - DNA, 418 bp, Glycine max
  Intron number 4 from transcript Glyma15g42640.1 (locus Gly ma15g42640) derived from phytozome v7.0 (chr-ID Gm15; pos 50073664 to 50074081)
gggtaggttttgtttatcaagaaacaatttgtttttaaatttttttaggtaaacatctgacttatttcctggtaaacattttcaatttcttatatcttttctggttaaaagggatcaaatattcacattcccgcattgttttaaatttcaagtctttcccatatgcttagcaaacttccctttttccttcttgtatgaggatattgtaatcatttcccaagtggggggagattaaaaataattgtttgaattggatgaggaagagtttattttatataatgttgctcttacatatgcaatcacttattcctaagtgagttatttgtctgaaataattctttctattttccttttgtactgtcttttttctccatgttctccagcttgcaaagaagctccatccagacacaaacaaaga

SEQ ID NO: 25205 - DNA, 303 bp, Glycine max
  Intron number 3 from transcript Glyma13g17200.1 (locus Gly ma13g17200) derived from phytozome v7.0 (chr-ID Gm13; pos 20993088 to 20993390)
ccgcagtgtgtgagtgttaatagacattttattttcatttttttaaattagtaacttcaactgttctttgtttattttgatttagtcttctttttttttccagtttagctgccttaggtgacttgttgacttcattgtctctaagataatccttagcttgaaatatttttaattttatctgttggtctctgtgttttatagtaagtgtattcaattctttttgtcccggggttgttaacttacccttttgctttgtatgtttcattttaaatatctaatcactattacggcgtatatgcagtt

SEQ ID NO: 25206 - DNA, 770 bp, Glycine max
  Intron number 1 from transcript Glyma16g25460.1 (locus Gly ma16g25460) derived from phytozome v7.0 (chr-ID Gm16; pos 29423281 to 29424050 reverse strand)
ctacgctctctctctctctctctctctctcttcaggtttgtaatgtttacgtttcattgattaattcattcctcactacacagtacgcacactcttcctttctctctttttctcattctctggatccgattcaggaatattattatttttaatttcccctgtttgcaaaaaattaagaattgtttgcgtcgtcagatttgaaagtgcttcaattgaaatttattttcatttttattttagtctattttattcccattcgtttcgtaaagtcaacgctgccgggagaagcgtgaaaatagggtgttgatcccagttctcacgtttagttgtgtaaatggatccgtttcagaagagaggaaacaaacaaaattaggttcaaaacgttgacattcttcgtgtatgtacctaataacgtgttggactcgatgaataataggtgtctgttttttcaattttgtctttgttcgagtagatcagtcctttacttatattttatgttgtttagacagttttgtgcataaaaattgttaggtgtgttactgtgttttggtttgattccaaatagggtgatgtgcatgtgattgagtacagtacaggtggaattattcgttcaacttatggaattgttgcaaagttctgattattttcttcttatgtttcaacttttacgattttgtgatgttgttgtggttgttaggtttgaagagcaaaactaatcttacttgatgttttgtgctgcaggttgggaattagtgcctttggtggtcacc

SEQ ID NO: 25207 - DNA, 672 bp, Glycine max
  Intron number 2 from transcript Glyma16g34420.1 (locus Gly ma16g34420) derived from phytozome v7.0 (chr-ID Gm16; pos 37095052 to 37095723 reverse strand)
tgaattcaaaagcttcgggtatattcaatcctgaggtatcttccttcctgaaataaattatccttttttctttcttaagaagctaatgctactatatgttgaagttgccttagattacactttatgtggcaaggttcttaaatttgtgtgtatcatgctcaagaattttattctacatgtgtatatttctgctatagagtttaattataagaatcacttatgatttgatatgatgattctgtaatgatgcctaggtcattatttgaactatactacagctactcaaacaaccaatggtttctatatttataaataacttatgttattcttattgtggattactttgatgtttatatagtcttttgtttttgttattttcataaagtattttttcagtatcaagcaattaaatgtaatgagatttgggttactggtgttggacccgaaatagggttacatgtcatcatgtgagccgtgtatatgtataaaaaaaaatgtcacaattcttgttatatatagtcttttttttgttatgtaggcaataagtttcaattttttaaatgtattttttcaatttgtagacattttatcttatgaatcagtttgacaatatcaacttctgttactcaacaaatttcaacttcgattattttcagtttcgcaataccctct

SEQ ID NO: 25208 - DNA, 639 bp, Glycine max; identical to SEQ ID NO: 18837
  Intron number 3 from transcript Glyma13g18260.1 (locus Gly ma13g18260) derived from phytozome v7.0 (chr-ID Gm13; pos 21932535 to 21933173)

SEQ ID NO: 25209 - DNA, 792 bp, Glycine max
  Intron number 3 from transcript Glyma13g03520.1 (locus Gly ma13g03520) derived from phytozome v7.0 (chr-ID Gm13; pos 3528321 to 3529112 reverse strand)
gaaacctttatcatcccagttatctaggtaatgaattttatccaacattaatctatctatttattttcaatttgaagttttaatgatcataggctattggttgatcatttctatctataccaacacttatctgttttttatattttttatattgacaaatattagtttagtgttttatttgtaatgtgagtaggagaatttgaattcatgatctctttctcttctcctttcatccttaagtctctcttttcaatcattaagccaattttatatcttctcaatagttaactatgttataatcttatgttatattcttgatgagttggtacagtggttaaacactttacactcacaaatgaggacgatctagtagcgaagaatcccgtgtgcgaaaatcttttaaactaaaaatcatcatagtaccctaagtggaattggtctgtagtccaatagattagaaaatactcgtgacaagataaaaaaaaatttattttaaatatttttgttatccatgtaatatacaacaattattatttttggcccttttgttttttttttaatttttggtttctatttttttttagttactaacatcattaattccttcaatacatttaaaattttaaacttctagctagtattggttttatattatccctttaacgcttttgcttttcaaaatatttcatttccttcgttcaggaaaaaaaatgattgcaaaagaaagaaaagatttaaaaaaatattaacacaacaggtgtttctattgttttattttccagtaaatagtta

SEQ ID NO: 25210 - DNA, 467 bp, Glycine max
  Intron number 1 from transcript Glyma15g12280.1 (locus Gly ma15g12280) derived from phytozome v7.0 (chr-ID Gm15; pos 9086195 to 9086661 reverse strand)
atacaggtcatacaaatacaagccttgttcaattcacttttattctgtgttttgttgaatatttgtaaaaatgattttacaaaatttatttggttcgaattgatattgaagtgaagcaatttatgtttaaatgctcgagttacatccttgattttgaagtaagttagtagtcatatttagtctaaatttttcttatccaacacgtaagttacacaaaattatttcaactcaatcatcaattttgtacttgaaataattcttttgacttttgaccaaacccgtgaatattagtctaaaatcatgtcagttgatgtttcaatgtgattttacattactcattgcaaaaccaaacatgcaccaagtgtttattagagatgttgatgttgtgatcacattgaatgacatttatttttgacaaaattactcgcatataggggtgatttctagggctttgttatacatccgtg

SEQ ID NO: 25211 - DNA, 959 bp, Glycine max
  Intron number 1 from transcript Glyma15g01690.1 (locus Gly ma15g01690) derived from phytozome v7.0 (chr-ID Gm15; pos 1119402 to 1120360 reverse strand)
tctttggatcaaccctccaatttgtttacaatgtgggtcatctcattcttcctcttgtgattctgaaagcaatctccttaatgaaattatttatatactttcttaatcctgtgccacttttttttcttcaatatagtatgaattttagattgtcaataattaaaaattattctaaatatgttttcgaaataattgttgtaaaagcaatattatcatatattataattcataatcagataataataatgtaaaaaatcactacattctaattaaattatttttgtaatgcatttatataacctttaggatagtaaggtgttttttttttttttttttttatcaccattaggatagtaagttatgtctacaaacagttataatgggcaaagcccaatttaaaatcgttcttttctatttatcaattttttaaaaggctttatcaattacttataaaaaataagttagtgaaacaatattacgtatttattattttatttttagctataataaggaaattcattgggaaaataaatatattttaaccttcaaaattaaaaatcaatatgtcggagttcttctgttgatataacttcttaaagaaagcatgcacctgagtgagtccaacatataagaagttgaaaaaacgttgtatatgattatgctcgaaaggacggatgtcttaagaaagcttatgaaacataagatcaaaatcgtgtcattaatccaacaatcaagctatttcgtttttttttttttaatttaatcttggttattacgggaagaaaagggttttcgcataatatgtctgggtaggccaatttcttgatattgccatgcatgcttttagctttatgaaatatgttactatgaagtatgaactgactagtttgcttattgcttcttacgacaatgttgatgctgtaggaacagaccctctcctttgaatttgaggtattgtt

SEQ ID NO: 25212 - DNA, 729 bp, Glycine max
  Intron number 3 from transcript Glyma15g05830.1 (locus Gly ma15g05830) derived from phytozome v7.0 (chr-ID Gm15; pos 4137697 to 4138425 reverse strand)
cgtacttttcaattaaactcgagtaatttgttacagttttctattttttttataattatatccgcaaatctataaaaatagttatttgtaaaataaattaatctaaaacacgcagaaaatcgttttcttgcaaatcgatatcctcatttatgttgcacgatttaaggcatttataatgaaatatgataaaaaaatacaagaacacacaaaaaatagtaatttaaaccatgctgctccctattaacttcaacttcgagagataatttgatttgtacttaatttattaaaattaagaaaaataattaatttaattgataatactaaattatcatagtttttaatgtttttttcttttttatatgcatattattataatctcttttttaatgagaaatatttttaatttaaaaataattaatgcatgagataacctgaattaaatcttatataaaaaaaattaaaaaaattatatcttataaataaaatcaagaagtagtataataaataaaaaaatattctggattggcgttataattaataaataacatacatattacatgagtgatgagaaatcctagccatacatatttttaaatatacttcttttaatgcactattaaattatgagaaaaaatcattaatttcttacgatttctgcatgactgatatgaagacattaatttgtgtgatataggtgggcatacgatagaatatacaagccgaaaggaa

SEQ ID NO: 25213 - DNA, 564 bp, Glycine max
  Intron number 1 from transcript Glyma16g15810.1 (locus Gly ma16g15810) derived from phytozome v7.0 (chr-ID Gm16; pos 16753094 to 16753657 reverse strand)
tatcaggttttgttatgcttcttctgcttcagttttgtcaattactagtcgttctgaactgtaatttgttgttaataactctatttctttagaatttgaattattgctaatgctagattgatgggttctatgaatttcactttgtgtcctttatttcttctgtgtttttcttttacatttaagtatgtgattatttttgcctagtcaatttaggttgagacaaatgtggtagtgttatattgttaggatagtgatgaacaggacctaccagtactatgctggtttgggggaaatgttggaaaaaaaaaataataaatattgaaatttggattgtctagggaaaagggagtaacacattagatgatttcttgtcaatataaccaatttgtgaagcatataatactaaaactttgtagaattgttcgacatgggaagaggttctcgaagtgtttttgtctcactagcataacttttcagttttggaattagttgtcggttttgcaggagagtggtgcctttgtccctttggctgccttgtgatgtaagttttgttcttggtgcaga

SEQ ID NO: 25214 - DNA, 876 bp, Glycine max
  Intron number 1 from transcript Glyma14g09510.2 (locus Gly ma14g09510) derived from phytozome v7.0 (chr-ID Gm14; pos 7610446 to 7611321)
ccttctccggcgccgaagaatttgctaggcaacaggtttgtaaattgtagttgtaattccaacgtgtttttttttaagtaaatggcgtaaaccaaaacaaactttgattttgcatttcttcttattcgccaaccagggtaatgttacaatgtttggaataagaaagttcctattaaaggatatcttaatgacaaatggtattaaacaattaaaagtaatagcattattcttataatcattttttcaaattactccacaattaaaagtagttgtttatttcatctcacaagtcacaaccttctattttctttttatccctctcttttaatttgtgaaaataattgttaaaataatttttttaataataaaatattttttttgaaaatagagtttaattttgatatattattgattatattaaatataattgttaattttttttacatgaattgttaaattaattattaaaaaactaacaaatctattgacattttatgattaaatggtatcctaaattagtaaaatctatttatgttgtatatgcaagttaaaatttaaaaattataacatttggcattcaaagtggtttttcagaggaaaaagatctgacatttttttactaatattttgtttgcattttgccatttgtaactccataataaattaaagaagcctgatctaagcgaattcacatgagtcatgacactacctatctttttttcttcttttttacttatagttgtgaagactacattcgccaacgtgtgcaaatctatgaatttaataatagtagcattttaatatctgataattaaatcatagcggttggattttttaacagggtgtggaggttgtggacaacgagtactttatcac

SEQ ID NO: 25215 - DNA, 742 bp, Glycine max
  Intron number 1 from transcript Glyma16g27270.1 (locus Gly ma16g27270) derived from phytozome v7.0 (chr-ID Gm16; pos 31278373 to 31279114)
tcgagcaagtcagccataccgaccctgtcattgctgtaatgtcccaactctactcatttttcaaaagatgacatttagatgcaaatgcttacttttggtactgtgttctctgataagaattagacttcaacctaccctttaatgcaaacttttttatatagattatcgatgcaaaattcaatttgtaattttttttttcatatagaggacagacattccccgctgttgataatcctgctcaagctggataagactactgcgaccagccaaactctcttattccaattgtaatatgagaacataaattagtctctgaattgatgttagttccctataaattatggatgaggtccctggacgtagaggacaagtttatggaaatttaacttaagcttgatgcactttcttcaaatatgcgcttttttggtataatttctctgtgtcataaagttaaaggacattttatcgatgaaatatatatgtaaaatttgatcttgatatatgtaatttccatcatttagtgactacgaaccatttactgctgcatgggcatttcttcttctgaattctcgttaatacttttcttctatcaaaagaagaaacaaaaaaaaaaaatatatgattaggtcttatatttccttctccgttatctctgcttttatttctttcatgttctttgtatctttttttttctttccatttctctctttcttaggcattgaaatgattgagcaggttattg

SEQ ID NO: 25216 - DNA, 689 bp, Glycine max
  Intron number 2 from transcript Glyma15g04470.2 (locus Gly ma15g04470) derived from phytozome v7.0 (chr-ID Gm15; pos 3131519 to 3132207)
agtgtaactataattggacctcccgatactctttagtaagctgtgttcactaaaaacctcttttttcacactaatttatgcgattttgaattgattattgggattttagattccctgtgcttgtgcagtgatgatttcgttgcttccgtgttctggggttttgggcttccccctaaaaatcacgtttttagttatgcttactggggggctcttcagagttttacgattctttttctttttgaacagatggggttgtttctttttctgccctaatagtgtggaatccattaagatggttttttctgtgagcctttctggttgctttgtttaattctcgagttataggtgttgtacggatgcttgatgaaaagaataaagcttatgttttttttattgcggcttctgcaagagatgatactttactgatttggttgttcttggtggggttcatttggttgcacttgattgattttcctaagatataggctttgcttttgttcttgttttagaaaatgatccaagtcacaactttcctttccttttatgggattggctttactagttacaatattattttattttgttttaatgatcttttatagcacttgagtttttagttttactgaccactctcggctttcttattttgtcaattttttgaatttcgtgtagtgaggggggatttttca

SEQ ID NO: 25217 - DNA, 600 bp, Glycine max
  Intron number 1 from transcript Glyma15g12680.1 (locus Gly ma15g12680) derived from phytozome v7.0 (chr-ID Gm15; pos 9384885 to 9385484)
gtaagaatgcagaagtggaaactttttattaggatagaaaagaaataaatgacttttgtatttccaatataataaatgttttcttcaataaaaactgtccaccttggtattcttaacatcagtcttaatgtttttaaaaaaaccatttaattatcatgctgagaaatgggcattatttgtgatattgaatccgatagttttaacttaatttttctttcattaggtatcatgtcaatctatattttttatcatgccatgatcattgagaggtcttgcttttgtgaaatggttaattcttagtttgccaattaattagctttggaaatgaatattatgcttggagtctcatcaactataattaattgtaatgatgattatgtggttcctcactattatgtaagacttctgtttctttttcgtctgctctgttgtttttaaattttgtttgattttctattctaggtggttctgaagcagaacaggctgaagggtctgatgtaattgtaactaagcagaagaaatctaacaagaaaccaaaatcagtttcacgaggaaagaaacttaaaaaagagaagagcttgaggtataagaaagagtcag

SEQ ID NO: 25218 - DNA, 1033 bp, Glycine max
  Intron number 3 from transcript Glyma13g19460.1 (locus Gly ma13g19460) derived from phytozome v7.0 (chr-ID Gm13; pos 22965067 to 22966099 reverse strand)
ccacgcgaaaactactcgtgctcagtattttaccagtaagttcttaattttgattttctgcatgttattttgttaaatgagggttagttttgatatcctacggaaagattgtctgcaatgcgtttttttttttaatgaagaaacgcataaaattaatggcggaatggactgtttgacttatcttcatttagaggatgtttaaactgaattgttgcttgtgtgttccagcctagtgcatcagttggtgtattaaatgctgtgcatttacacaaacatttcttgttatttagcactttgcaaattgtgtaactagtgtctgtaaatacctgagcccccctttttgcatatttcaacaacgaagatatggtcctacccttgggtagtgtggcatgtgctttttcattgcaataataggctagaacgttatggctgcttcgtatgttgcatgctgtagactgtagttttatctcaaatttaacgttccaacccaaaatagaacacagggtggttgaagagtcttgttgttttccgtacttatgatttgggttttttctgttgatgaagtatagatgtttctattgcaaaataaataaacaaacgttggtaggtttagtttacagattgctatgttgctacagtgtctcagcatttcccgttcttggttcaacagatagaagcgatgattaggggaagttccacagatagaatgcagtttggtctttgggcatacattattggcagctatttttagtagcatttgtaaaaatatacatacaaataaatttagatagcatatttagatcaaatagcggaaattaaaagaattacgagcgtacctccagccattgcaaattgaacggaaagctacgcacacacgaacctgaaagacagttttgttcttcaggccccttactcactctgaatagatggtgtattttttctgaatagagaagtgggtttggtgatacaaaactgagagcaccccatcctatttatagagtctgtccatcacagagctctctcaacttgttat

SEQ ID NO: 25219 - DNA, 869 bp, Glycine max
  Intron number 2 from transcript Glyma14g38060.3 (locus Gly ma14g38060) derived from phytozome v7.0 (chr-ID Gm14; pos 47266188 to 47267056 reverse strand)
taaagaggctaggcaggaaggatcccaccactgaggtaatttttggattaacttttgtgctagttcatgagaatatgtaaatgcttaagtgcaattaattttagtgtattttatatgtctcttttgatgcatcttgtggtgttactactacctgtgttagaaagggaagtttggttattgcctgtttggataaatttttccaaaagcacttctaagaaaggagaataagatgaaaaaaaatgaaatgatcttcttcataagttaaaattagcttatgctgttatgaataagctaatgtgtagaagctctctcatatatcttctctaaagatgattttagcatatggagaaattcgtttcatttttcttcttctggaagtgctttggaataaacttagtctgttttgaagctgaagtcaatgttgatggtaatcatttcttggtgttttgtgttgaatgtaagatgttggacatcatagacatggctgtacaataagatggtgcattacatgggacctgttggatgtatgtccacacagtctatattaatgatttggctaattcaatgaattgtattgacaaatttcagagtccaaaaattttccaaacatgaccaataaccatgtgttccttgcttattgtccttcaaagtgtatgtgccctatgactactctcatcttgggaaaaagcatctggtgcagctgctggctgaacatttgattccattctccacaatccttgtcattttttctttaatctttatgatacatgtatgtaaaagatgaatctcctaaaatgccttgccttgatttttatttttaataattttgtgcaggtagtggtgggtggctgagagagaacgagtaaaca

SEQ ID NO: 25220 - DNA, 764 bp, Glycine max
  Intron number 1 from transcript Glyma14g02120.2 (locus Gly ma14g02120) derived from phytozome v7.0 (chr-ID Gm14; pos 1261869 to 1262632 reverse strand)
acagtcacagcagtggtagcttcccaaaaaagagtgtaatttcttctccgatcgtttcccctctttactctaattccaattactttcagtgatcaacacaattctccttctgaactgcactctgcttcttcgtttctttgaattgtgcgttttgtgtatgcctgattctgaaattagctcatgttaaaaagatggtcgattttctcagcatctcatgatgactccatggtttattattaccctgtgcgaccatgagctttaagggttcttcatgctgttctttcatacttgaattgttgtaaattagtaatcaccatcaattcttttttcgtacttgctgttaacagcaattctggtttaaatggagaaaagctttgttgagataagtagtttaatttgaacaggggtactggtaaatttgtgtatgggttgggttgtactaagcaactagaatttatcttgcgataatcatgtcccataccgttttgaagatttctaggcctttctactttatttattaccgggcaattctttagatgctttcggtgttctattaaaattagagtttcaccttggtaacatgtgcattatgatttctaaggtaaaaattcaattatgattggagaataacaccaaaagtacctaaaaaactgcatccaagttttgtccacctgttaattgctgtgctatttcttcatttctcccatgtaaacatcatatttgtttgtttttttttttttcactttcttctttctttcaggcca

SEQ ID NO: 25221 - DNA, 642 bp, Glycine max
  Intron number 1 from transcript Glyma14g08890.1 (locus Gly ma14g08890) derived from phytozome v7.0 (chr-ID Gm14; pos 6920267 to 6920908 reverse strand)
tctcgtgccagcctcggcgttctaagaataacaaggtaactctgattctctaatgtctgaattgttttgatcgttttagtttgatattggcatttgcaaactgaacaatcaattggactttatctattgtgttacttgattctagagctttttgtctcataaatagggtgttatctgttaaatgagatgatagattatacaggaatcttaaggaaaatggaaaccgttaattgataagtaaaactattataggttctgaatatattaaatgttgcactattcattaagttacgtttggattaccgtttgaattccattggagggtgcaagtgtcacccgaaacatgaacttagtttgtttattccttgaggctctgaagtgatatataatcctataggtgatgcgataggaaataaagagggagatggaaatggaggtggaaaatgggatggaagacaagtgagtgcatgagtataattatcgttttcttagtactgtggttcttctagatttattgtagaaattcaagcttcactcaagatgctgagaatagtgtcttttctgattttgacattggtggtgaaataatgaattttttgtgtggcagaagcattcaagacatagtgcatttgatatttctga

SEQ ID NO: 25222 - DNA, 785 bp, Glycine max
  Intron number 2 from transcript Glyma16g02860.3 (locus Gly ma16g02860) derived from phytozome v7.0 (chr-ID Gm16; pos 2438326 to 2439110 reverse strand)
tcaattcttaatttcttatcggcaatcgagatctggtttgtttcaaatttgtttaactattcctttcattttttgagatttgaaaaaggttgtttttttttccttctgtatttctaccatttgaatcaattgtagataggcattgtttcaccgactgcaatttttctgaaagtactgcatcattgcattccctcctccccttttctcgtggctgttaaaattgtgatgttaattattgcctagtcttatggtgaaccataaccgactttgatttttaactattcttgctgaagaaatttgaaattcatcttaaaagctgtggctgcacttctgatttattctgtcaaaaggaatgttgaaattgctaagttgactgaaaaaaaaaaggctatggtaattgtagtgttttacagcatctctaacttgctgccctagtttgcctatgtctactttatttagtgtagtaataaatgtaactgtcatccttccttttggagaaacttctcattttaaaacgtacaattaatggacctttttttttaaagtttttgtaacagtacaggcaagtgacagttacattttctttaccatatgaagttctctctgatgtagaagatactatttctcatatttgatcgagggtattttgatatgaatttctttgtagatggtttttgttgacttaaagaaccacttccttatttaaatggtatggtttaccattctctcattactccttttgatttatatgaagatttcttcaactcggggtttcattgacataa

SEQ ID NO: 25223 - DNA, 988 bp, Glycine max
  Intron number 1 from transcript Glyma15g17650.1 (locus Gly ma15g17650) derived from phytozome v7.0 (chr-ID Gm15; pos 14059778 to 14060765)
ccgttcgccggagtatcggacctacgctgtcgccggtgagttgttcttccacgtttccagacacttataatattgttttaacccagaaattatggaacattgcacacaagcctcacttcactttcaaaatcatcttctgtcttgttcgatttccccagacctaatttctcgttcaatgccatggttttgaaatttcaattcgaaagtgattttttttctctgttgctatatctatatatactgtttgttaactactttcggttcctattttgtttttcgctcactgactctaacactgcagggaaataatccacacaaaggcctaacgctatgaagacgccacaatctgcatctaaattgaaaaggtaatacaaattgttttgtttgttctaattggagctgtctttcagttatctgtgctcgttgtgattttgagcctagtgtgtgtttggttagcttattttgaaaaagtattagctttcgagagaaaattttaagaacaagcaattattcctataaatattctcttacgaaactgcacttattaggttgattattaataggatcaccttgtgaaggctctcttaattgtatattcattatgaaataaacctcttgtttactttcattactctgccaagtacctaacaatgaaaatcaaattcaaatactcctagtgcatgctgcaacttcctggctgttgctttattttggctttcattcaggtggggaatttttttttttaaataaaagaaatttagttgactatgaattcggtttaagtgtgtttgtcaacttttagttacagtggtccctgataatgtactcctttgtttaaatgcttatatataattaaatgtttatcaggctcgtagagaactttgttttgttttgtctggactccggagttgataaaaattaaaaaaatgctttgctctctgccccttttgcaggaaaagggaagaaggtaaaggtaagagaaaaaaag

SEQ ID NO: 25224 - DNA, 860 bp, Glycine max
  Intron number 1 from transcript Glyma16g26710.1 (locus Gly ma16g26710) derived from phytozome v7.0 (chr-ID Gm16; pos 30805447 to 30806306 reverse strand)
agtgagtacaaggatactgtggggagaaggtaatgatctacacacatttttttttgtcttaaccctctggttcatctgggaaagagaccctaactaatatgaaatttggtcaaaaagtaagtaaaatctgactaataattatttctgtcaatgatagcacttgggtagtactatccgaacaatatggaatttggtcaaaaagtaagtaaatctgaccaataattgtttcttccaatgattgcacttgggtagtactatccgaacaattcaactaacttggttattcacacactctttatctttccttctaagatgcacccatactttaatttgcttcatgaggagggtctgacactgatactgatattcttggatactttatctgcattatgtatttgtgaaagttgtaaattcaattcaacacttgcatatgagacatagaagcatagccatatccatatttgtgtttgcgtatgacattcttggatacttcacctatactaagtatttgtgaaagttgtgaaaattcagttcaatactgttgcatacaagacatggaattttcaatgctgctcttaaattgtgaaagtaatgaaaattcaattaaaatactttcttaatttgaattttcagaactgcacttatatatttgatatgtatctttttatatttttagaaaggagggagattggtcttatccttatctgttcttaatttggatttttatatatctgttgtgggtttggttttatccctatctgttcttaatttgggtttttatgcagcatcatggtttgattaatttgtgtgatatgatgtgaaattcaataggtacttcacagtgactggggagcacccag

SEQ ID NO: 25225 - DNA, 813 bp, Glycine max
  Intron number 1 from transcript Glyma13g05580.1 (locus Gly ma13g05580) derived from phytozome v7.0 (chr-ID Gm13; pos 5948254 to 5949066 reverse strand)
agctggataaagaggtaagaagaaaccgattaatacatgtacaatattctagacataggcgttgaatttgaatgcacttttagtggtaaatttttaaattaacatgtattgtgatattatttaaaaaagtggagcatcaaacttcttaaataattagtgcagaaaattatctcatgcatcaataattagttcttacattttctgttagtagcagcacttttagaccctaatcgtcattttatcttgttaatcattgaaaatgtagggaaaacaagtggtaaaaaaattttaggatctaaactcaaaagaattaaattttatagggtctaaaagtgtttaaaaaatatcagcaactaagttaacgaggaggattatgtcactaacaaagaaaaatacagagattaaaagtgcttgaaataatttatagaaattaaagatatattaaaactaaattcacacaaacaaaagatatattaaaactcaattcatatttacttcggtctcaaatataaacaacaaaatttttttattttttaatctcaaatttaaacaaatattaattacctatctcttatttaatcagatcatctctaaaatatctttcataatctttttttatacataatgttaagttttaatgaatgataatttaagaaaaatatttatcttttaattaaaaatgactatttattgaagttacttagtttccttaataagtatgtatatttgtttatggcatttaaacatgtaatgattgctgactagaatttgactttaggtagcaaattggattacaaagatttggccaaaatt

SEQ ID NO: 25226 - DNA, 849 bp, Glycine max
  Intron number 4 from transcript Glyma15g05090.1 (locus Gly ma15g05090) derived from phytozome v7.0 (chr-ID Gm15; pos 3654663 to 3655511 reverse strand)
aagtggtgcgtcagtgctgtttctgtagttaaataaaaggcaaaaaaaagtagtattggtattcattttcatttttttagtgttagcaaaccatgttagtttcatcactagttagtgaaagatttccatattggctgcaataagttcataacccagaaattttaatgcgtagcatatcaatgagaattaatctactgcaatcaactccccgattagaaccttcagagagagggccaaagaaagacatatgcaataacaatttcaactgtaccacgcaacgaattcacatttactttaaaatatcaatgctatttaatgcttcttattctaaggccttttaaagctctgtttttgttgtactcatgctagctgttgaactatcacagggtgccaagaaacttactggcacaataattatagtgtttttttttctctattatgagtggtttatgggataatccgcaagtttttggaatgagttacttcattggtaccaatacatagtctcagtgattgaatgtcatgcatggtattttgcacttgtgttagctgtagtgatctttgcaaacacaatacttgtgttgttaatgaagctattcatcacgagaagtaatcatcttagtttttgaattttgatgttcgttgcattcatttggtgcatctataatgaaggcaatagctagcttatgctttgtgtgcaattttcagttttgcaagctgcttctaaaattatgttacattcagctggagctgtatattgtgtattttctcctagttttttttttccttgattcatatattatcatgtgtacagattaagtttcgtgagttcattccaagcatcttgaa

SEQ ID NO: 25227 - DNA, 630 bp, Glycine max
  Intron number 1 from transcript Glyma16g31020.1 (locus Gly ma16g31020) derived from phytozome v7.0 (chr-ID Gm16; pos 34487877 to 34488506 reverse strand)
acacttctttgtagatcttctaatttactttttaagttaaatatgatctacaatacatggagaaatttggaccaagacttataaaaggaaaaactatgatctcaataattatgatagatcaaattaaacttctttgtatctcactaattaatttttaataaaaagaaaataatattatgattaaaaaacaattagaaatagacaacacaacaatcattaatgacaatgaagattaattagtctttttcacatataagaagaaaattattttgtgaattgaaaaattgatcaaaattaattcgggagaataattcgggagaattggataattaaattgataatttaaagaggccagcgtaaaaaaaagaatgaaagaataatttagtatttggcacaataataaaaaaggtaaaaaataatgaaagtgaagaaaaaaacaggcagggcagcagtataaataatagaagtttgatgatttatatgcagaaccaacaactacacttgttttctatatattcttgcatgatcatgaattcttcctccatttatattcttgtctttgtccagctttggttgttgagcttaccatgcagagagagtgtgtgcatcccaagtgagcgtgagacactt

SEQ ID NO: 25228 - DNA, 756 bp, Glycine max
  Intron number 2 from transcript Glyma15g14260.1 (locus Gly ma15g14260) derived from phytozome v7.0 (chr-ID Gm15; pos 10744663 to 10745418 reverse strand)
gattttgggtcagtcatttttctttgatttcttgtaaaaaaatttaattttgtcctaattttagggggggggggaatgttcggttttggttcttggtgtaagattctgaatttgatgttttattcctgaatgttttgccttcaaggagtagagagttggttttgttgttttttctatcaaggaaggagattggagtgaactttttgttatggatagtttcttgatatgttgtagatttttgttatttcaagtgcctgagttgagttttgggggacactagagaacatgcattctctttgaccccagactggaattatttgcatagaagaagagttgcattaataatttcttaaatgcgaacaatgttatctaatatgtgactggaagaaatggctaataaggtgactttctactgtcatcttggaaaaggtcctggatgtaacatggttcatgatacttagattgggattatttgcatttccctgatgtaagtaactttacatgactgtaagggtttgcttaggtggttaaattatggattggggaacccattttgaaagttcctggtcctggatgttttttagtttcattttttggataagatgctttaaattatcaatatcttttattttttatactcaagggaaggttttgtcaattgttcaaatataggggtttgaattattatttgaaattgttctaactgcatttattgacttgtattcatttatcttttgattgcagagcatacagagg

SEQ ID NO: 25229 - DNA, 715 bp, Glycine max
  Intron number 1 from transcript Glyma16g02000.1 (locus Gly ma16g02000) derived from phytozome v7.0 (chr-ID Gm16; pos 1541975 to 1542689)
agactaattctcagttcgacatgtagttatatttaaatctcccggtacctctccaaaattatattttatgaaaattgtacatcatttcccataaactcaacgttaccaatcaaataacactcattgagttgtcacaatagagttttatgtactctctactgtaaattaaaaaaattcaactacgtgttatgtgtaaaattgacatatacaataagttatgtttgtataaaagttgacttccgttgaacgaagaaacaacattttttcatttttttttgctcttacgtttacagctttggaaagcgcataagaaatttccaactgattttacaaaaatacaataaatagtagcattatttaataatctcgaaacatataataatttttcctaacaggagctgccatgttttcgtctattgtctagctagttagtccattgtaggagaggatacaatacaagtgcatctattgtgagtcacattttaggttattattaatatagtaaagtttattttaaaatgtgacgattaatataaaaatgcttaatttataggaaaaaaaccatcgaacaatttcttactgttcttacatcaaaaacttttctccataaatttatttacaatttaatgaagagtcatgcatatgtgttaactatgtcacataagatcctagctgtaaaggcttgctaaaacgaaagcttctgtgtccataattc

SEQ ID NO: 25230 - DNA, 882 bp, Glycine max
  Intron number 1 from transcript Glyma13g33650.1 (locus Gly ma13g33650) derived from phytozome v7.0 (chr-ID Gm13; pos 35426250 to 35427131)
acctttaaccatcacattgtcaacaaatttgctacgtgattaatttgtttcccactgcttattattttgtgcaattttctcctccaagtatttttttatgattaagatttatgagattggtttggtgatccaagaaagaaagagaaaaaagatacctgaattcaaattttttccccctaacaatctaataaaactatcaactaatatttttccgataaaaaaatattattcatgattttaccaacctgtatgagttgaatgaagaggatttgtaacattttctttctaaatgtagttgcatttatgcatggtatggctttatagttgagaccccccactctcaagattcaacttttttcctaccaagacgaaacaatatatatgatcctttactttgaattttttaaatttatttattgttttgttttaaattataaaaatattacctttgtcatttttttagttttggaaaagtttataaaaatagtaaaaataataatttattttaaatattttgataaaatttgtaaaagagtttaatgatcatgcatttacggtataaaatagttttacagtgtaatctaatcacaaattatcattaatataatttttaaaatattatcataagagttattaattttttcatacataaagttgtgattagatgatgatataaattttttaaaattataaacatataatttttttctcgaactttaatatttaaaagtatgattttcatctaaatgaattgcattggatatagttcaatttcaaactcattttacttaaatggtttttagtccatcttaaatagttggtgttatataacacaattcatgtgcaggcaaaaaatcagttttttgggaaggttccaaacca

SEQ ID NO: 25231 - DNA, 847 bp, Glycine max
  Intron number 1 from transcript Glyma16g23340.1 (locus Gly ma16g23340) derived from phytozome v7.0 (chr-ID Gm16; pos 27049075 to 27049921)
tgctaatctcctacaccagcaacaccttccccactgttagttcttttattcctctttttttgtttctttgtgtattagtgacaatttttttatttcccttttttggaatgcattttagagctttggatttaaaaaatgagttgctataactactgttcaatctaaaaaatgcaaaattaattttgggtcaatgtgataaatgttgacaaatggataaaaagggttgaaggagaagttgagttttccttggttgctcttcaagagaaacttaaattttgaagtagaattaattgcttgcaaggttctgattagtttatatggaatctttgcttagcaaatttacatgataaactcaattgtttaaggttaggaagatgtagtctttctaaagctttttctaatttattagatgccaatttttttaacaaagaagaaagaaaaagaaaaccattggggggtttatgatttattttgaataaaaatatgtttttacgtcattggggaatgacaaaaggtgcctaacatgcataacggaagtaacaaaatactttctttaaagttttcatgaataatgatgaagaaatcaacgtatgttgtgccttattttgatttaataataataataataataagaatacgagaatcacatgcactgatgtattctgaattgatttaaatgtgataaaggaaataatgagaatttggttctaaatctatcatgagttgtcattatttttgggattaattgtgtttcaatgctatatatgatatcctcttataaatatgcttattgagaaagaaagataattttttttttcatctcttcactttgtttggaaataggatt

SEQ ID NO: 25232 - DNA, 579 bp, Glycine max
  Intron number 1 from transcript Glyma13g01750.1 (locus Gly ma13g01750) derived from phytozome v7.0 (chr-ID Gm13; pos 1447816 to 1448394)
ctctcttcttcaccccaaccaaaacaaacaggtgctactactaatattgttcatcttttttcttcttaaaattgttctttttctttcactctagcttgatttcaagtactctcaaacggcaactgagttatgtgagtttcccttctaagaaaaaaaatgagcttgtgccatagaccatagttactagttactagttactgctagctagtgcttttcactgctctgtttcagtgtttacccaccaacccatatggcaattaccgcgcaagttttcttttttcttttatgaatgttggtacgtttccatttcaatgctgggtccgtgatggatctgatgcggtgaattaattactgctctttcttgtcgttattcccctgttttgattccctaatgagagaaagtttgcgttttttttcttttttgtttttctaatttattttaaaataatgctgagttggttttgtaacttcactgttctaaatgcacgccaccaagtttgacaaggtttctcttctgtttttttttttttttttttttttgtaggtttgcatttgcttaactggagccagattctgtag

SEQ ID NO: 25233 - DNA, 716 bp, Glycine max
  Intron number 2 from transcript Glyma13g28180.4 (locus Gly ma13g28180) derived from phytozome v7.0 (chr-ID Gm13; pos 31247072 to 31247787)
gaagcaggatttgattaaagacagcttggtgtgtggtaactatgaacagatgttgatctaagtctgatctccaaatcaaattcttgcatagtatttgataaacatatttgatttgactatcagagcatccttgcacgttttcttcaatgattatttttgtggtcttttgcatcgaatctgatgctatggaatgtgcatgagtgtgatgatgactcagattggaatgccaggttttcaaaaagaaatttgtttagttttcagtgtgatcttaagtagtcatcattgcagtatggttgatgtagataaatgttattttctagattactagattataatgctcgtgttttatcataatgatgttatctagtaaacatcgtttcttttgcctcagggagggggagttttcattattcatgatcagagaatggcacaaattttggcattcttttcacacactagagtttagttttagaaggatttgacacaatttctttgcaatgattttatgtgtggcttgattagtcatcatctgatggtggttacggaatagctgatagacattatgcattaaattataaggctgtttagtattatttttgtttaatatttaacctaaaattgtattatgtattataatttgatttgattcatatctgagtgggggttctcataactactttaactactttgtgtactaaagagaagaactgcagaac

SEQ ID NO: 25234 - DNA, 730 bp, Glycine max
  Intron number 1 from transcript Glyma14g40190.1 (locus Gly ma14g40190) derived from phytozome v7.0 (chr-ID Gm14; pos 49166257 to 49166986 reverse strand)
gaaaaactcccacagatttgataggtaattaactatatataattcccaatatatacatattccattccctttactccatgcatatacatattttgcttcgacagtggagatataaagggcgctaaatattctcttatttttttatgatggcgccaatattctattcgaaagcaaatgatatagaagattatatgcataacatatattctttttgtgcagtcaaacaacatatattcttcttgaaagtatatttttctatactccgggttgtccaattaatatcttttttaagagctcttttattcttcttgtaagtatttttaagaaaatatttatgtaatagtaataaaatatttttaatttttttactagaaaaaatatttacctaatatattttgatgatgtcactgctcccataaaaaattaagtggagatatttgattcataaaaaatatactctcagacctataaaaacaaataaccttttgtacttgtttctaattcctatgaataaaaaaaataaaacaaaagacaacactatatgggttgaaaatgtgcacaattgttttgccaaataatattaatggtattttaatgtagttttgattttggactcattctcctttagttcacgatatcataatccaaaaattgtttataatatgacttgaataatgtgaatgtgttatatgtagcgacggctttgggtataaaagaaacagtggcagca

SEQ ID NO: 25235 - DNA, 526 bp, Glycine max
  Intron number 1 from transcript Glyma15g41030.1 (locus Gly ma15g41030) derived from phytozome v7.0 (chr-ID Gm15; pos 48070713 to 48071238 reverse strand)
ctgcaagagaaaactgggtatgcttcaattttgttgttgaattctcatattgtttctttgatggtgtatgtagtgcatgacaaggttctaggtactaattaagttgattttaaatcctattcttacattattaagctagcatggttttattttataacattttttaaatttttatatatgtattctcctttggaagggagatgtcatttgtgaaagtctcttcaaaatttgaaagtggaacactcaaattttcattcaaaggagtcatgataccctcctcctcctctcctgaaaacatttccactacatgtttaagagaatattttccaaagttctttcttcaccaatatatatatatatgatagttttttattatgatcataatatatgaatctgtttggataaacttatccagaagcatttattggagaagagaatatgaagggaaaaaaatagatgcatatacgtagtttcatttattaaatgttgtttttgaaattaatggcagggaattgaaggtaatcaa

SEQ ID NO: 25236 - DNA, 567 bp, Glycine max
  Intron number 1 from transcript Glyma14g11690.1 (locus Gly ma14g11690) derived from phytozome v7.0 (chr-ID Gm14; pos 10234572 to 10235138 reverse strand)
attttcctgtcaaggtaccatgctgaatttcaatttccattaccctttttcttgaaaacaaatgggtcagccttggaatttgaattggaggagtggtgtttctaaaatttgcatttttttatcatgataatttgttgttatggacagttttaccgaatggggaaaccttgaatttagaaaaaaaagtttattatttttatttgttatgtgctcagggtatatattatattatattatattatatggtgcaggatattggcagaaaggatgtttctcttagcaagtttaaggggaagattatattgattgtcaatgttgcttcacggtggtatgaattatgcacttctcaagggagatatgtagctctatatgtgtgtgatggagccttattttcttctttaatctttctcataatttcccaattcttaatgtaaaaaatgaaaataaaatcagttgtaacttaacatttgagtcaaactttctgtttctggtcagttataaaaccattgaattaattgccttcctatgacagtggtttgacatcatcgaattactcggagctgtcac

SEQ ID NO: 25237 - DNA, 539 bp, Glycine max
  Intron number 4 from transcript Glyma13g28480.1 (locus Gly ma13g28480) derived from phytozome v7.0 (chr-ID Gm13; pos 31518171 to 31518709)
ccgtagcgaacaggagcaacaagagtcaagtatgttatatcataaactagtattccagtttcatagtcctactttttttttgtttttaagttcataagcttgaagaaaatctaatctttgttccaaggttgaaatttgttactagcccacctaggatggggtttctcctcatcaccatgtcagtttgtttcatggaattgaatttaaaagtctcttaagtagagtatttgatgtaaaggttttcatataattgatttttatcataaacaaatcatcaagtcaatggttagacacctaatcataatcattcaattgggtagaaattatcttgatcagcgggcaaagtttgaaaatgttgtatgttggcaatagacaaaatgccagactagtttgttattttttcttaacttttgatgtgtaattaacacttgaattactttacatgttagcatgtatatcatcacattttaatcttataggagctttctatacttggccaatcagatcaaataactcctgtgccagtagaagttactgcc

SEQ ID NO: 25238 - DNA, 973 bp, Glycine max
  Intron number 1 from transcript Glyma15g07220.1 (locus Gly ma15g07220) derived from phytozome v7.0 (chr-ID Gm15; pos 5062287 to 5063259 reverse strand)
ttctcttccttctcaggtcctctcactctctctccattcctttttctttcactctttacttcgcttttttcttttctctcaattttcgttcgcctccgcgttttgtggaattgaattgttttcttttttcgtactagattttatggctattgcatacatgctggtgtgtttatttgattaaaagataaaatctttagcgtgttttctttctggggttgagttttagacctgggatctctgatgtgggaaatgcatctggactcagagtgtgaatcgttgatccttttcaattctgggctacccaaaacagcattaaaggtctaattgttgattcttcaacaatttggagactttaatctcatgtacatgtacaatttgagctgggtgtgtggtgctcagactaatgagaatttcatctatgtttctatttgattgccttcaccacgatcttgaagagctagagatctattctaccaaaggaaatgtatagaaacatcaactcttacttctaattgaaatgtcttacctcattaagttctctatgtatcccttcttggagtgtaacataatgtattataattgttttaagcatttttttcctttttaatatttaaagcaggcagtacctgagtggaaacaagaggtaatacccgcaaagtaggaatgaattgggactccaaaaaatgaggaatttatagtgggacatattataaacctggatcaactgagttttcatcttgttgatgcctcttagaggaatggacattgtgtacactcatgtaaaatttaacgctcatctatcgtggtcatgagtgaagagaagtcactgtaggttgcatttccaaagtaatgttttacttgtgtacaattatttgtggatagaatagcgggaaacatagttgaacttgaattatgtgattgaaatattgttgtattgacatagtttattgttttgcacgtttgcagatatttg

SEQ ID NO: 25239 - DNA, 864 bp, Glycine max
  Intron number 4 from transcript Glyma14g10540.1 (locus Gly ma14g10540) derived from phytozome v7.0 (chr-ID Gm14; pos 8746841 to 8747704 reverse strand)
gaaggaagaagccaagcttctctcaccaacatgttggtcaacggaataagaatctcatctcctttgcacaacttaaaaaccactctgtaagttcgtttgtgttatagtgctattcaatgcaacaacagaagtcttatatctcctgatggagtaggttacatgaattattacatggtatcatttgactcatttaaaaatcaaatattgagacattagtatttatcctaaaatcttttttaacaactccttttgatggtatcatttgactcatttaaaaatcaaatattgagacattagtatttatcctaaaatcttttttaacattatgttcttttgtctctcttccccttttaccattggtctaaaaactatataaatttactttcacagctatttcttttgacgattttcttctagtgacacttttgaataagcagcttaattaactagttatttaacaaactcttattacatgagtatttgtttataagtttaattgtgagacttattcaaataaattaaagagattatagtgataaaattattttattttgaatgatcatgacaccatccgttttattgactcagcccatataaagaatttttgaacggattcaagtctaagaaatcaaacccaatacattttaaggacggatttagattatactttgggtggtctcgattcgatcccatatatatccttttaaatagttatatattaataatataatttcttaactcaataaataatgttttgtctaatattatattataattataattataagtatatttgtttttaaatatatattataaaatatatcttaattatatatttatatataatgtaaagattaatatatt

SEQ ID NO: 25240 - DNA, 810 bp, Glycine max
  Intron number 3 from transcript Glyma17g04160.1 (locus Gly ma17g04160) derived from phytozome v7.0 (chr-ID Gm17; pos 2743290 to 2744099 reverse strand)
tcaagaattttttacttcacacattgcaattacaggtatgttatgacctcaacagcttaattagattgttactgcatacccttatttggtgttcttatacagaatagtttcttctgtagtatctgtaaaattttgatctagcttttaacaataaatgcttagagacctgcttctgtcagcactgctatttatgtagtgtatagtttgttgaggtgatgtccattgactttattgctgcataataaatgacagatgttcttgcctatccatcaattgtatagttcaaaggattttagagataggttgtttcttttatgtgaatgaaagatagatatgacatcatgcgtctggttatctttgttgcttttcttattttgaattgtcctatgttaaatgttactgaagaaatgtctaagcgcatgtttggattcccattataaaagcccctaagccagagtttgggcaaaaacttgtctcttgtaagactttgctcaaaccttgggttggagattcccaacttgaagccaaacgtgctctaaatgcttctcatccactgagcctaaaacattttttcctaacttaaagacaaagaatcctggtagatgcctcactagctaagttttgccaatttgtatctcaaacaaaacaagtaaccaatttagtgggagggaaggaatattatttaaggtgttgtctacaaacaatgttgatgaacctgttatgggatgtacttgttcctcatttaatattttaattcaatgtttttgtttgccagagttgggagaagactgttgactgctacagtccagg

SEQ ID NO: 25241 - DNA, 522 bp, Glycine max
  Intron number 2 from transcript Glyma15g13080.2 (locus Gly ma15g13080) derived from phytozome v7.0 (chr-ID Gm15; pos 9742934 to 9743455 reverse strand)
gcactgctgataccatcaccacccttgctgctcaggtatccccatccatgatccaccccctctttctttttgttttcattcattcttgattttgtagcattaagtgatttgcttgctaaggatcgttctagtattagtatagactatagagtatggacaaaggttttaaactgcgaccacggtcgcggtcgcagttttgttgcaactttgatattgtagaaaactgtagacaaatatgaaatatggttagtgctgttgcaattgtggttgtgatgtggtcactacaaccgcaaaaactctgatgttgtagtcaaaattgcagttatggatcgatttttaaaaccttgatatggagtgtaaattgtggaggatgcatcttatatgttgtttttttagtttcttattttgatggacaagaaaatttggtgtggtgtggactgtggagtaggatgtttctcaattatgtttttttgggcttgtttgacaggttgggcttggagatacttctggtggtgacagtcc

SEQ ID NO: 25242 - DNA, 279 bp, Glycine max
  Intron number 2 from transcript Glyma14g04130.1 (locus Gly ma14g04130) derived from phytozome v7.0 (chr-ID Gm14; pos 2774883 to 2775161 reverse strand)
cgaaggtctcttctcgttctttatatcttagtgcctgtttgttattattattttgtggctttaaagtcaattttgatgctgataattcttttttcagcagttggctaaattttcaaaagtaaattaggttttgttgtcggataaatagataaatcgattggtttgggactctttgaagaaatttgttttctgctattgaatgcttattgtagagactatctgatgcaccatgcattttgaataggaaaaggaagatctggcacctgatctcttggtgaa

SEQ ID NO: 25243 - DNA, 832 bp, Glycine max
  Intron number 1 from transcript Glyma15g20180.3 (locus Gly ma15g20180) derived from phytozome v7.0 (chr-ID Gm15; pos 17943179 to 17944010 reverse strand)
cccttcttcttttacgttcattctgttttcataggtattctttttacttcttctgtttcttcctctcttcctttgttattagttactattactattcatttctcgttccctcattactttgccacgtcagcttctgctctgcaacactaagatctagcacggtctctgtgttacaaccattggatcagagtctgagacataatcctgtgtttctagtacttcgttttcaattctagttctgttttggggtgctgtctttgttgagtttttggctcattttcattggaattaccattctgcacttcatgcttggtttctgggaagaccgttctgaacttttgtcggattgccctttttcattaaattaaattgaattaataacaaatgaaaatgaaataaaaatttattttttgtctgcagactggtcttgaactaagatcttctttgttagtttctcattgttatgttatggttatgttttggatgcatgctgttactggggtttaagagttttttgatcctgcaatgatcaatataaaattttaaaaatactaacatttaagatcttagttcaattaaggtacaggatctggaattaaattttttttttggacctgtggttggtgagagagggtacttactggtcggtcttggaatccaatacagtcttctagaaagaaaagaaaaaaaaataattccacattgttttggttttgatttttgacttttggtgactaatccttatccttttttatggtggcttgttgcattcaattctaatcagtttcttcttatgcttcttttcttgttgcagtgaggatcttctgaagaa

SEQ ID NO: 25244 - DNA, 939 bp, Glycine max
  Intron number 1 from transcript Glyma16g26320.1 (locus Gly ma16g26320) derived from phytozome v7.0 (chr-ID Gm16; pos 30464942 to 30465880)
tagccagaacaatccatcccaggctacaaatcaaggtaaactatatattattgccaggttgattatatatcatattattctaataattcatattaccatcgatgttattatatggtcctctcaattatatatatatcatatcatatcatatcaataatctggatccacatctcatggatttaattttattcattttagaaattcaaatatagtctacttattatatgaggtggttggataaaggttagcccactgtgttaatttctaacatatttaaagatattttcacaccaataacccgagtgcaacttacgtgatacttcttctctctcaaaagtaaaggaaaaaaagcatccaaaagttagttgctgtcatattttgttgtttacctcaaaaaaaaaaaacttcacctgttggtgcatatgcacaaccatctggaactctcgatctgtacaataacccgagagttgaaattgaaacatttccattatctaccctcaatattatcattattggccttcatgtaccatatctcagttttcttttttttggtctacctttgactatatacatatacagcaataaatgtttggcattcaatttcacattgcatttttccccacttcccttgtatctttacacactagttttgaaaaccaacaagtcttacatataattcttcaggtgcttttaagttattatagtcaaaacttatatttcatcttcacatccacaccatgacttctcatctcatgcgaagattatagagatgaaacttcaattctgacaaagaacaacaccaaaaatacctactgtaagtaacggtatatatctaaattttgttgtttgtgtttaccagtgagactaattaattaaaaatgttgtacactaactatagaaatttacatttaatgtatgtttttcaatttgaaggcattg

SEQ ID NO: 25245 - DNA, 630 bp, Glycine max
  Intron number 1 from transcript Glyma14g24160.2 (locus Gly ma14g24160) derived from phytozome v7.0 (chr-ID Gm14; pos 28858296 to 28858925)
tttaccctcttgggtatgttgtgattctataatgaattgttttgttcaaacttcatcatcaagtagtaatagtatcatcttgcttattgttcattttttttctctcagttcttgttttgtgcaattgaatgtttcttttttgggataactttgttctggtaattatattagtcttctgagttgagctatagcaagtttttgaaacattcttcatctgtctcctatacttcgtaaaatggaattttgttttttgatcagttcttatagatttggttcctgatctagttttgagattgttcatatcgcttattatcaagtatatctgcagtttcattgagttttaccttccattaatatctaatttatttagagaaagaataaaagttaggtttgactgaggctcgtaacttttttcttctcgtttgttttttttttttatttggggggattggaccccatcccaccaaaagttactttttgctgatgttttggaagaaaaggaaatatggtagttgaatttctatagtgaattggtttttattaagtttagattatactggttccatgaaaaatatctgtattcctctttatgcaggcattacacagtgtctctcaacattggctatcccc

SEQ ID NO: 25246 - DNA, 709 bp, Glycine max
  Intron number 1 from transcript Glyma13g06040.1 (locus Gly ma13g06040) derived from phytozome v7.0 (chr-ID Gm13; pos 6339584 to 6340292)
ggccaaggcgcaggatccagtggcaaaacaacaaggtctcgagtttttgcttgtctctctgcttttgcatcgttgtcgtcacgttttgttgttgatttttgttcagctattctccaaaatcgagttgaaatttagcaacatttaatttggaaatcgtctattaagatgccttattgctgctttgagtcaagataagttattcgggagtttatggatttggattcttttttatgctgaaatggaaatacatggtttattgttggaactcactagcctgttgttctgatgaaatggaagaaaacaaaagagagaaaaaaaaattaaatttgaaatgaagggaaagcttgcaaagataattctgtttcgtgaattttcttttgtttgtactctctctttattttctctttaaacaaaatgtagaaattttcaaatttaaaaaattttctttccttcttattttctttctcttcatccaaagatgtagtagtttaacattatccagagttaatcattaatattttgttatctactctttgaggggtagaatgaggaagcgaatttttgaaagaaactattcctaagtcctgaccttttaacaagttaccaatagttatcttgtgtccaacaacttcattatgacctgattaatcttttgtgtttattttttcttttagaagctacaacctctctcagctccttctcgccagat

SEQ ID NO: 25247 - DNA, 825 bp, Glycine max
  Intron number 3 from transcript Glyma14g05230.1 (locus Gly ma14g05230) derived from phytozome v7.0 (chr-ID Gm14; pos 3645995 to 3646819)
tggcgaaaatacaatcattgctaattttgattcaggtacactaaacttttagttgctcttgatacaagagatttcggatatggcatatctaaactgaatttgtttcttagataagagtatatcaacatgtttttttataattttttctgacacattatttatttttgggccaaagaaagaatgtaatggaacatgtgttattctatttctattgcctttaattttatatctttccctatttacaatatatattcctttttttgttctgaattgattaataatgttcccaattactaactgaaaatattgattttattttttattttttaaggcattaaatatatatatatatatatatatatatatatatatattttataataataacaacatatcatacaaagaaataaaattatttttttaatttaaacatttttacatcttaatctttatacttattttgtatttttctttatttcttccttcctatttgtcatatcaattatctcatctggcttttttcttcctccacacttcaaaagtatacacacacttttttaagatgtgaaaaaatgatttttcatttaatattaagtactttataattttaattcattaaatttcaagaacagatatacttctatttatatactttagaaatgaactcattatagttataccccaatcaaattttaatttgttattgttgttgatgttgttattttgtgtgtgtgcgcacgtccacacgcgtggttgtaactgaattactgactgtttacatgttgaacaggcgtttggcccgaacacacaagtttcaacgacaat

SEQ ID NO: 25248 - DNA, 427 bp, Glycine max
  Intron number 3 from transcript Glyma13g31240.1 (locus Gly ma13g31240) derived from phytozome v7.0 (chr-ID Gm13; pos 33684820 to 33685246 reverse strand)
aactcaaacaggtatttctcgatagaatttgactcctctaaagtgaaatgagaaagcaattatatatttactgtactacatactccaatttaaaggaaaaaaacttataagcagttctttatgttgctattatctaattagaataggagttttatcttactaatctatgtaatgtaggtttacattaaagcttaacatagattatcaaagtaaaacttcagttctgattagacaacaatacaaaaagcactactgtgtataatttttgtccataaagagtggatacacctctactatgttactttacacatgtacctcttcatgacattataacttttgttttctaagagatcaattttaggatctctatcttaatgctttgagctatgactaatgcatgtggcagctggtccgaactcacaaaggg

SEQ ID NO: 25249 - DNA, 787 bp, Glycine max
  Intron number 1 from transcript Glyma13g23850.1 (locus Gly ma13g23850) derived from phytozome v7.0 (chr-ID Gm13; pos 27163348 to 27164134 reverse strand)
aaccaccccatcattctgaatctccgaacaaccatgtaagtctcttagatatttgatttttttttttttaactttagatgctctttgtttcacatgaatgatgattatgctcatctgggattggagatgtggtgccccattagcaatttttttatttaacattcttcagaatgaattcaatttggaattgcattttattattcttttgttcatttcatgtttgaatacaatcaatttgttaaaaaaaattaaatgagaataatagaactgaatttcacaagggaaaaagagtgtaagttctatacatcactgtggaagataagcctcaaataaggcatcgagagtgcgctaatggtaaggggtttgagtattttgaaaggtttaaacttctctggtgctaatatatctcagagagtggatgtttgggatttgcatttatcccaaattcactaagttacttgagtcaagtgtttcagcctagagtttaaagcattgtaagcaaaataataggcgtgccaacagctgtactactaatgactcaccgtgctagtgtgcttaaagcttcaatttacagttgtgcctgtcaatgttgaatagttaggaatcatatgctatgctaagtttctaagttgttatctgtatgtacttctatttttctgttcttttcaatttaaacaaataacagtttatgtactttatttgttttctcttgaccttgtgttcttatgtttacaatgtgactttagattgctgcaccaaagcttattgagttatattttggtgcaga

SEQ ID NO: 25250 - DNA, 572 bp, Glycine max
  Intron number 2 from transcript Glyma14g03030.1 (locus Gly ma14g03030) derived from phytozome v7.0 (chr-ID Gm14; pos 1916409 to 1916980 reverse strand)
gctttcatccgttctgcactttgtcggcatttcaagtaagcctgctctttcatttagtccttgttacctccatttttgagtctcgggtgtttattcttgaaactactttgctagaatgtgcaaggctttgtgctatgttataatttgattcctttttttttttttttttttttttgcttggaattagtggatttaaaacataatctggttgtactgtgccagattccaagccactatcatttatgcagtcttattaaaccaataacatttgtgtttgctacacacacatggtaggaatttggtttaataccccttgaattaaatataatcgtataaggatgtgtaagaagatgactctgatgaagtatctgttaataaaaagtgttaactgaattattttttgacacaaaccaaatgaagaaacaagaagaaaaacaataggagaaatggtattacggttgacaatgggtttatatttttgttttgtctctaacggggttctattcaactaataattagatttcacccttgtctcaggaaggacccttatagtgctaaaccccttgaaggac

SEQ ID NO: 25251 - DNA, 1031 bp, Glycine max
  Intron number 1 from transcript Glyma17g04850.1 (locus Gly ma17g04850) derived from phytozome v7.0 (chr-ID Gm17; pos 3248659 to 3249689 reverse strand)
catttctctgctacaaggtgtgtgtgtgtgtgtttgttgtgtcttaagtcttaacgtgtttatgtttatttctctatttctatgtatattatattccctcacccacaaccccatgttgtgtttccttatttgatgacttatttcttgtgtccttttttacccctttcgatgtgcatttacccaactgggtgactccttgtttggttaaaggtttcaagtttctgttgagactatacttagtgtgatatgggaacctatttggtcttagattcggcattttttatggggatttagttcatgaaaagaagacatccatgtctgaaaatggattttgggccaatttggataaacttttgaatgaatatttttttttgaagaaaataagaggtaaaatgaatcaaatttatcctataaattaaaattaacttatgaacctcaagttttggagaggttagacgagagatcttctaaaaaagttggtgcataagctgatttaatcttacaggagaagtttgatttaggctatgcttggataaaagtaagaaacatgtttttgggaatttcaatacacattcccgaatttcaaagtacaaaatgaagaagggagaatttgttgcttgaaaaataaaagctgttgctgtttttcccttcgggaaaaaaatgacaaaaaggataaagcctccgggaagataagcttccctaagatggaattagatgcaaaaaaaattctgtttttcaacctttgacttcacacttatttaattaaccttgtcaagtctagtatcttgatacatatattttggtctcacaagcaacatcccaaagaacctacttatagtgagttgttgagacttcacaatcaatcattgaatacattgtttaccaatctagaaaatgtaggaaagcaaaatgtaattcttgaaaaatcaagtcacatacagtctctatcaatgtcaaacttatggataattaaatactgtgtgctttccccttcaggccagtggcagtgccatcatctggacagaataaag

SEQ ID NO: 25252 - DNA, 333 bp, Glycine max
  Intron number 3 from transcript Glyma17g01360.1 (locus Gly ma17g01360) derived from phytozome v7.0 (chr-ID Gm17; pos 815826 to 816158)
tccccctcccaattttctattttttctgaagtcatgtatgtagtaggctttagcattcaggtccattattttgacttttagttgatgcaattaagcatgtttgggtcttcaaccctgttagatttattttttctggatttgtccctatctaggaaaaaaaaatttgtttttgcttagtttatgattttaccttcaatggtcttttacctgtccctctgttgtataatttgtttggcatatacatgagagaaaaaattacctttcataaatatacaacttttcctgtttccttaactattgtttgttcaatttggattatacaggagtaaaaat

SEQ ID NO: 25253 - DNA, 428 bp, Glycine max
  Intron number 4 from transcript Glyma17g01360.1 (locus Gly ma17g01360) derived from phytozome v7.0 (chr-ID Gm17; pos 816251 to 816678)
caaggtgaatgaagctatgcagtcagccttctctgtgcatttattattatgtgattaataatgggaatatcctagtatataatcagagagcttttgagagaatcaagtgaattgcattttctccagtaatgcagtcaacatatttcttataatattatttctttaaccttggattttgtacataatttgtttttgtcgtatgttccaattccattgatgctgcttttcctttttcttgtatcatatgatgtgccatcttcttggttttttagtataaatagccttatgatattttgaaaccccattcccataatgctctaaataatgatttgaaatgcatattcttcagctttccccttttggattatatgttgcatgcctgcatagtctgacccagttctctttttatttgaatttaatgcagatat

SEQ ID NO: 25254 - DNA, 693 bp, Glycine max
  Intron number 2 from transcript Glyma15g30380.1 (locus Gly ma15g30380) derived from phytozome v7.0 (chr-ID Gm15; pos 33745652 to 33746344 reverse strand)
ggcttgtggctttcgggttacttctatcaagattggtattgtttcttgtctcccgcccccccttttgattttaattttttcactctttttattgaagaaatggaatggaatgcaatgagaatggttctgggtgttgcatttgttgtttgaaacaaaaatgaaatggaatagagcaggataaaatgctttccattatagaatctttatttttctcctctaatttgtagatatggggtgaagttattatatatatatatatatatatattatatttcttttgttttactttattttaaattatccaaacaatggaatgatgattctattttgttatgaattatcactccatcttttttttttataaatatctttttttccagctctaacaagaaacaattgattgtttatttagaataatttgatgttttgaacatgagcttataaaaaatggtgaatggcaatgtaaacttctagggggaactgatggagattgctttttattttatctatgtgctataatgggaaggactagcttgtgctttttgagctggtaaatggtgtaaaagcttggtcttcgtttcttcgttatgaaactaatcttttgatgttatgcaaaataatgctgtttgtttttaattattctagttgtggtttcaacttttctatctcttgcagatccctatctgaacactg

SEQ ID NO: 25255 - DNA, 324 bp, Glycine max
  Intron number 1 from transcript Glyma17g03980.1 (locus Gly ma17g03980) derived from phytozome v7.0 (chr-ID Gm17; pos 2633195 to 2633518)
acggttccagagacgccaaactcgacaaccaacacgtttctctctttccacttttttctctgttctctctcttaggaaacgaaatatactgtaaattgaaattcgattccactatttaacggggaagttcagttcgccgttagattgcgttgttgacttcacgcgactaggtcatactaggctcgtaggatagttaaattgttcttctataaaggattaaccctaactatgttatttaatttgatgagatttttttatgctcattctttggttttgttcgattttgaaggcaaaagacaaagaaaaggaggaactcaccgagaa

SEQ ID NO: 25256 - DNA, 780 bp, Glycine max
  Intron number 3 from transcript Glyma13g42770.1 (locus Gly ma13g42770) derived from phytozome v7.0 (chr-ID Gm13; pos 42653700 to 42654479 reverse strand)
tgcaaggcaactgcactaattaactcccactatctctttaattatttatgacccaataattctttcgcacatttattctatctatatacttaatcacttttatgaactatatttaatttatttactgtttccatatcaaataataataattccaatctaaaataatctagtgattattttgttagatatttaaaataaatagaaactaaatttatgtttttttacaataataaaaaataaaattttcaaaaaataattctttgaaaaactattcaaattaaataactcctggtttaaattaaaatttatattttttcaggttctaattatttaaaaaaactgaaacaaatgtataaaaaactaaaaagtaattattttttaaaattaattcttttacgaaaaaagttgtaataaattggccctaatttgttaatgagcaggagcctgtcattggaggaattatagctctggtcaaattttcttttgacgatattcaattattgcacactatctttataattgaccacatacatgtcaggctccacttttctggtgtatgtcattatgccataatccaagggatcccaacaacataaaggcaaaaaattatgtttcatgaaccatatatacatagagactagagtagtgtctataataataacttttcaccaaaaactactaattaattaaattttattaatattactagcaaaggttctatatattttttgaaactagctagtctcttccattgacacttttcctaatgacatataggga

SEQ ID NO: 25257 - DNA, 524 bp, Glycine max
  Intron number 2 from transcript Glyma13g39950.1 (locus Gly ma13g39950) derived from phytozome v7.0 (chr-ID Gm13; pos 40511298 to 40511821)
cctgcaattgcacctggggtatttttccttctttctcttttgcttccatctcggttgttcactgattgataatttctaaaatggagtttgatggactaatgctaaaccagttattattacacacaaaaaaaaaatgcatatttccatatgtgaaaaagatttggtttaaattgtggtagcattgtaattacagatattgtgtactattgttggaaaatgtgattgatgcaacgacagttaatcagttatggtatggaaacttccaaaaccacaagattttccaacttctttaaaaaagcctttttcaactctcaattatgaaggcttagaacaggattttccaagaaaaacatcacttcttactacgaaggattttctcttcaacatagttttattgatgatggcataactctgaaccttgtagaaactaaatggcttttcctcagatcaaggtacttaatttaatttataattttgagtgttctgcaggaactatcaggaagccactaggttcaaagaaacaa

SEQ ID NO: 25258 - DNA, 943 bp, Glycine max
  Intron number 3 from transcript Glyma13g40700.1 (locus Gly ma13g40700) derived from phytozome v7.0 (chr-ID Gm13; pos 41209476 to 41210418 reverse strand)
ccagagccatccgaaggcgcttaactaagcaccaggtacttttcatgccttactcttccaatttttgcattttctgtttattatgctatgattgtgttgtgtccttaacttgttctactttattcagtgttggaataattgcctagttcataatcgtttcgttggtaagaaaaaataaataaaataatcacgggattagtttcaaagtttgtgtctagaaatgatgtatggttgaacatgttttcaattttgaattcctccttttacttgtgctgtttccaaacgtgtcatagatcagtattggccttgagtagagctgaaatgctcaaatttagtcacagctttcaacttttctgaataccgaattgtctttggaaatatcatctaataatctgggctttagaaaatcaaccagatagtcatgatatcgtctcatctaataactatttttttcttcttgtttttgttataaatatggtgagtaccattgtgaacactcaactaaggaacatggttgaaagtttgactgcaattacgattataagttatccttaggggagcaatatacgatacaatttttattgttttggtcacgtaacgtgaaaattattagctgatgtttttacagttaacccacgttctgattcatgtaatgttttatctggttggtttgatctaatggaagatgaacgcactatttttaattcctttactagttttgaatcttttgatttgtggagctctttgtatgatttgtggagctcgttgtaatcagttataccattattttctatgtttgctgtagattgttttcctatctcgagtttctgaacgagatagatatttctggccatagagggttctcatttaacgtagctgaatgaatgaacttgctgtttttcttacaggcttcattgaagacagagcgtgagaagaagaagga

SEQ ID NO: 25259 - DNA, 305 bp, Glycine max
  Intron number 1 from transcript Glyma14g08990.1 (locus Gly ma14g08990) derived from phytozome v7.0 (chr-ID Gm14; pos 6981726 to 6982030 reverse strand)
tctccatatctactctggtagcgttgcacgaaacagtaagtcatgtcgatcttttaaggatgttaagaagatgttttgtctttctgtaatgtcgttgtttcccctaataacacaaacaaaagggtagcaaaaagtttatgctttatggtaaattttgacccccccccccccccccccccccgaaaagggtattgtaatgttttgattgagaccgggaaagttcaattttttttaatcccttttttgatttgtgactttgtgttgtgttttcagttgtggtgtataggccagatcagattcggaag

SEQ ID NO: 25260 - DNA, 825 bp, Glycine max
  Intron number 5 from transcript Glyma14g00730.1 (locus Gly ma14g00730) derived from phytozome v7.0 (chr-ID Gm14; pos 361425 to 362249 reverse strand)
aagctgcaattagagaagtcaaagaagagacaggggtaagcaagcaaaacataatatatagtttagagtaaattacattccacttgaaatttgccaaaataatagcaaaccccgaactcaactataatttactatccactttatatttttctctgtcactaattatttagttaacactgttatgtattttttttaagaaaaataaaatatcagtaagatttatatacaacattttttaaaattttattattttccttacaaaacttaatttttaaatgtaaaaataaaataatttaatgaatataataaaaactggcattcatgtgtatttaatatttgatcagttatcatgctttagtaaatatctgatataccattaaggtccttcttttttttttttttttatcatgtccccttgctcttttgcttataatcaaagacacttattccaatttcaccccaaaaataaaggcctgtgcttctctattttgtcaattttcttttttgaattttcttaatttttctcaatttattcattacaaaccttaaccttgtctaaaatcttgaaatttcataattacactatttttttatgcatgtgacaatataaatatttaaaattaaataatattacttagcaaattttaattcaaattattcaaataatatcgaccaagttttgggtttgctgttttgacaaactaggttgtaatttcttctatagcttatgtattacatgttttttgggttgtttcaaagtctaatcccattacttctattattttttcagatagagacaaagtttgttgaagttttagcattcag

SEQ ID NO: 25261 - DNA, 506 bp, Glycine max
  Intron number 1 from transcript Glyma15g42190.1 (locus Gly ma15g42190) derived from phytozome v7.0 (chr-ID Gm15; pos 49582180 to 49582685 reverse strand)
gagtttggattcttctagaagggtttgggatcatagtccggtttctgaagggataactgcttctgcttctaacaaactcaaggccaagaaatctaaccccactttgcctaacgtctgttactgttctccttttctcccttttgttttcctttgtacaaaacttgcatgcatttaagggatgtttggagggaaggaatcaaggaaagaaaatggagaacaaagaaagtcttctgcttggttagagaggaaaaggaaggaataaaaagatagcaattttgatttctgaaataactaaaatattattcttttttattgaaattttaaaagtttctttccttctccacttttcatccactgttccaacttccaacttccaaaaataccaggtaggagggtagacgaaaaataagaagagaaaaaaatattgaagtatgaatttaaaaataatttctttcactatttttttttcagctaaaccaaaatattatacttttttattttcttct

SEQ ID NO: 25262 - DNA, 561 bp, Glycine max
  Intron number 1 from transcript Glyma15g12390.1 (locus Gly ma15g12390) derived from phytozome v7.0 (chr-ID Gm15; pos 9154410 to 9154970 reverse strand)
cttgaggacaagaacaaagaggtaaaaaaaatcttgtgtttttcttcgagatcccgctttgatcagtgatgcataaaacaatgtatattagtaggagcaattctcacttcataaactggcttttggggttgaattatgtttaaatatgatactattaaagttttccttagtgattattgttggattattggatttattgattcatctgttatcgggctattatcaaatcacttgcaaacttatgttggagagttcagtgacatgcctaaaataccatatataagtgggagcaattataattacatgagttaatttttgagttgagttaagttcaaaattttagagatgttttggatctgattcacattgggaatggaaaagggcgtgtgtttcaataatgggtgtttggattttgaatttgcaggtggagaagttgaaggatttgtgtttgaagcaaagggaagagatcaaatcgttgaagagtgcgatactgttccctgatgttatgaattctcagcttcaagagcttctagagaagcaaggttcggagctgaagcaggc

SEQ ID NO: 25263 - DNA, 418 bp, Glycine max
  Intron number 2 from transcript Glyma16g07750.3 (locus Gly ma16g07750) derived from phytozome v7.0 (chr-ID Gm16; pos 7027586 to 7028003)
gggagattccaaagtcagaaaccaaaggtaattaagttttgaaattttagaatcgaatttgacttaaaaaccaaaaccaagaaataaacacaatggatatattcatggcaggaaaaggaagatacgtgactttctgtgaataaaaaattatttaatccacataaaaattaaaaaattagcgcctttagatgagaaaaacatttttattcactgctatacatggatgataacatatacatagtaattctggggcccaataaagcagcttgctgtgtcactgggactattttaattttcaaaagaacataatgatgtattaaattagtaagatacacaaacttgtgtaaatgataacttacaatatcttatttctataacaacaggtgtgcctgaagataaagccttgcaaacaatactt

SEQ ID NO: 25264 - DNA, 937 bp, Glycine max
  Intron number 1 from transcript Glyma14g12120.1 (locus Gly ma14g12120) derived from phytozome v7.0 (chr-ID Gm14; pos 10845443 to 10846379 reverse strand)
attatcaggtttgctttgcttcttttttttaacccttttttgtgtaaggggaataatagaagattttttttacatatattaaaaaagtaggggaaattagtgatgattaattttactaaaaaaaattcttgaaataagttaaccagagcttatatgagtatcactgagctctcatgaatcaattgatttacttgactagtagtcgcgaatttgagtcacgatatataattcatttaaatacttgaaaagagagtttgattgcttacaatgattctacctgactcgagtaagattgctcccacagaggatacatgtgatttcgatcaaaaaaacaagagttcatgagttatatgtcatttttataagctcggataagggttctagaagctcttccaaataccccctaaattgtaagttaatgatgataattttaggaatgggttggatatttactttttctaaggttgttacgggaagttataaaaagagcttatatgattaccaaccatgtgaatcaactgatacgggttgttctttagcttaacgagtgttcttaattcgagctctggatacgcaactgtgtcaaatactcggaagaagaatttttccatttatagtgattctacctggctcaagtaggacttcctcctgtggaagatacctgtggtctcgaacaaaataatagagtttgagtcatgtcattttcataatctcaaataagttgtcttcaagctcttccaagcaccccctaatttaaagttaatgatgataattttaagactggattggatatttgcttgtttaaggtgatcagaagttatagggaatcaaatgaatgggtgtgtggttgtgtgtgtttctttttgttgggttgtgttatcagtttggagttcatggtacaggttttcgttactgatttgtgggctgatcacacgcc

SEQ ID NO: 25265 - DNA, 982 bp, Glycine max
  Intron number 2 from transcript Glyma14g08720.1 (locus Gly ma14g08720) derived from phytozome v7.0 (chr-ID Gm14; pos 6745830 to 6746811 reverse strand)
gaatccttcgattgaattacaaggttcattacacacttttccaatcatagattgaaaatttgagattgcacatgatccttgcaatttttacatttatagctagagtgattttttaattgatagtgaaatatctttacacgactctataattacaagaaaactattttttaaatgttcaatttcctagtttgattattttggtatatcccgtgtactgaaattctaggttcttgcttgaatggtgctctggtttgcatgcgtttatttcttgtgtactagggtcacaattggcaattgaaaatttgaaatgttgcttgctcattttctggttggtggaactaatggtgctggcagttttatcctttggtgtcctgtttggggaactatttcttcataatttatgcagttcaaagcattactactacattttctcacgaatcatgctttgaactttctaatatgaagctttcttttctttgtgtgcctgtctgaaaacaagcttgattcacagtacaccggattatgattgagtttatcatgattgtacttgtggtttagctactatgatcctttagtaagtcttcgtgataaatatttcatttagtgtggttgcattagtttattctatgttcaaagtagctcgtaaagaacaggaaaagcaatcttctcctgtaatttaagcaaatccaaagatgctattggatggctaatatcctcttgcacaacagattttctatcccctttcagtaatgtcaaagtattcctcttttgcctattgcttagattgtgggtcttagattttatgctcatgtttgtaaaatcatatcctcgaaaatgtattaatgacattcatatcctcacaattcctcatttatcattgcactttcattttatccgcatcatgtgacatttctgtgtgtgcaaattttgcatctagttctctacagttagaggtgaaggagttcgagtttgttgctcaaag

SEQ ID NO: 25266 - DNA, 749 bp, Glycine max
  Intron number 1 from transcript Glyma14g39370.1 (locus Gly ma14g39370) derived from phytozome v7.0 (chr-ID Gm14; pos 48487440 to 48488188)
aggaaagacaagtgcatagtttttccccttgtgaggttggtactttggtgcacttctttcatgcatctatctcttgacttcaattctctcttgtttttttcgctgttcacaattttgtttatggaagtgtttatttgtttccttttactgctctagttgcaaacacgcccgtcatgattttattttatttttaccttttttgttcttcgtatgagaattattacgctatagtccttaaacaccttctgcttatgcattgagttgtgcccttttatggatttggttgatttttctggtaatgtgtgtgttggcaactatgtttgagtctgcaacagtgtgtacatttgattatagctactcttgtgcttgttaagacatgcctcaatttaaaaccgtcttttctcaagatgtgtttcattttgtctactatgtggtttgcataaacttcttcgtaagcactcctaggagtagaaaataagaaggtaaaatgtagtgagcttttttcataagctaaaatcatgttattcattttagcttttggagaagttaaatgataagagcttctataaaagttaagtgcataagttgattttaacttatgcaagaagctcaatttatttcaccttattattctcttctattagtgcttatgaggaagtctactgttttgtctgaggcccatcttatttgcataatattatacctgatatgattttgactgttcctttctgcatgtacttacaggtata

SEQ ID NO: 25267 - DNA, 519 bp, Glycine max
  Intron number 2 from transcript Glyma17g02750.1 (locus Gly ma17g02750) derived from phytozome v7.0 (chr-ID Gm17; pos 1826415 to 1826933 reverse strand)
aagttattcatagcttggtacctggtcatcatcaggtcagtttagtttatagtgctttgctcgttctaaatgttgattgagagtccaagtttcatgttctttctaaattttatgtatgtacgtgtgtgtctggataactggttttgcgcatttcataatttttgttgtctattgtttataattatgttttggtgccaaaatgttcctttggcattaagctctgtatcaatgataatactttgaagtctggacagcataagagaaatggttgttgagtgagtttatttatttccagaggttttgaatataagatctattcacaatttatcttctttttttttttaagattttgttttggggtgtttcattttctcaacttatgtttcagattgaagtgtttgtttatgaaacatgttagtggaattaagaggatgcaatttgagaaatttttttacctttattcttggtgcctagatacttatttcatatttatttgaatgcagtacaagttttttgttg

SEQ ID NO: 25268 - DNA, 717 bp, Glycine max
  Intron number 1 from transcript Glyma13g07590.1 (locus Gly ma13g07590) derived from phytozome v7.0 (chr-ID Gm13; pos 7786451 to 7787167 reverse strand)
cctcatcaacgctggtcctgaaaaccttcgtcctggttcgtgctattttgttcttttttttttattttctcggttgcatgtttaatttttttggagcaaaacttaaatataattctttgggaatttttggtgttattttctgagaatttgagttttactttactgatttgcaaaacaaaacttttaatttaatttgtttaggtaaaataaaattcgattttaattgaaaaacgtacatgcaattgtcttatactatagtactatctcttaaaaaatttaaaagagtaatagcaaatttttttagccaaggctaaaaattcactttttttaaaaaaattaatttggttttataatttaaaaaattatcttttaaaatgttactacgacgtaatatctcattaatattgtcatgttttgatataataaactgatacaacagccacatttattttaaccaaaataacttatgagattaaagtattttttaatttaagaaaaaaaactgaaattaaaaaagaagatatttttgccttttttttaaaaaaaaagtgctaaagaaacaatatcttgacacaaaattaacttgcatacagtttcttggactatagcatgatcttttagaaaattagcaacttttttgtaccgaataaacgtttaattgattatgttttgggtattttattttgcagctatttttcgatccttgttatacgaggc

SEQ ID NO: 25269 - DNA, 997 bp, Glycine max
  Intron number 1 from transcript Glyma13g16790.1 (locus Gly ma13g16790) derived from phytozome v7.0 (chr-ID Gm13; pos 20693401 to 20694397 reverse strand)
ttgtggggtggcacctttggggaattgtacaaaaggtaccttttccttttctctttctgctatatagtgatttgaatatgtttcagtggcttgtttgtttgaattagtcttttgagtaagagagcttgcatggtggtttccacttaccacaattcgaaaagctgtttgaaaatgttgtattacttgattgggaagtatgtaagtggagttttacaacaacgggtaagtttgtgtttgggaaatgaattcagttatatactatctattgagttggaatgagactgacatggtactacttgtttatcaactgccatgttttttgatgttgtaaaatgaaaaaagtactattctttctttactggatcctgaaaactgccaatgcttttgttgtaactcagaaagatatagcgaaaagtaattaggcaatattctctctgaagtacctttcattcttgtattcttctgtcaaagtttactgatttttgttaggaaacatgatggtgtaaaaatagcaacattacgatctaccattatctatttgttgtgttaggatgacatttttaggcatttcctctatgtctgttatctgtacttttcctttatatatatatatatatatatatatatatatatatatatatatatatatatatatatatatatgttttgtaatattatgttcatttggtagagggaatgaatttcccatccttcgtatcattaattgtaaggcagaagttttacacacacacacaaaagttgattttgggctgaacctttttcactggcacttattgaagtccatctgcctggcagagtttggggagtttaattcaaatgttcaatgattttagccattacaacatttgtcttgcagcacatttattttattggcaaatatatttacatcaagttcttgttttgtggacgtttaaagactcatatagaatttatctataatggtatatgatttttattttaccttctgcagaccatt

SEQ ID NO: 25270 - DNA, 855 bp, Glycine max
  Intron number 2 from transcript Glyma15g05480.1 (locus Gly ma15g05480) derived from phytozome v7.0 (chr-ID Gm15; pos 3869761 to 3870615)
aaggtgaaattagtatattcctgatattttgatgtgttagtgtttcatgtaactgaccttaccttttgttgttgttgactttatgtttgctggaataacctaatttagtttactgaaacattaaattttttggttctgagatcctgttaagggctctctgctgtaagtgtgtttgggacttccgcgcaagcattttcttacatgtaaacatatatatatatatatatatatatatatatatatatatatatcattcatcgtgctatgctgaagttgcggaaattatttatttagtttggaaacaaaggactgaatttttttaaagaaaataagcgttaaattgttgtttatatccattttcagcttagggaacatagaatagaagttatttccctttttttttcttcctttttatttttatttttactatacgaacaaataaggtttgagactttgagcttctcataatttttatttaaccatttcaaacttattcttttttttttcccgaaacgagttttccaattttgttcaccatttcctcagataagttcagtgtgcaaaacaaatgcagaatggggattccagtgcctgtgtatttctctgttttcaacctcatattagccttgattgaatggttgggatatgttctcaaaatctttatgcctactattttgaacttccttactgtttgattttagtgagacactagcactagcatgctggatatgctgagcatttacttttttgcccagttaatttgccgtcgtgcatggtattgtttcttagatcgataaaatctttgaatctgtctttcctttgagctgcagctcctgaagtgggtgctgacaattt

SEQ ID NO: 25271 - DNA, 679 bp, Glycine max
  Intron number 5 from transcript Glyma13g16770.1 (locus Gly ma13g16770) derived from phytozome v7.0 (chr-ID Gm13; pos 20673188 to 20673866 reverse strand)
ttaaggctcaaaacaaactcatcaaaagtcgtaaggtatgcttcacaaattacagttatacattattttgattcaccctgtttatcctaccttattcgtgtatggtcatgcattatattttgtggttttgggggggggggggttgtctttggaaagaatgttggtgaggaggaagagatgggcttggttggttgtatatgtatattttcacctgtttacctgctatggtgtaaaatataaaatgtagtttcattttctatataatttttcgtttttttatatactatacaattttaagttatttgagctatgacatgggagaaaaaaatgcacctgtttacctgttatagagtatttttttttctttctcgcttggataaataattaaatttagaatataagcctatacagctaaattacatgttaactacagtctagaagtgttatttatcattgcaagggagcattggaggaatcactctgaatattgaacttagaaatgaaccgtgatacagtagaataacaattacatgttgcattattctgtgaaatgttattattacatttagtcatatggcaaagctgtacagcctgctttcttgaatctgttttggaccaaaagaaatagtgttactccactgatttccctccctttctaattgattgcagccatatcttc

SEQ ID NO: 25272 - DNA, 317 bp, Glycine max
  Intron number 2 from transcript Glyma13g36170.1 (locus Gly ma13g36170) derived from phytozome v7.0 (chr-ID Gm13; pos 37491493 to 37491809 reverse strand)
ctggtacctaaccatttttcttgtcagttatttatttattataactttttgacattcatgcttttctactatgttcaagtggataaggtccacattcttgttgccacatcttcatcagatataaatggattcttttgtttttatcttgtggtgaggaagcttttgaactaccaaaattactcctcttcaatgtcttttatttgaattcaagtttgtttatagtttaatgttgttttcacacatgttaagaattaaagagagaaagtttttttttttgggcagttactgaacttgtggaaggtgattcatcaaggaaa

SEQ ID NO: 25273 - DNA, 1020 bp, Glycine max
  Intron number 1 from transcript Glyma13g07650.1 (locus Gly ma13g07650) derived from phytozome v7.0 (chr-ID Gm13; pos 7857518 to 7858537)
gctgaagcagaagggttcgtcactcgctccatctggtattcaactgtttctctcgcttcgcttattccccattttctctcttcaatttttttatcgcttaatttgcttctgattatcacgggttttaatatacaacaattttgagccaatccacattccccaatcccataatcttcctaattctcctttaaaatatatgctttaaatttgagtttttgattggtttgaattgatttctattaattgctttctattggaattaaggggcttgaacatttgtccatacatcattcttggaacaatgtaatgtttgcatcgggagtgtgttggtgagagcacaaaaggaactaatctttgtcgtgattatagtccttcgagtttcttgtttagtttttggatttgggcttgctgatgttttgtctgttagctcagcaagtgagaattaaggggggagagaactgtttcagttgatgacattgtctcatttaatggtgaaaattctgagattggtggtgattttttattttttgtgtataatttctatatttctatattcttaattgtgaagcttataaatttctttagccttgtaaccctatgagtttggtttgggttgtcacttgcttgtaattaggatttcggaaaatatgtatccactttgatttttcctttttagctcagtaagtgagaattaaagataaaaaaaaacaagagagaggaagtggggaggtggaaaactgttttagctgttgacactgcctcatgtttatacgagtcttccttactgaaagttatgagattggtggtgattttttgtttttgtttatggtttctatattatatattcttaattatgcagtttctaaatttctttgtcattgtaaccatatgaatattaggtttggttgtcacttgccttgtaattggattttggaaattatgttcactgtgattcttattttgatttactaagcaaaggttctgatagtggcttttatgtcatgaaacagattgaacaaa

SEQ ID NO: 25274 - DNA, 736 bp, Glycine max
  Intron number 3 from transcript Glyma13g35490.1 (locus Gly ma13g35490) derived from phytozome v7.0 (chr-ID Gm13; pos 36899976 to 36900711)
gttaaggcttgtgattctgcttcaattgattcccggtactctctctctttcatgcatcagaggctattataagttactatgacttagccattataaagggttggtttaaactttaaaatataggattttgattttagttgttaaatggttggattgaagcacaatggtgtgcgttgcttggatgtcagcttacttattagttaaaatcttatgttgtctggtcatgcaatcgggaaatttccacccgtgtttttcattttttgcatgagaccatttgtattctcttggtacgataattatgctcgagttgggtaaggctactgtaggtgacgaatctccccttttaaatatttaatgcaattgcatcctcaaattcaagttgatctatgcactcggtggtattttcactagtgtttatgtcttgggtttaattgaatcagaactacaaaatagtatttggaaaaacctaaactaaacagttgcagttttctagtatacattttgggtgtgtgtctctatgtataattttttatagccaccatgtttctgctataatctgcaagaccctcagccatatttttttaaggaagatctttggcttgttgacatgatctgccatctgccgtttaataacactggttccggcccagtgttgaaacttgaaaatgaaattattttggtttaattgagttgcagcaaagtgacatttatctgtgggcgtgctggtgtttgtgct

SEQ ID NO: 25275 - DNA, 720 bp, Glycine max
  Intron number 1 from transcript Glyma13g28320.1 (locus Gly ma13g28320) derived from phytozome v7.0 (chr-ID Gm13; pos 31364774 to 31365493)
gagcagtttcggatccttcgccagaaaggaactgagtaaattcccaatctaattcttcgctttctctgcactatcatctgatgagttgttgttatttgctacttcaaatattctctcatttttccctctatatgttcgtgataaaagtgtaaaagtggatagttttttaaacacagcatcactgggtgacggctgatgatcttttagggtaaatgaatgtgattgctctcctgtggattcgtttctgctttgtgcagcttttagttggttcagttccatgcactctcttgttggtagtggttttattggaaaatagaagtgctatttatttgatagttaaaatattgacttgctccaattagtctttgttagaagtttcagtcctataataaaattggaaaaaacggtaagttttagttcctgtacaattttttgtgacagttaatcactgaatttttatgtagctgcatcaaaaagttttttagtgttagcgactaagtccaaaatttaactttttatgtatgtgcagatactaaaacttaacagttcttacaatcgaaataattataagggccaattgaataatttaaccttattttgtaagtgtaaacacttactaccctttaagccatgaaattggtttacgtgagttggattgtaacttttcatgcaccgggagcatgtgcagattgaagggtacaggagaatataacaagtttt

SEQ ID NO: 25276 - DNA, 935 bp, Glycine max
  Intron number 1 from transcript Glyma15g13200.1 (locus Gly ma15g13200) derived from phytozome v7.0 (chr-ID Gm15; pos 9820497 to 9821431 reverse strand)
aggtacgttgcattttaaactattgttattgtcagtcttaagtcttaacaaatattatcatttggcaatctagatttggatatatgtttgctaaaacacatttacatgcaccacatcaagcatacatatgagagtgtgtgtatatgcaataagattttaaattaaaattttcaattgtattatgtttttgttgatggcataaatgcttgtaggattgtggcttctttgtgatgtattcaccctgatgataagcaactaaaaaagcaagtgactttttggatttttcttctcttccttagtttgctggtcttaagagaaaaacatctataggtttggaatttaacagatttggattcgagttttctaggataaattaagcgtggaaggaaaaccaatggaaattggatttcagttgatgggttttagtacaaactagaacaaagtccgtgtgggcagcacaacagagaccaacaaatctcaagttgttgtcgttagtttttcaggaaaatcattaagaaatcattgagtgggaaaacacagcatcaagagcttgacacctagcactaagttggataattttaatatagcaagaaacttttcgggatgtgatatggtgattttttgaggagaaaaataaattaagaagacaaaaaaaatatgagaaaaatacaaaaataaacctaggattccttaggaattaaaccttgggcttgtttgagttagtgccacacaaccagtagatagcagttcatctgaaagaaagcaatacagctatttaagtagacatccaatgacttgtaccgcctcccaaagaaaagaaaaccttcaatgacataccccacaatgaattttcctcagaaaccaatctaactcgatattgattggacttcttacttgtaggtcccagtcagagttgcaggagggctgttatttga

SEQ ID NO: 25277 - DNA, 617 bp, Glycine max
  Intron number 1 from transcript Glyma16g21470.1 (locus Gly ma16g21470) derived from phytozome v7.0 (chr-ID Gm16; pos 24365301 to 24365917)
tgattttttctttctttctttctttctgggcacatgtaaagttaatgtttttattctcaaattgaactaaacaccaggttttctggaccactttgctgctgaatatagatgtcggctactatactgtgaatcaaacttcaggtacattcatctctttgattaaagtcctatgttattcacatgttgttatttccccttgcaatctgcttcttttttgctttaatgggagggactttatatctttattctttctcgtcatggttttgtttaagattcactttgcaactttgtgcctgtgtttctcttttgggttactttgcctggaactagcttaacatgcctaataaggtcttgattgtgaagtccagtttatgcttaatgttttaaaagtcacagttttggggatgaatgtttaactttttactttcttaatatccccctttttttaattcccttagaatgttgctttacttgttgatttagcagtgtgatcgataatggctttccaaagggaaactacaaccatgattggagtttggcttgtggtgttgatggttctctccaaagggttatcttcaacaggggttgtaccagataatttcactataccttctttt

SEQ ID NO: 25278 - DNA, 642 bp, Glycine max
  Intron number 1 from transcript Glyma15g21010.2 (locus Gly ma15g21010) derived from phytozome v7.0 (chr-ID Gm15; pos 19194930 to 19195571 reverse strand)
gtcatattttgatcaaacacctctgcatcaggtgtgattttttcaagtttatatctttattcttatctgtaattacctttggttttaggcttctaatatttgcttaagtctaatctttgaacctttaacttctttatcttttgcttctgaaattcaaatgatgttaccaaatgatacaatgcaagcaaaagttcctagattcatcgagatatagaacagcatataagttatcatgcttgcatatttgagttcatttgcttttggtttaatacggtatcgatagcaatagctgtttccagtaaggcaagttaagtcgggatataaggaaagcaactgaagcaaggtgcctaagccttccagtaacgaggtcttttagagttagatatacttgtcatcagttagaagaactcagagtctaagatggttaatcgccggagacgagcgagtaatagtctattttctgcatttgtttagaaatctctgtttcatgtatagctgtatagctgtatagctggcattgaaatgaactttagtgaaatgaaattgttagcagaactgaaaactgtaaagatggtgtgattatttgtaattaatctgctgcttttttttatattgcttctgttgaacttttggtagacccag

SEQ ID NO: 25279 - DNA, 219 bp, Glycine max
  Intron number 5 from transcript Glyma15g29960.1 (locus Gly ma15g29960) derived from phytozome v7.0 (chr-ID Gm15; pos 32984203 to 32984421 reverse strand)
cttattcaaggtttacttggatatattttctaaggaataaatatgatgctttatctgtttttaaacaattcaagtcacttgttgaattacaatttaacaaaaagattaaagctattcaaacagattcgggaggggaattttgagttttctcttcttttttgtcagaattggggatcattcataggctgacttggccacgtactcatcaccaaagtggtg

SEQ ID NO: 25280 - DNA, 1031 bp, Glycine max
  Intron number 1 from transcript Glyma15g16870.2 (locus Gly ma15g16870) derived from phytozome v7.0 (chr-ID Gm15; pos 13127627 to 13128657 reverse strand)
ttctctggtaattgtttttctctcttcttttttattgcttttttggtttttcttttttctctttcattgttgtctgtctcagaaacataaaagaaaagcaaaggtttttgagtttttgggtggcgtgcaaagacacccttttaaagattcagattccgttttcatgatgttagcacaagatctcctttttttcttctctctctcagatttcgatgcaacagcacctcaactgaacccagaaaaggcacacttaaccgaacaaaacgccatctcagcgtggtgacggttgagattctcccgtttctggcgtcaccttgaatctctccgagtcaccaaacgcaaaaaaaaaaaaaaagtttttttttttataaaatattcatgtgggtccttggattgtgattcttcctttgaccctctctcggggtgtgcctttctgggcttgtggatgagttgacacctgattcaaatgagattgtgttttgcgtgaggacagagaagaaagagagatcagaaaaaaattgtgcttttgtgtgattcttatatatctagtggtgctaatgggtcaattcatgacacttgttagttcactggagatgcttgtttgacaagatgattaataataataatttaatactctgactgggacatctgagttttttggaatgggtagggtggtggtaggagggtatatatgctactgctttatgaggaccagattttgaaattaaattagttagcaaaagggaaagaggatgatgtaagtaagtatattgtttttgatggtgacaattgttttttttttcttcttctaaattgtgtgtatggcttgattaaagttagaaataaaggggggaaagaaaacgggaagaacaagttagctttgtttgttcttgttgatggatgtgattgattgcgtgaatgtgctaagtacctatttgaaatgaaatgattaggtattgagacaggagatttagaaaaaagagatgatttgtttccacagattctaagagacgaggcagttgcaaggcttt

SEQ ID NO: 25281 - DNA, 651 bp, Glycine max
  Intron number 1 from transcript Glyma14g01920.1 (locus Gly ma14g01920) derived from phytozome v7.0 (chr-ID Gm14; pos 1114539 to 1115189)
cagagacttcaatcactacactttggccttggaaggtatctatctatcttgtttatgttatcctcctttttctgaatgataatttatgttacatgaaagtaggagctatgcctaggaaacaaaaactcttttttgtaccgccattattcagtataggcctattaaataattatatgggagctgaccaaaatattgttgccagccttgattggatggtgacattgctgacagcgaaatttgttttgatatccaattgctgaaagtttctcatttttgaagaaatgaagtttggatctagcatgagttcatactgaccagaaattcatctgccatctacctgagtgcaacaccaagatttcttgtgctaattatgcagaatttatgaatgactaaaagttagggatttcataactgatgtatatgttagggaggaaattaaattttgttgatttaaggatcaactactagtctactatatttgcttttcttttcaaaaatgttttttgttcctttaacatgcttgcagattttgcacatcagatttattatttactatgattaatttagctgattaaagtttgaacctggaattctaatatctgttgatgacaatgtgtaaggttcgtgagttggccgaaaaggagcctgaaa

SEQ ID NO: 25282 - DNA, 375 bp, Glycine max
  Intron number 2 from transcript Glyma14g09840.1 (locus Gly ma14g09840) derived from phytozome v7.0 (chr-ID Gm14; pos 7913081 to 7913455)
atccaaatccttagaagaacttgggcgatacactggtatcaccaccttcatatctctttcagatgttttacatattcttgtattttgtttgatttagcatgctcttgctaagagctgtaacttttgcatgtaggatattgaaagttttactctattgttaagacaatcttgaacaattgctcatattagcatcaatgcattatgaatgtagctacattatgtgttatgtattatgtataagttttttctgttttttggcctgagaagaagctacttacacatgtgtggtttggcactcaaggctgcggattctaattattgctgctttcttatttaccagaggctgcaaaggagtgcagaattgctgtggataca

SEQ ID NO: 25283 - DNA, 886 bp, Glycine max
  Intron number 2 from transcript Glyma16g29890.1 (locus Gly ma16g29890) derived from phytozome v7.0 (chr-ID Gm16; pos 33528578 to 33529463 reverse strand)
tattttccgcaggtaaaagttaacaaccataattaattaatgattatttattggattagggtgtctttggttaaacagtttaattaaggacttattgatataagcttatacaagcttcactgcgtgaagcttattgatacgagcttatggaaaatgcgtattttttaaagagctgatgtgaactttttgaagtggtttatgactttccttaaagcccttttaagcgtgaaaggagaagggaagggagggagaggtcatgggttcgaattccccacctacatctaacaaactaacattttcggataatttttttttccagaaagagttataagaaaaggtaaaattaagctttttccgtaagttaaaattaacttatgcataatttaaaaccagcttttggagaacctaaagtgagcgattttctatagaagtatataagttgatttaagacttagttcattttactttcatattttcttcttctataagtgcttactgaaaaatttatcctaacactgcctaaattaaattgtttaccccaacgtttccccgtcctatgccactttcacgagtcaaaataaactcagtataagctcttttaaatgtttccttagtgatatatttgtctaaaatttatgcaagtatttctatggtatcattaatagttgagagaatgattgtgaaggggttggagttggaatgtttattaccagtgtgccgatattaaatttgatgtcaaaaactaatggctctgcaaagtgaaatcttgataatggggcatataagaatgtgtccacaatatgaaattattgtactatcattttgatgctttttttaaatctgttctgcagtttatcccatactcatttatagagaaagaagcaag

SEQ ID NO: 25284 - DNA, 937 bp, Glycine max
  Intron number 1 from transcript Glyma16g34630.1 (locus Gly ma16g34630) derived from phytozome v7.0 (chr-ID Gm16; pos 37251813 to 37252749 reverse strand)
aaaggtatagatgcatagaaatttaacttacttaaaacagagtttttacttataaaagaattcctctccctttgcaatcatcgagggtatgttggccaacatcatgtaagtttagcataacttataatttgacaaattaaggatgaatagccatgtattgttaatttcaaaacgcgtcttttttatattgatgttgggtgagagaacgacccagtagcggctacgtcaactttcttgatggccgccacgtatcatataaccaccacactgtttatcaagtgtcttcgttcaagtatttaaatatatttaagtcatgttaataacttgcgaaatttacattgtaactacttttcattcatattctttcttcttcaccaatgaacaaacatagcaagtaaatctcactctgaaatagatgcaaattggtgatgtttcctcttgcatgtttgacaagcaccacgggattgaacaaaataatgatgatattcacctaataatactaacttactaaaccttggaccaaattaattaacttgaccttgtctgtaaatgtaaatatagaaatttaatatcaaggcaacctgctggatcttgttcctaaccaaatggacagattctagtcttgtaaatccaaatgcagcaagaacaaatcttataaaagaaatgaagggattaatgaatagtaagaataacataaatccttgttcataacttgggaacaaggacaagtatatagctagctcaagcaccaccaatagttccaaaaagatgacggtttgactttggaaggaagacattaatgtatcttagcattctcacaaaacatcatacgcaaagagtgccaattccaaccgatccactcttcttcgtttgcaatttttctctgaatctgatttcttcagctatcctttctacttctccccaaccagggatcata

SEQ ID NO: 25285 - DNA, 972 bp, Glycine max
  Intron number 2 from transcript Glyma13g03920.1 (locus Gly ma13g03920) derived from phytozome v7.0 (chr-ID Gm13; pos 4139551 to 4140522)
gaagtactcccaagcaggtgtgctgtgctgcaattcacggatgaatatagtgatctgaatgaatgaaaatgatcatgaacccttctttttccattatgtttaaaacttgttctttttgggttttccttattctagtctattcatgtgaaagttggacctctgtatgagtatctcaataagaagattttcataaaggaagctccttctggcccttttcatcacaaaggggtttcggagtcagagtaccgtacgtacccagttaaacattttacttatcactgtcataaatggttcgcaactgcaattgtggatgcaattgtcaagatttttgggtatctgtaaccgcattgggaccacaattgtggctggatcagctatatttgtttgcaattttccacaatatcaaggattatggctaaatcacaaccacaacttcaatttaaaactttggactcacggaatatctaaatggtttcaatatctgaatccatgtgggtttctatgtttggtcctaactcctaatctgacccacatatgacatgaaattataaggtaatgtcatatagtgtaatgactcagtgatctgattggcatggttatttgtgataaatagtataatttatgtaacagaaagtggctagtccgttctttatataccgatgttcaacttctgaatttttatttgagatttgggatgtctggttaggtattgtgttgtttaatctttcttatagtaacatgttaatccctcaaagtatattctttctatggaaatacaaacttttgtttgttttaaacttcctcattattgttattcagatattatcactatgacactaagtaagatttggaattagcttccaggatgctgaggaagggtatttcatttgtttttcaaaagctttaacaaggccaccttgatttacacttttgtaccatctcgtgtttgctaggttcgcataaagaaggaaa

SEQ ID NO: 25286 - DNA, 570 bp, Glycine max
  Intron number 2 from transcript Glyma13g44070.1 (locus Gly ma13g44070) derived from phytozome v7.0 (chr-ID Gm13; pos 43620067 to 43620636 reverse strand)
actgaagcaccttctcaatctattgctgcaacaaggtactctttggttatgaatttttattgttgcaagttttttttttttttttttattatgtatgaattatttaatcacatacggtttagaaattatgaaaaattttaaattaacttatggctagttggagtgctttgagttgttagtaagatttgtacttcttatcctagccttattgccgccaaatggtgttggctacttggattctagattttcatttcacccaaactcaatcatgtatcatgcattcatgaagccccatggttaacttgatcctctgaaacagtatcccatttcccaattcccattgtgtttcatttggtctccctctagccctttctaaaggggcacctctttaacttcacattttcttactaggatgagtggagaccgtcttcttacatcccaaaattgatgggtttccatcatttttcttaaagcagaaagtgcatgataaaatgattacacatagtcaagtattatggtcattttcttatttcttttgcatggacaggctccttgctcgtgaggggataa

SEQ ID NO: 25287 - DNA, 567 bp, Glycine max
  Intron number 1 from transcript Glyma13g44070.1 (locus Gly ma13g44070) derived from phytozome v7.0 (chr-ID Gm13; pos 43620659 to 43621225 reverse strand)
aagctgctccttctgctcagttccctccacttcaggtttctttctcttcccaactaactcacttcactttactttacaatttcatcttcgttttttatttgtcaatttcgtaccaatgccgcctaatctacttgttccttttaatattcctccaaaacaattaccgtttgccacatgcttcattttctataaatcaatttttcactgttttattttagttgctatggaaaattccgccaagaagaacaaattgccttgactttagatgtattttttctcattaagtggtgtttcagttgggtactggaacacattgaaactctggttactaatgcataaaatgaatctggagactgagtataagtgtctttcaattgtgaactaacgataacttccatttgaccaagttaatggataagcattgcttgctgtcagtcagaattgtcactaatttaataaacaagaaataaatgttgattaaatattgattttgggttctctggttttgaattcacctttttacattgttcagaggaacttagatcaactggaagcattatccaagaa

SEQ ID NO: 25288 - DNA, 976 bp, Glycine max
  Intron number 1 from transcript Glyma13g18670.2 (locus Gly ma13g18670) derived from phytozome v7.0 (chr-ID Gm13; pos 22337817 to 22338792)
aagaaccttcaggagaggaaggagcggtatggttcagtttatctctgattctgataaatgttttttatgtaacgggaaacatttatgacacttgctcgtcttcaaaccacttgcattcctctctgcttcttataaggacttagtatttttctttaggctggagttatgtcctgccaagcctattggatgctttgaattcgatctctatagctgatgctgttgattgatactaagtgttaaattttttgtcatatagagtattattttgttggcatttgtttacatcattttgtaaatctgctagtatttgtttttagtattgccattgcacttttccatcgatatgtagattggagtcacactacaagatatgttaaatttttggcacttggttgcactggtttagctaggattttccaaaaatacagggaggactttctaatggggagtgcgattgaaaattgaagttggattatgtctcattgagttcaatcttatgaaaatgtttgaatttgtaactcaaatttggtagctattgccattatttccgccagaaagtttgaatttttttgggaaatttggaggactatccatagaaagagtgagttacttgttttgtttttcatgaagctaatatgtgaacttgcatctactgggtttgaagatatctctctattatgtttttattaggaaggtttaatgagatccaaggtcattggctcaaacacaagctcttatactgtgggagctataaagttctaataatttacttgatcggaaacgtactatagtgggagatggattcctctctctactttttgttgaggtgcatgtgaaaattgttggaattggaagtggcatctttgcttgaatgttaatgtgtactgtgttagttactttggcaaacatgtaataaacttttataacacctcacttgcttataacagtcgaaccatcttggaaaagaagttggctg

SEQ ID NO: 25289 - DNA, 440 bp, Glycine max
  Intron number 1 from transcript Glyma13g31230.1 (locus Gly ma13g31230) derived from phytozome v7.0 (chr-ID Gm13; pos 33674469 to 33674908 reverse strand)
gaaccttttgggacaaacaacaccagcttttgcaggtaacaattcattacttaatccacccaataccttcctcaatttaattactaatttgctagctactgtacgcctatctaagaaacttgcatgcaccctgttaatttattttgatttttttaaatgttctcgttagattaaattgttttttttttatatagtttttctatattacatgttttaccttatgtgatttatcatgtgtcatcaagttaataaattgacgaaaaaatgatttagtctatcaacagatgtgtttttttatctatagatcaaagaaaataatgagatgatggatcaaaatgtatttaagttgtttttggttatctgcaaagaaaaatataaattaaggagtatatatctgttttaaccaattaagtagggttaaatttagtgcaggccagtat

SEQ ID NO: 25290 - DNA, 501 bp, Glycine max
  Intron number 2 from transcript Glyma15g01840.1 (locus Gly ma15g01840) derived from phytozome v7.0 (chr-ID Gm15; pos 1210706 to 1211206)
tgcagtccttcgacaccgagcttcttcctcccgaggttgttattttcctcaacggaagaactttcatttgatttctgtgcttttttgttctcaagttattatttaatactgtgaataacggtcacattgcatccgtaatctgttgaaagatcacggctacagaaattttcaatttctttgagtctctaacccttgaaagtgtcatactatgcagaattttcgttgatgttgtggaaaattgtatgttaggactttgtgttttttaatttattcattccttttcatatgatgtgaggattgaaagcattttctcaatctagatattatgagaattgtattctcaagttgatcatataggtttataaaatctttaagttaatctgttttgaactagccaactaggatggctgatctgtccttttgtcgttgtaagtagatgcacatgaaaaggtagcttaaatttgtttataatttttctgtcctgctagctgccagtctcca

SEQ ID NO: 25291 - DNA, 495 bp, Glycine max
  Intron number 1 from transcript Glyma16g31220.1 (locus Gly ma16g31220) derived from phytozome v7.0 (chr-ID Gm16; pos 34651609 to 34652103)
ttgcaaaacacctgataatctctcacagtgttctggtatgttcaatttcaaattaagtcttccttttttcttaaagaacactacactacagtgttatgtttccatttcctatgcaatgaatgatctataagtcttgttagtgaccatatatcaacttatgtttttatctttcattgtttgatgataacattatcaagcctttcattttccttaaagagcaaaagagtttacattccatttactatgtaatgaatggccaacaagtcatttacttcaaacttttctaattttctcattcataactagacaataacacattttaaaggggggaaaaagggcatctaaatctgccaattttactttgtgtatctgttatctctgagttttcaactgcgaaagttaaaaatatttgaggtttgatttttcctcaagaaattcttgtttgaaatgatttgaacagcacttctgcacttggatcctaaatcacctgaagct

SEQ ID NO: 25292 - DNA, 732 bp, Glycine max
  Intron number 1 from transcript Glyma13g42470.1 (locus Gly ma13g42470) derived from phytozome v7.0 (chr-ID Gm13; pos 42456503 to 42457234)
gcgtcttatgtaagtttctctctatctctcttttcgctcaacttctgacaactttcgtgccatatatctcatgctgctcttcgttgcactcaatcacaatcacaatgcaatacctgaaaattaccaatacatctgctacttaatagtttcaactctttgacattatttattttcattgatccgtcaaaggttgaatcttctccttttttttcttcattagtacacggatcggctagtgattcggaatttgaacaatgatatatctgtgaattcgagatttatatctatttctgttgaagacgttctattctcagtatttgctcataaacattaccaacatcaatttattattctatatctgcgtttctgaaagcattgctattgatgctgtgtgcttagataattggtaacaagataaatagattcatttttctcttctttagtttcaattggaatgctgcaagtcttaatttgattctccttcattaagagaatactctgtttagcttgggatgattttgtacggtttgtgtaatgtccaatgcaataaccatgtgctaacatgtattataaaatttattgttctgtgtctatgaaggagaacaattatcaaactgaaaaaaaaaagtgttgcaccttccttaatgaatgagatgatgtggtaaaatgattaaatcttattggaattctgtataataaattgatcttttaatgatatttgtttaagggctc

SEQ ID NO: 25293 - DNA, 721 bp, Glycine max
  Intron number 2 from transcript Glyma13g42470.1 (locus Gly ma13g42470) derived from phytozome v7.0 (chr-ID Gm13; pos 42457378 to 42458098)
ctcgaacagaaggtaagcatcacagtttgccaggcacttatcaaagtatcaagtcataaagattttttgacagccagtgagagagaaaagaaagagagacaagatgaagtatgataggtgatatgatttgataggaagagaaagatgtacagaacataagggtattaattgggtgttttatatttgtgggtgttaaaaaatcaggactcaattttatttggggtccgaggatgctagtatttcctagggttggttatacctgtctgacataattcttgatgttgaattgatagatactttttttgtaggatactaatgttatgcatatttcagtttcaagtacctgtttaaaaaatatcaaaatttaattagccttgagtttgaaagtgttttcatgaagcgcaacagttctatcaaatatgtaatcttttggtcgaaccctttggtatatattatttaaaaaacaattaggttgagatgttgattagtcaatcacagaaggtatcattagtcttcaatttaattctaacttctaacacatgataaaaacaattctatcgacatcaggcttgatttttccgctttttcctttttgatcaatatcaaattatcaatatgcatccaacaatatcatataatagtcctgtttctttcgtaactggtatattgtttcgcattatctacagctgagatcacattactcgacaacaatatcattatt

SEQ ID NO: 25294 - DNA, 591 bp, Glycine max
  Intron number 2 from transcript Glyma13g04790.1 (locus Gly ma13g04790) derived from phytozome v7.0 (chr-ID Gm13; pos 5065085 to 5065675 reverse strand)
ttcaaacgcccctttgcttcatcacgtgctgattcgtatatttcttttcctttttttccaatttcttgccctatttttgttatctgttttgtttatctgccaattttttatttatgactctgaaattgctagtttgccctattttgtgctgcgtgaatggaacatgggtctgttgttaagtgtgtgttttcgcatgtggtgtggaattgttgttgagtttagttagggttgtgtttaactcaacttgaattgactttggaatgggttatctggtgggatcatggattttagaagaaatggacgtgttaattagggtatggctaaagcaatttgatttgttctaattgtatgtgtgaatattagttaccaggcaagtaatatgagtaacgttgtaaattacctcattgattaacttagaaaatggataaatgtctacattctttcaacctgaggaatgaggatattataaattttagatagtttggacgttgaacaagtgaaatgtttgatggcttgtagagattagcatattatgattgttaatattctgggtatctgaaagtgcatgtgtttatgttatgcgatgaagct

SEQ ID NO: 25295 - DNA, 791 bp, Glycine max
  Intron number 1 from transcript Glyma13g44750.1 (locus Gly ma13g44750) derived from phytozome v7.0 (chr-ID Gm13; pos 44143632 to 44144422 reverse strand)
gccatatctctgcctgggtttattgaaggtatttttctaaaccaaaacatggtttcctctcccacgctggataaaccaaagtttgtgcattactctttttacacaatatttataccatatgtttaagctgctatggactaggggaatttaattctcttaagtaatgcctttttcaagacttttgaaccttcaaattccatggaatgaaagttctgatcttttatctggaaaagaaaggaaacttaatccctgttcagtaattttatgtctacagaagatgtttcttgtgttgtactgtacattgctttaagtgagaagtgatggttcaagggctattggtcaaacatgctaacttctagaaggcaatcattcttatcaatttccaaataagtagtgagaatttttcatagtttgtatatagcatcccatacccaattttaatgatattgataccttgacatgttttaaaaataaattatttatcatgtcaacttaaaaataagatcacttaagtaggattattacataaattttaatggcattgacaccttgacaattgacatatataattattagtttacaagggagaaaacaggatgtttccaaatgatattgaattcttatcctgcccttgtttgtatgccttttatgaagtatataaatgtcaatattaaagtaccaagtctttgtccataaataaaccaaaattttagtctaactatgctttattttatcatgttttattttattttcttcatctaaaatgtgtttgaaattcgtccaggtgatta

SEQ ID NO: 25296 - DNA, 983 bp, Glycine max
  Intron number 1 from transcript Glyma15g15760.1 (locus Gly ma15g15760) derived from phytozome v7.0 (chr-ID Gm15; pos 12123062 to 12124044 reverse strand)
gttgtaatgccccccagtgacttgatcatgagtttaaattgaatgtcaatgtttgtgtgaaccatagatgaaagtggagtttgaattgatagattttaggtgctggatctagtcttgaaatggatgtgtcactttaggtggtgggggatgggttaagtgagcataaaggtttcatcttttgggttttgtttgccttttaaattgattttcctggtgggttttgtttgctttttaatgggtacttctcaaattttgtaaatttttcctttgattgttgaaatggaatcaatagatgaatggtgagaagcagaatttgggttgttaagttctaattaaggtttgttagtctgctataagtgtttgattttgccttttggtgacattcattatatataggaatcagtaacacctgatttcaatgtcatcttgtgcccttgtccatcagcaatcagggatcttgatgggatatcctatcattttgactatcctttagaggtagttgtgcatcagatggtcttcaaacaaggcctaatcttgtgaatgtgaagttgtgtatagaaacaaaatgatccatagacacctagtgctaatatacacctacagagagagaagagtagatatgatatgtaatataatgcaacaagaagagagtaatagaaagaaatgagaggtgtcaaggagtgtttacactcttgtaaatgttcatatatcattattcatcactccaatagaaatgcgtagtcaatggaggtctttgtgtatgaagacttttcaggttttattttcacttatacctaattttttgtttatatagccgacaaacaatgcaacctctacatatgtgagtttggaagctggtggtttttgtcgacttctaagattaaaactttcatttgcagtgcaatgagtattttagtgctttacatattggctttctgtaaattgcagcttactgtgttgttgccaaggaatctgttagcaag

SEQ ID NO: 25297 - DNA, 601 bp, Glycine max
  Intron number 2 from transcript Glyma14g24620.2 (locus Gly ma14g24620) derived from phytozome v7.0 (chr-ID Gm14; pos 29581523 to 29582123 reverse strand)
tctcacatcatttacaatactattgatataatccagtatgtcctattcttcacaacctttatgtatcattctattctacttttacatgaacagatgtgcataaaagaactttgtttttgaacagttatgtggaacttgaaattgaaaataccaaagaaaaaacagttgaaaaattgattgctgagcaagctgttctcttcatctcattactccaaaaccaattcccttaaagcagaatattgtgtatgcactttagataatggcaatgttttaaattgcggttgtggacacggtttcattgcaatctttgatgttgtgagaaattgtaaataaatgtggccgtgcggtcacagagagtccaaaaatcttgacattgctgctgaaattgcagttgtagacccttgttttgaaaaccttataattgagtggtttgtattgttttttgataatgcttaatcaaatattgagctttttgcacactaagaatgaaaaatgtgtacaactggaagttactatcaaatcttatgttaaaaattagaagttttagagttgcattgaatgttcaggtacatagaaagaattgctgtggtttcctcagggg

SEQ ID NO: 25298 - DNA, 798 bp, Glycine max
  Intron number 1 from transcript Glyma14g24620.2 (locus Gly ma14g24620) derived from phytozome v7.0 (chr-ID Gm14; pos 29582352 to 29583149 reverse strand)
ttctctgcttctctctgggtatgtatgccactctctccaaacaccattaccttgtcaatttcttgtctgcttatgcttatgttgtctcttcttcactttaattttgttgtgagattggtttgtatgagttcttagataatccatgttgtatatctattgctaatactgtttatttattcaattaccttctcgatgatggtttggactatggatggttggttatggagttttggtcattattattggttatttacaactaagttgattgttttctatgtgaatttgagctttggaatcttaatattccaaaatatcttctccctcgatcctcaaaccccatttccgaaaggggcttgtgtgctgattatttgatttgattagtgtttgcattgcaagtactttatcaaatcagtcagaaatcaaattttatggtggtgagtcattaaattttgtccggcctgcctataatctacatctgaattggccctcccctttaccctctatggctatgatgagctcagataatgaaaacttatattaatagtagtaaggacccaatctggttctgttgtattgtgtccaattgagatgtgtggctttaattttctgcactacgcatgaattttcattcattagatgaagctcctatagcatgctagtaataatttgagtgaccaaaggacaacagcgattaatttagtaattacttatgattgttcttaagacaattatggtatgttttgcagccctgaatgttctctcaatgttttctgtatgatgtttagtgttaattcagca

SEQ ID NO: 25299 - DNA, 1018 bp, Glycine max
  Intron number 3 from transcript Glyma15g41330.1 (locus Gly ma15g41330) derived from phytozome v7.0 (chr-ID Gm15; pos 48441766 to 48442783 reverse strand)
tgttgggtctggacaaacgtctttgggaattaaaggtctttgattatctccggctccgtactggatctatttatgactgatgcacttgtgttgttgatttgttatggggtgtgggaacaatgtaaataaatgatatcttgttgtgttaagttgtttttcttgaatttctaattgtttttcgtaactaaagttaactgggtgggtgctgggatatgggacttaggtttgttcagtgaggtacctgggattaggatactgaagcagtttaggttttgaatttcacgccttagttttcctaagtattctgggatttctgagtaagtttagtgggattgagattgctgatggtgctggtaaatagacagaaactggagtgatgttgtatgcatctatgatatattaagtttgacccttgtttgttttatagactggtggtgtgtggaaagatcactgaaaaaaagtgtgctggataattattatgctggcacgatatgttcttgttttgtttccttgttctaaatgaagtatcatctttgtgttagattattattatgagaaagaaaaatgacaggattttttattttttcccaccaaatgttgaaagaatgagcttgtatgattgccttctaatagatgggcagaagattgtttcggtacagaaaggcttacagctctttgttaggccatttaaggggctttgacatgatggggaagttcagttctgttttgggaaagcagtgctctcttaaatgtagaatttctttggttgagtatgctttagaggaggctagtgttaaagatagtttgtgatttaattgtgtattttggtgtaatttattttacattttgggggttcattttgtttgttaaaaacttaaaatctatgtctgctattgtttgtactttttactttctgattcattgggttcttgtgtcttctagatttgatcctgtaatgtaagctatagcttttgctagttctaattatagatttgatatttgattcttgcagctgcaa

SEQ ID NO: 25300 - DNA, 333 bp, Glycine max
  Intron number 1 from transcript Glyma15g41330.1 (locus Gly ma15g41330) derived from phytozome v7.0 (chr-ID Gm15; pos 48442988 to 48443320 reverse strand)
ccatctgctgcgacctctctttctttttctctcaggttagtttttctcattcatttcccttcttttctttgctccttatggatcgcgtttttttttttcttttttttaattttttctcacgccttttagttcaatttacccatcacacacatgctctaatttcacactttgcccaaaattaatttttgatctttttactaggactggtatgaaaaaaaccccctctttcaagtgtttttaattttcaataaatagagtagaattgctatttttgttttgttttatgatgtgattgtaacttgcttgtgagtgcagattcttgcgcggtttatc

SEQ ID NO: 25301 - DNA, 453 bp, Glycine max
  Intron number 1 from transcript Glyma15g06930.1 (locus Gly ma15g06930) derived from phytozome v7.0 (chr-ID Gm15; pos 4840532 to 4840984)
gtaatttgagtctcactaaaaaagaaaaaaaaaagaacgcaccatggtttgggtggccttttgaaaatcgaaaggacaaaataaaagaacacagattagtttttttttgaaaaatataaattatattaaatatataagatcaaaagtctctctaatataacatgtgtgcttatctatgcataaacttaatcttattaatctgtccttaattaaagaggcagtaacacgacaaagagatgaaacacacgaaaaaggaaccaaatcaagaatattatttcaaacttgaagagatttagttagtaccgtacattcatgataataaagataataaaggggagtgtgagttgtatacgcgtattgagcgaactttataaggaaagcaattcgcttgcgtttgtttcacatattgtgcggcaagtgtctcatcacgtctcgcgatctcttcaaaggcga

SEQ ID NO: 25302 - DNA, 659 bp, Glycine max
  Intron number 2 from transcript Glyma13g34490.1 (locus Gly ma13g34490) derived from phytozome v7.0 (chr-ID Gm13; pos 36049010 to 36049668 reverse strand)
aactgagtttagaaaagggggaagaagtagctaaggtgagacagttgcggtctatatcaaattatgaatgctgaatagaaacatgcacctttacacttttttgtttattttttccatttttaaatgcctcctatgtgtattgttctaggttataatgttatttagggaaaatttgcttctttagtttatgtattttgagaataatttttttatatatgataatctatggaaaagctatggtctttcttcttctggttgaaattataaaagcatttactcaataattgagaaatagttacaagattcacagtagaggattggtaccctgcaaccaagctatgagcaatgtaacttgctgttccttcaaaatctatgagatttattgcatcattcactactataaacacagtatgaaattttcttgaccatgcacattaaacacattagtagattagctttttaaaattttaacaatgaaatttttttatatttcatggctatcgtcactacctgtggtaggctgcactttcttgagtttcttcaactttgtgaaaattggaattgcaaaggaatactaatattgggtgtgctagcaaaatcccaactcccacatgtttacttgtaggttgttactaatgaaaattaaatgtaggcatctc

SEQ ID NO: 25303 - DNA, 911 bp, Glycine max
  Intron number 1 from transcript Glyma16g27160.1 (locus Gly ma16g27160) derived from phytozome v7.0 (chr-ID Gm16; pos 31165781 to 31166691)
aaggtgctctttaatattcttttgcttatcatgtagaattttaatttacttaactccaacatgattgtttctcgtgaaaaataattatgatgtaaaagaaaacaatctaaaatctataaatgtttgttattgtcactttcttttctatctcatcactttctctgtctattttttttcctagctatctgactttttcttcttagttttttccttatttttgaagttgtgaagatgcatataaaagcatatgatatgaaattatatggttccaaaatgtttttgttggttcagttttcgatgctatatgaatcattttaatccagccaagtgcgcgccaacgtgatggctctttttggattgatgcatggcaaaaaattgtgtttctatctctataacagtttgaatttactctcagtctcagtgttcaggattagtttttttttctcctttgacaaaagtgaaggaagtttaattcgatgtagtttagtcagagctattgatgttaattttcttgtcacgcgtttcagactatatattcatatttgatttcttgttttggtgctaggtgcaggaagctgaataatgttattttactttacattctcacaattaaactttttctatctctcttatctcacacttctccccatctctcttcttactataataatttttgtgataacttttaatataaagtgtgaaaagcattactcttttctaatatttagtaacggataatctttctaacatttcgcatgcaggcctattcttttgtactcagatttcgttatgttggtgacagaagattttgtgcaatatattagacgaatgattaagtagtttattttgggctaaataaaagtattatcttttcaggagccaaatagaagtgcaataattgactccagcgt

SEQ ID NO: 25304 - DNA, 880 bp, Glycine max
  Intron number 6 from transcript Glyma16g27160.1 (locus Gly ma16g27160) derived from phytozome v7.0 (chr-ID Gm16; pos 31168132 to 31169011)
tctctggggtcatcaagatcagagtaagtcttcaaattactgttggtaagttaaggaatgttataaacactctttgaaatacactttttattattaggtgaaattcacatgcaatccattacttgtaatataggaatcatcaaatagggagtgagacttgcatcgtttatgataggtccaaataaatttcatgtaataaagaatgtgttagaaaaaggatgtttatataagtgcaacttttaaatttaatctgctctcagtataaatacttttagtttttagactatatctgcaaatatggaagtcaagtgggggcattttcttaggagtagaaaagatcatattgattaggtgtattcataagctttttcattacatggaatttagtggtaagaaggatttaaagtcagttcacttttaatggaatcttttttacattatcagcaacaatgaagtgtcacacaattgtaataactagaggatttcactagcaattgaagctctcaacagtttttcagacagaaggcaccaaacgtgtgatactttccatgattgtggatctaaattaaataagttctttaataaacactagcattggaatctacacaaccttgatagaataaagggaattagttgtgattttcttttggctttagtcgctttctctttatgtttgcaaaagaagacaaaaaaaatgaagacaaacagtatgactgtcagtgtttttcaacttgagattcatatccccgttagtactaactactaagaagtttttatgctatccagagaagcaacattcgtaatgaatcattggcaattttccccttatagttttttttcattcccaattcaaatgttgaatataataagtttcttgcag

SEQ ID NO: 25305 - DNA, 647 bp, Glycine max
  Intron number 1 from transcript Glyma13g40180.1 (locus Gly ma13g40180) derived from phytozome v7.0 (chr-ID Gm13; pos 40720341 to 40720987 reverse strand)
catttctgagatccgcaccttctcttcactttcaggtacccttcttccgcatttctatttcctctcttacccgcttttcaaaatcaatcattttcctttttctataataatgctttttttttccggatccgaatctggtttctgctccttgaattggatcagagcatacccttttgctcaaatttgattttttggcatgcttttaccctttcaatcaaaggttgtttcatttcctgttctcgtgaatttttgcagatggttctgtctctgtagcttggaatcagacgaaaggagaatttgctgggggggagagtttcaattttcaaatcttgtcggtgattcatttggtattgtattgcactcgcgtttctctctttctgttttcgtcaaaggttatggtttttcgtttctagagggaggggtggtttgtttttattaagtataaaggcaactatggaataaatgaatagataagagatcggtggcatgtcgatggtgtgatgaatgaatttgtttttgtgggtagaggcggcacatgaattgaaggggttgttggaataattataataatggtttttgcttctgcctttcatgattgatttcccatctgctatggttttgttggggtgtggtgaggattccttgtc

SEQ ID NO: 25306 - DNA, 837 bp, Glycine max
  Intron number 1 from transcript Glyma15g13480.1 (locus Gly ma15g13480) derived from phytozome v7.0 (chr-ID Gm15; pos 10090115 to 10090951)
aagacatcaaggagtgtaacatgtaagtgtgtgtatatatatgtatatgtttgtccctgtttagattttgatgattgattttcagtcttttcgtttttttttggttgagttcgtacttacatgttgcttgatatatgtacactgctacacttgtaacttttgattagatgaatcgagtgatgttttgttataggtttgatggagtattgaaaagtagtgattgtgcaaagagattaaactttgaacagacatttttaattctagtttctactttcattatgcattgcattctagctgctggactgtttgtttgggatgatgacttaagcttgttttctgagcggtgtgttgactggcccataatagttggagaagcattgtgacttgactgacttcattcaggggttgtgagggaaggaagggtgagattctgtggagttgtgttgggtgtttgtgatatttggactttgggaaatgaattttttcaaagaagtttctaccttatttgttattgatgtagcattactaattacttcttggcatcgttgttatgttcgagtaatgaagttttacatggaaggatttattggtttgttgtgcttggattatgtgggcagtcctctattctgcctttcggtgttgtctgggaggatttgctattctttggttgtttcatttgtgttattaacccccctcttttatcaaagaaatttttttcattctgattattttgtagtgtctgactttaacttctttactcaagttaagattgtcaaattgtatgcttataattttaaaacttttgcatctgcaggtacaagttgggattttgtccta

SEQ ID NO: 25307 - DNA, 912 bp, Glycine max
  Intron number 2 from transcript Glyma15g12270.1 (locus Gly ma15g12270) derived from phytozome v7.0 (chr-ID Gm15; pos 9078976 to 9079887 reverse strand)
tagtttttcactaccaaacatttctttcgatctgggttaagatcttcttccactaccatctaaacggtccttcttaccaggctcatcttaactgaatttatctgagtcgtgctttactcttttcagaactttgattaaaaaaaagttttcttaaagactcttctgtcttttttagaattcagttatatgctgagaaatttcttgcaagtcaccacaaacctagtccttacagagtattcctaaagacttcagcaagaacatattccatattttatttctcaactctcaaggcaagcatattccaatatttcaattttcatggcaaagtagcacaaaataaggaatcaaataaagtactggccactgggcatgaaaaatatgtatacgttttcagagtaacagttgaatcgccaaaaacaccacactccagttgatctagactgtccaatacacagtatcaaatcaaataaacgaaactcaagctgtgctgactcgagaaattatggccacaaacattcctggatttgcagtacaagctccgtactttcattacgagcgcaaattaattaccatacaataatacaatcagaaacccttttcacaaaactagggtcatctaaacaaaagggaacctaatcaacccgaaaaagacaaccatgtaactccaggaaacaccagcaaatcgaaacaagggaaagcaaactcccaaacctagctatattcatacatctaaagggtcagtctatagatcgctagcttcttctaacttcaataaacacggttccaattccaactatcttaaccacactgtacaaaccatcaaaaacactatatatacaacaaccaattacattgtataattaccaacttcccaagtagcaatgtaatcacttgtctaagaacttgaagtag

SEQ ID NO: 25308 - DNA, 640 bp, Glycine max
  Intron number 1 from transcript Glyma13g24290.1 (locus Gly ma13g24290) derived from phytozome v7.0 (chr-ID Gm13; pos 27672021 to 27672660)
tgattatctccaacttccatttgcactaaagcaaggtatatagcaagttcattctcctacaaacatttaactaaattcttccatatatagttatttttgattgaactggaagtttattaataaataaaaagtatacaaagataggagggtaatatttcctccacaagaaaactaattacaatgaaccagaaaaacagaagtcaagagtaacagtgcataatagcagcctagtgccctgatctctgggaaaatctgaaatggcaaccccatatgaagaccttgagcagagcatcaaggagaactggagaagctaaaactgtatcctttcccaaaagatttctccatataccaaaagaccttgaaaaacctaagcattcttttccaacttgacacaacacagattaacaaatgcagctcatttccttaaaaatctggacctcttttttcattccatatcctacttcttccatttataattatagtattatacagttctgctttattttttctgatgaagtgattgattgaaagagctggatggaaaaattcttgtgcagaggagctcctattttttctttcctaacaaagcttgaaatttttgctaggtcgagttgggaagttaagcataaaaattccgtgg

SEQ ID NO: 25309 - DNA, 833 bp, Glycine max
  Intron number 2 from transcript Glyma13g21120.1 (locus Gly ma13g21120) derived from phytozome v7.0 (chr-ID Gm13; pos 24605008 to 24605840 reverse strand)
ctcccccattggcctgcttcccccttagactttaggtgtgtactatgaacttaattagttaattagatataactattaattaatgcttaatctattcactttcctccttcctctatgcgtggacaacttttttaaaattaagttttagtatccatctatcacagactatatatatgatttgcttgtcaatttgattagtgacagctttctccgtacacgaattaataacttcatgccaacgagattgatgcaactggtaggattaaacaacatgattaaaaggtccaaggctttaagaaaggctcgtgacatgatcttgcttgaaatgaaataatctcccttctcttaaagcattcttcagttaattaaaatattgatcaattcatttcttgctggaatataaatttaaagttttaattgtggtcatagtctcagttgtggttgtagtttcgttacgatctttaatgttgtaaaatattatagataaatgatgcaacgtacttggaaaccacttttaaaatgtataattttttttttacatatagttagttagttgtaagcgatacataggctagtataacctattagggttaatttagttgtgaggatttgaataatttacatgaaattttaagtttaaacctcattgtcttattttaaaaagatttaactattcatttactctgtataattatataaaaaaaatctttttgttcttgtatttaattataagaatcaaataattaattaaacttaacaaaaataatagggtagcataaggacaaacttagcttttacttataatttttcattaattgcaatgtaggaaagtg

SEQ ID NO: 25310 - DNA, 977 bp, Glycine max
  Intron number 1 from transcript Glyma16g00490.2 (locus Gly ma16g00490) derived from phytozome v7.0 (chr-ID Gm16; pos 176786 to 177762 reverse strand)
tggtatgtccactttctaactctttctatgaatgtgtgtgcctttctctgtttttccttctaaattccatctttgattctttcatcccttcagtaaataagtattgcaaatctttgctaatgaaatgtcatagtgttgttgggactgcaaaatacattgtttacgcacgataactcttattctgcgtaagaaaaactctaaattgcagtttggtacttagcattaagatactcgctggaattaatgagccaaacttgaaactccctcctctttaaagtcaaatggataataaatgaaggtggtgagagtgtatagaggcagaagaattatactaaggatttttaacgtgaaaaaaacttccttgtgtgtaaggaaaaatctccgggtatcattggtcttgctccaagtgttagatattaattagaaaattaataataacaagtttctaagcttataattatgagtcttataattgtgcaattttctatttaaaagttgtaagttactaagtcaaggttgtgagttacgaagtcttgtaattttccattagcatttagtatcttggaataaggtattaagcatttatgtgattagtcaaatggtcactctattctagcataaataggggatcatactcttgtatttggtgtggcaaagaaataaaatcttagtcttccaacaccaagaccctaatgcttgggccttgaagtcaaattatttactacgatgcataatctctgggtatttgtttataacaagtgtatagtagcacttctagttcagtatacccttcctgacatatatctaaagggccgagcttgtatctaaatggctagatgtgtacattgacctaaatataaggaattgtttctatcttttcttaatggctagatgtcttatgatgtcttcatattcactattttttttataatgtttctgcaggtttctataaaagattgtatctcaccggacttgac

SEQ ID NO: 25311 - DNA, 859 bp, Glycine max
  Intron number 4 from transcript Glyma14g22160.1 (locus Gly ma14g22160) derived from phytozome v7.0 (chr-ID Gm14; pos 26093800 to 26094658)
actttaaggaggtaagacattacatatttaattggtctgaatttttgtatgaataaatatacatttcaaatagatgtgactgtggctttgtctttgagtttcattgaagtttgacaaatttaagacccaaagtgtagcactatgatcacttcaatttcattgtgtttggaatctctaagcttgtctttggtagagggaggaaggagagaaatagagaataaatgtggagggtccaacgtgggtcccacactttcaaatatctctcttctatttccatcctctcaatcaaacacgccataaaaggtggaatttatttgatatgttttagtaattaaatccagtcaaaactaaccagatttgagtgaaattttagatatatagaactgtaatcaaaatgttttcaaaaatcaaatattctttttgaataacattttgaaggattttatttcaaaatcatgttagttcctatttcagatcttgtcaaatttatttcccacttgttttaattggagttgatatgtgctggatccatgtctattcaatgctattacaaattgcttttgcgtcattttgaatttttgacatgaaaatctttcagtacgtggatctgaaacatgtgtccaaacacgttattcatttaaaatcaaatcaattcttattttgcaacttttcaggaaagatagcatttatttaaatcaattcccaattttgtggttccaaatatccttacacttgtagatactaatgataaatttttgtagctaataagatggtgtttctgtgattagggttttggaataagtaattacgtttaaatgtttatttcaggtccactttgttctattctcccctgatattt

SEQ ID NO: 25312 - DNA, 629 bp, Glycine max
  Intron number 1 from transcript Glyma17g04220.1 (locus Gly ma17g04220) derived from phytozome v7.0 (chr-ID Gm17; pos 2815627 to 2816255 reverse strand)
aatcaccttcacctcctgttccgatctttggccaagtatggttttcctcttaacacctcgctttgaatccgttttttttcttccttttgggtttgcgttcaaccggggttggtacttgtttgatttggttgaacgaattagttttcaatccttttaggttagtttttttgtcaaatctgaatcgggtctgtggatttggttatgtttcattgattgataaatgtggggaagatccaatactcccctagtggttgctgagtttatgaatctgaattttggaagtagaatttggaattgggtgttttatttattcattaattacctttaacctaggctgcttaccatgtattgtatattatcacctctcctccaacgcacaacaaagtggagggtggaattttgatgaaatttattcatcagatgaaattagttaaaatagcgtgctatgatcttagtaatttcgtgctggtaggctttatgatcttagtttgatgatgatcaggttcatgttttttctgtttgttttttctttaacacttcagagttgatcgatttgttcttgttgtgctgacttttttgttaaatatgtatcaggcagtgagttgctctgagatcattaaagattccat

SEQ ID NO: 25313 - DNA, 490 bp, Glycine max
  Intron number 3 from transcript Glyma13g14870.1 (locus Gly ma13g14870) derived from phytozome v7.0 (chr-ID Gm13; pos 18495645 to 18496134)
gatctgctggctctgtaagttatactcctatatcctggtgtgaaacattcttgcataatggaaaagataattcaaaattgtacaaacatatgaatttcatttgttttaatggtaacacctgctttcaaccaaatgagcggattataaaaatcacgtcatgttctctgtcatttgactctcttgtccatctccatctgtttcttttctccttgagttataacgctgcttacaccttattttctggatcaaactggtgtaacatattagcagtcatctcgaattctcattagatcatgctatgtaaaaaatttacaatgtacgtgtaaaacagaaacaatgcaacaccatagaaattaccaagaagatctcctaaccaaatcagctcattaatttcaacaagtatgataacaatgtttaaggatccaattcaacctcagttatgaattttccaagtaattttcaatggcctctgacacttaatttcaggtct

SEQ ID NO: 25314 - DNA, 839 bp, Glycine max
  Intron number 1 from transcript Glyma14g38600.1 (locus Gly ma14g38600) derived from phytozome v7.0 (chr-ID Gm14; pos 47744873 to 47745711 reverse strand)
tgcactcacttctagggttttctctgcgctataaggtttttctttcgttttcggttatccatttctttaattcttgtccatttttgtttttggtttttgctggctgatgttttcgccgaatcggtttccactgattttgcgttcttcactcttccatgtccaaaatcggtgcttctttttcgcgtttctttctcccattcaagttatccgattcaatgcgtgtttctggaatccgtttgtcgcaccttttcggcgtgttaggatttgattatttagggcgaaagtaatcgtttttttttaaatgtttagtacacacataataagctaattcaaaggcacgcgttgttgcgtatgaatctgtattttgtagtttctgtagatgagagttcctcctggtactcgttctgtttgtgataatgttgtttttgttgtttggaagtagcgtgtgatttttgcacattcgcaattgaggttatgaatttttgttgtgttaaatcaggttgtacatttaactgtttaattagcaatgttctcttgcgttttttctttttaaattatttttcctttttttttccattattgttattgatgatatatagcattttcgagtttgggacttttacctggtagaaactaagagtgttattcgtttcctaaaattgatgctgtttttttttttttataaaatttttggaaagagtttgatttagtattatgtttccttaatcttctacttttttctcttttgtccctacttttattttggttttattttcttatatttatttctatttctctgatcatgtactaacttaattttacttatgtttgcagcaatc

SEQ ID NO: 25315 - DNA, 356 bp, Glycine max
  Intron number 1 from transcript Glyma14g13970.1 (locus Gly ma14g13970) derived from phytozome v7.0 (chr-ID Gm14; pos 13630056 to 13630411)
ctggctcttggtacaccgacaatcgtaagtccctcaaattagaattcacgattcaccaatttcgattcagtttcgccgatcaggttcaaaagatcagttttttattctttcaatcgatttttcccacgattcttccaactgggttgaatttttttataaagaaattgtttgattgttcggaatttcttcctgaacagtgaaagttctcagcttcatgttcttttggttcactcgtcagttatcactcttctacttctcagtcagagaggaaagtctcactttaagtaacattttttttttaattttaatgtttattttcagctaagcagctttcagaggagcttgaagggtggttg

SEQ ID NO: 25316 - DNA, 743 bp, Glycine max
  Intron number 2 from transcript Glyma14g40120.1 (locus Gly ma14g40120) derived from phytozome v7.0 (chr-ID Gm14; pos 49112619 to 49113361)
agcttgcttcaggttttcttcttttctttaaaattataattatactgagcttttatgacgaccgtttgaactttggaaacattgagtgtctttgttttaatgcatgtcgattgataattattacgcttatttatttttgtctatcccttctttgcttttggttatgttgaaattgtatgttttggattttggagggaatgggaaggatcagtgtgtggcaggtggcgtaccttaccctactttgtttgtaacttttttcacttttaaatacaaaatgaagctgactgataaatgtattatgagtttatgactagtatgctactataaatatgattattgtaaaggttagatactcgaaatataatttaaataaagcatttgagttgtgatatctcctttcttctttttcccttctctcctcttctttaaatgtttgaattcaaagtgtgtgtggaggggggatgaggttcagtgcttctgctctttctgttgcgaaattcccaaacaaggggacactctatcttccctttccttctgtctttagcattctctgggggcattgggaaaaagtggatgttatgagtcccacattcgtgtcacgaggatctctcacctgtttgagtgtgcttactgactgcttagtcataacattggagcagcagaaagttttgagtgtgaagtcttttatttcctaaattctgaattaagatatcttgtttattcttcacaggagaaaggttcta

SEQ ID NO: 25317 - DNA, 569 bp, Glycine max
  Intron number 1 from transcript Glyma14g06560.2 (locus Gly ma14g06560) derived from phytozome v7.0 (chr-ID Gm14; pos 4791902 to 4792470)
tcatcgattacgataacaactcctccaagcgctgacaaccacgcgctctcaatccacgcgcctctttcggtgagttctcctttttcttctttttccttttgttttactatgattgtgtatattactattactattatatatcgatcccgatcgtgctcgttcctgtgaggaaactctgtttatgtacctgaactgctatcaaattgtaatgctttttagggctttgtggattttgttttggatcaatcttttcgattatgttgcttctcactttcaactatagttacctgaacagagtgggagattttcgacgatgtaattaagtttctggagttatgagctgaacaattttcttccaattggaaacgctcgattgtagattattatagtttgggttcggttaaaaactaacttcactccataaatctaattcaatgtctttgttttcttgaaattgagttcgtatgaggtttgattatatgattatcagtgaaaggtgaagagcgtaatttgagtttcaattgtttagctatattattcacgagcaaatcccattgcagggcgtttaa

SEQ ID NO: 25318 - DNA, 982 bp, Glycine max
  Intron number 2 from transcript Glyma14g03650.1 (locus Gly ma14g03650) derived from phytozome v7.0 (chr-ID Gm14; pos 2378883 to 2379864 reverse strand)
gtgtagtatactttccccaaggtcatagtgagcaggtaagtaatgcttcttgtatcctataagttggatttattgcactatacttgaattttttgcatttcatggatatttggtgaagctgctatggtcatgaaaggtacataaagtcgtatagaaaattagaagctcatttagtatatctatatgatcacggtgagcaggacagttgtaatattttgatctgtctgctgaagttagtggagtagacttcaacttattgtttcttgtatgtgtatggtgaaatcagtcatgcttgggccagtgctagctcatagttttaagataagattgatttggtatttgacctgataggactgggattcacaatttgtctgcagtactgtgaaagtatggagatgtaagctgtaagttacatgttagcagatttcatggattagtgtttaagttgttgtgcctggagggagggaggatgggctaattaagtgaagagaaaataaaatattctccaataaatgtttgatttaggctttctgttgttgttgctaacactctagctcataagtgaagtccctagtaacagatatgacattgctttatgattgaaatgagcagcattttgttaaatttcaaatagaaattgtgacattaaggtttcagttctagagaatagtctgaactttggtcagtctgattatcttggtataaatcttttctataattactatgcaaaaaatgagtgactgacagatagagaactctttattgcatcattatggttatttttagtttcaattttttttccctggggcaggggagggggttcaagccaaatggttgtcttttctaatctattgttgttgcatttgaaatttccaaataaccaattgcttttcatatatttaatttatattagattcttcagttatttgataaatgttggtgtttatgtttcaggttgctgcatcaaccaacagggaagtag

SEQ ID NO: 25319 - DNA, 1009 bp, Glycine max
  Intron number 2 from transcript Glyma13g07120.1 (locus Gly ma13g07120) derived from phytozome v7.0 (chr-ID Gm13; pos 7297309 to 7298317 reverse strand)
tccaaagcaatgtaaggctaagtagcattgcaaaatttttgcccaatgatttaattttccgtatggttcatgatattcttgattgaagctttagtttttaactgtgctgaatgacatcatgtgatccatgtagtcgatctcacttagtgagataatgctttgttgttgttgttgttgttgtatggtcatgagattttaatgtttctttaaaattgttatttcagtagatactcaaattgggatctcaatgattcagaagacatcttgttactttaaacatttttacatgacaatttcattcttcatagttgatagcataaaaatagcatttagggtctaaattgatgttcaaagatacatttaattattatattgatgtccgaataaatacaagggcctatattgatttccaaaatctttggaagaccaacttgtcttttgtatcattggaggaacaatttgagtatgcagttgttaattttcggatttcaaagttcaaattgttttgtttttccctgtctttctgatgcttaaaatgtgtctcacaattgatcattcagcaaaaaaagtggtataacctctcaaaaacaaattcaatccctgtttctaagctgttggtatatcatctttagcaatacttatctattgattttcagagactattgttgtgtgcacaactttgcactttagtgtttggagttctcttctaatcttatgaataaaatttgaaaattttccatggtttacttttaaaatgtagttcatagatggtacatgcactcaccttcaatcatgactatatcaatcaatttaggcttgactgattatagaggggatactaatgtagctgaaaaatgtcattaaatagtttaatggaccttgatttgctatgcatcattatctcgagtatagatagtctcttaagacgttaatacaagattttcatttttcgattaatctttattgaattacagataagtcggtatttctctgatccccaatactactt

SEQ ID NO: 25320 - DNA, 661 bp, Glycine max
  Intron number 1 from transcript Glyma13g07120.1 (locus Gly ma13g07120) derived from phytozome v7.0 (chr-ID Gm13; pos 7298478 to 7299138 reverse strand)
gtgattcgtctttccaaacttcttttcacttcgaggttgctgcttcttctccttcaaacatattcacagatttttaatttcactattttttttctgtcaattaataatttctattcaaaatctgttcctttttctccatacccattatcgctcgtgccccttttctctctctggggtttaaagtttaaacatttccgtcttttgcttattgggtcgttttcaaattcacacgcaactccgaatttcattgcccgtttttttatatggattttgagtctacgattattttggtgtgtatttgcatttctgatagcgtttcaaatcattaatataaatgaaaatttctgttcaaatcgttaatatatgaaattaggtaaaatggggtattctctgtcattcatgcttagtatttttttactttcaaccttttgatgcatttgattattggtaatgatttgttaattgttggtttttatgtataatggtgtggcaatctgtgtctgaaatggatcttgcgtagtatttggaataataggttttcgtgtgaagagggtttgcgtagttgtgtattatgttatgttgattttatgtgcacattggagattttttctgattggttctgttttttttttttctgtgtgcgtgtgtggtggcagtgaga

SEQ ID NO: 25321 - DNA, 766 bp, Glycine max
  Intron number 2 from transcript Glyma14g10090.1 (locus Gly ma14g10090) derived from phytozome v7.0 (chr-ID Gm14; pos 8193647 to 8194412 reverse strand)
ttgagtttctcttctccaaagtcagagactttgttggtagatacagcttcctcaaatgccacattgcctttttcttaccatcaattgtctagttacagcagaaatacaggtacatacatataaattttatcatgggggaatatttattaattactaattaattaagtacccttttttttaaaggggtgtttttggatttggatttgaaaatggtatccgttgtggggagccaaaatactacgtgggttgttactgtctgattctacagtaccggtggaaggtcttttcatggaaaaatacatgagtggtctctgtttgtgagtcatgtcacgagaaagtaaaacaaaaaattcctcctaagatgcaaaataaaatcttctacttcccgttttaggaagatggattttggtaaaaaaaaaattgcacagtaaactagagatactaaaggagaaaatatatatgaagagcgataacttatacaggagcaagggataaaaaaaaggtccaaaatttgattggttgtaatatatagtctcgttctctaaaatcttttttcacttttcatatcaaagttgactagggaaaaatcattaaacgttccaaaccattgattgaaccttctgctccccactttttgctgttatgttccttttagactaaggagtgactttctttactatttttaattttcatgtattttgttggtttttgaagttatcaattttgttatgaagcttgcttaggcctttgtgtttgtgtgtgttgc

SEQ ID NO: 25322 - DNA, 525 bp, Glycine max
  Intron number 2 from transcript Glyma14g17830.1 (locus Gly ma14g17830) derived from phytozome v7.0 (chr-ID Gm14; pos 19927852 to 19928376 reverse strand)
cttgagggttctcaatttgtataattgtgaaggtgaggccaatttctctcatttttaattttaaagattaagtgatgatttagctagtttcgaggactatcagcaatccattcaccttttaagagtgtgcttggtttatagtccatgattttaaattatggtgagccagaagaaaatttttacattgcagaaaaatgtagttgatgcggccgtgatatgattgcgaagtgtcaaaataccttaagttgcgaccataagtgtggttatggatcgcaatttaaaatcatgcgttgagttgaatgaacacatatttccatgcacgttttgtgagaagtaggaattcaaaacttttgattcaacgaccggttgagggttggcctcccaacaataaaacaaacatgcactaaaatttgtaattcagagtataagattgatttgatattttattgcctgtgtttatatacatgtattacaaatgttggaatgaaagtgattgcagaaggtctcctcttattgcattccttg

SEQ ID NO: 25323 - DNA, 701 bp, Glycine max
  Intron number 2 from transcript Glyma15g42130.2 (locus Gly ma15g42130) derived from phytozome v7.0 (chr-ID Gm15; pos 49526037 to 49526737)
gtcttgtggaggttcaggtactatttttcaatttgatttggttttgtgtcacggatacattgtttggcttcgtacttgtgtctctataatccgtatgctatcggaatggtgggtttggaagctccatggactcttaatttgcaaagctactcagtttaaatttggagacaactcaatttgaataaaaagttaatgacctgatttaattttgataaatattaccctttgatctggcctaactccttaatttttccttacttgtcaaactatggcaagcacgtctttattaatttctatttgctataaataagctccaagcaaaaaagtccatcccgagttactacattttaattcccaattttactaacattgcgcgcaatccattgttgtcagttgtttgcaagagtgacattgaaattgcataaatttctttctgtattcaatgatttataagttatgtaaagcaattatgtttatattgtttattttgttatgtaaagatattctcccaaatattggctggatttattgtcttccattattgaattgcttagacataaagatcttgcttatttcattgtttctaggttcatgaagcaagttattttcctgcttttcattttttattcccctttgctgtgctactaacgtgtcacttgatgttgtacttccagaaagggacatacagtgctgaagagaaa

SEQ ID NO: 25324 - DNA, 778 bp, Glycine max
  Intron number 3 from transcript Glyma15g42130.2 (locus Gly ma15g42130) derived from phytozome v7.0 (chr-ID Gm15; pos 49526772 to 49527549)
cttctaaggtaatcatattgtgccttcccaaatgcaacattactactatctcatgcttataaatgctttgtttacatacatcacattctgatagtgattcaatggctgcctttaggttacatatcaaaaacaaccatctaagtaaggtgtcttagtaaggtgtcttctgatattatgaatatgtataaaaaatatgcataatgaatacttttttggaaattttttatcatcatctgtgaggattatgattgcagaaaacagaaacatgaaagtactttagagagagagaagaaagagggggtgggggagtggggtcttttgaacatttggtagatgaagaagtcattgagtttacttgtattttaactaagtcgatgaatcattggtcccacaatcattgatggcttatagtaatccacagacacagtgaagtgatactataatacctcattttgtttttaacattttggccaaaagtttttttttatgtgatattaccatgcatattttataattgctttttgatttctctcgttagatcaaatgtttttgtttacaataggaaatactttttgtgccatactcaactcaatacccccacggtaaaacaaattagatatcaaagttagattaaggaaacaccttaccaccagctttactatattgataaatgaagaaagttgggggccagaatggagtacctcattttgtgctctttttgtggtattcatacctacaatgttttatgcactcacacacaggttaaagagataagaag

SEQ ID NO: 25325 - DNA, 854 bp, Glycine max
  Intron number 1 from transcript Glyma13g11170.1 (locus Gly ma13g11170) derived from phytozome v7.0 (chr-ID Gm13; pos 13513141 to 13513994)
tcctggttgtgttaaaaacgtaagctggtaaaaaaaatgttaattttgataatatgttgcattgttggtaattttattctatttgatgttaacttaatttctttttttagttgaattgaagttgtgggttaaataaaaaaatatatagaattaaaataagaaaatgaaaaacaaaaattaaaatagaaggttgagaaaagatatgcttcgaaacattaattgaaaaatagtcgttggagaaaggagggaagagggaggcgcggaatgcgttgtcgaaacaaagatataagaagaatgaaggaatcggctttggctgtgaaagaaagagaaagagagattaagggttttgaaaggaaagagaaagaaattaagaatgttaggatttgacgatggtgattctgattccgacaacgagcaggcactgtttgggaagtacccggagctacagatgtttaagtgggagaacagtctcattcaccttccttccaatttatcatctttgttattgccgcagacaccactgtttcactgtgagcgtgaagaaaccctcagggttcaccctcctccctttcttccgttgcaagaaaccctcgatcatctgtcagcgaacactgcccctactcaggacatcacccatcttcaacaggcacgcccagcgaacccaccccccacttcatcaccatctcccaatctctgcaagagatggaccaatgaagaacacaggtactatattctatttcattgtttttcttattagatgctatttgctaatgtttcattcaaatatttatttttgtcactttttccttttcataacaggctgtttcttgaagggcttgcctactttggcaagg

SEQ ID NO: 25326 - DNA, 748 bp, Glycine max
  Intron number 4 from transcript Glyma17g00830.1 (locus Gly ma17g00830) derived from phytozome v7.0 (chr-ID Gm17; pos 441371 to 442118 reverse strand)
agacgaacaagaaagagagcttatttgcagatagggtacatagaacattaacttcttgtttttctttttccaactgttttttacatttccaccctgaggaaaaagaaacaacaatataaaaatattggcttaaatatgtttttgatcccttgactcaaatttgggccacttttgtttttggtctcccaaatttaaatgtgttttcttagtccctcttgactgattttttgtggtttggatgcacaatttgtagcagtttttttaccggaagagagactaaaaagaacatttatttaaattgagggactaaaaaacgcaaatttaaatttgagggacaaaaacaaaagtgacttaaatttgagggaccaaaaacacatttaagccaaaaatatttgtatgcattgtttttatgaaaacgccataactgtggataatattttcaatttccacagtaaaattaatttttcaactacctttgttttcattattataatctgtttgatgtgttttacatgtaactatgttactatatgggctaacaaatgtggcattttataccattatggcatttatctttgatttgtgaatgcggatggctctttttgcgtaatatttatgatctgattacttaagagttagttgtatgccatatacatatgatgtgaaccttagaatttttatttgtcctgttcatgattttgtactgtttgtaggtgtttgacttgtttgatacaaagcacaacgggat

SEQ ID NO: 25327 - DNA, 849 bp, Glycine max
  Intron number 3 from transcript Glyma15g05050.1 (locus Gly ma15g05050) derived from phytozome v7.0 (chr-ID Gm15; pos 3617358 to 3618206)
gcgaggaagtagccagataccaaggtaattactatttctttccctttgccgaatggtggacttttaaatcatgtgctcaagcttaagctttcactattaatgacccatcagtaaccaattatgatttatgactagttgatgtttcatgtttgtttatatatcttgatttcttataacttgccttggattaggaaaaaaatattagcattcttttggggttcttacctgtcaagtttggaaaaaccaaacaagggatcaactcagtcattgcatctatacaatcaatctttctcagccattgtcattttgatggctctaacctctaaccttcacacatactttcggcttatgaatgaaggtgcaagggggcacctttcacttgtgctaaataatgatgaatatcaaatgagttttctagttatctatcagagattgtggtttatgcctctatatagggtatcatgtgtatcctcatatcctaccaataaattcagtgtttcaaagcttttttatagtaagattttcccatcacagttagcagttattcaagtcacaggtacttgaagggacatacttctgcaaactacctgttagcagtggatttaagctttttatgatctgtttcctttttatttaatcatccctgaaggaagaaagattttctttaatgagaaaattgtgatctttttatcatagattattttattacttattcttttatataatttatttagaggacacttgtaacagctacttcccttatcccaaccaaagctaaggtgagatttggtagatcataaatctaatatttttttttttgcatgtggtgcaattggtcaggtacaagag

SEQ ID NO: 25328 - DNA, 669 bp, Glycine max
  Intron number 2 from transcript Glyma13g34560.1 (locus Gly ma13g34560) derived from phytozome v7.0 (chr-ID Gm13; pos 36105615 to 36106283)
gggaggatctgaaggaaacagtgggttttttttcttcttccttttcttttttggctctcctaatttgatgtcttttttgttagattttgatttgatttggctgctcattgtttggtttctcatgtctcaaatttgttgtgaaaggctaatattgattttgacagattttaaatagttatcttagaatttggaatcagaccttactcaatatcaaaagttagttgatagaaacgagagttgttgcccccgcttatataaacttttttcttaggcatattactactcaacctaaaagctatctcatgagtatatacacgtttagccatatcactatgtgggagtctcgaacaagtttgaatatgtgtttgacttaaggatacaaaaatacaaaacataacctactatactttgacttggctgcactttatgtcttgctgattgaatgtcaagtactacgtagaaggtagatatgtaatcagtaaaataaacggatcaatcaggggatatattgttaaatcttatgtttggcagattttatagtttaccttgagttaataatatactggattttatgtgttcttgcattcctctttgacttttatgaactggaaaactgtttcgcagtgatgttaagaacataaaatgttcttgtgcaggtccaagaagtat

SEQ ID NO: 25329 - DNA, 293 bp, Glycine max
  Intron number 3 from transcript Glyma14g01690.1 (locus Gly ma14g01690) derived from phytozome v7.0 (chr-ID Gm14; pos 982332 to 982624)
accttgtgacacagttaatgaattgaaggtgctactactcatgattgaacatggcatttacttctgcttataacactatcggttttattattattattattattattattattttaacgttgttttttgaaattcaaaaattcttgctatttgttatgaatgaaattttctctttctctacaggtttgagcagaagttcgcgttatatttgcacattacaattgtattttacctcttgctctctgtctcatccttgtcttcctgacagacttaagtatttcttattaaatatc

SEQ ID NO: 25330 - DNA, 846 bp, Glycine max
  Intron number 1 from transcript Glyma16g30030.1 (locus Gly ma16g30030) derived from phytozome v7.0 (chr-ID Gm16; pos 33692717 to 33693562)
gttgagctcagattcacggctaggagcaattcgaagtaagttttcacctttattgcattttgggtttgctctaatttcagtgaatgatgatcgagttggttgatttggctgtttttctgtgttcagtgttatgtgttggtggatgagtggatctgtgttttgatgtgattgtttttaacaatggggtggtggttccacttggggttaagagaaattttggtttagttaaagggtgtgcagttcaaagtttttttttttacttttttagtgggggtattggagcacactaaaagtaatccgtatatggagattagtttgattgggagatgggtttctaatgttttgactatccgtgtactaatttttatgtttttaatattttatatgcattatttttcttttttaggttagaacttaacaattgggatatattaaactttgtttctggaagttgcaaaataaggaatttgagctgatgtgaaggttagctgatggaattgttgatttttattattattcttggttaatacaaagtcgtgatggatcgggtgtatgatgtttctcttaccatgcactgtttgacaaacttatgaaaaaggtagataactagttgtagcgtaaactagcgaattgttgaattgttagcttatgctattattgcatctttctgcaatgtaccgtttaggatggtattgtcataggcttactggttaagaatagatgctcatgtagaagaatgtggatacagtaaggttgtgacaaacacacatcttgtttagcggttgaatatatgtgttattctctgttgcagggttttagcagccatttccagtcactaatttctgt

SEQ ID NO: 25331 - DNA, 651 bp, Glycine max
  Intron number 1 from transcript Glyma15g01570.1 (locus Gly ma15g01570) derived from phytozome v7.0 (chr-ID Gm15; pos 1032160 to 1032810)
gaaacggcagacacagtgagcttagaatcattcaggtaaagactttcttcctcacactcacattccctaatgtcttttattattttcacaacttaaagttgttttcagttttcaggtttcgtttcgattttattttggtttcggatgtcaaatgttttgctgtttctgttgtgcggatcagagtgtttgttgcctttaagagacacagattaattaatttcttaatgaaactgatgcggtgggattgggtgttgtgtttaactcgaaattaggatttactaggtttcttgttctgggaatactcttttgttctgaatgcactgttacctaacttagtaactattttgtgaacatggatttagttcctaatgccatgttttttattttatgctgaattcaaacccttagtggactacttttggaattggtattacatattgttgttattggtactagatcttcatgtaaatgatgtgctaaataatctattgttataaaacgcactattgtgttctcacttgcaagatatagattactttggttaaaacagcttataggaatagggagaagcaagattttaatatataaagttatctatctgtggtttcctgattaggataaaggttaatctcctttttcaaggccccgtgc

SEQ ID NO: 25332 - DNA, 871 bp, Glycine max
  Intron number 1 from transcript Glyma15g41540.2 (locus Gly ma15g41540) derived from phytozome v7.0 (chr-ID Gm15; pos 48630080 to 48630950)
aaaacggcgccaaagttattctctccagccacttggtatgtctttcactcttttctgcattctcattcttatctctagaattggcctcgtaataatgcacgaggaatgctagcaacactatctttgacactcgctttctaatgctctatctgattggttgaaatttgttggaaatcaccaattttggtgggtcctacttctagattatgcattagcttctcgagagttctatacaaattggtacaagaattttacttgttagtgagttcataacttcagtccggaatcaacttgtatctgagtatctgttcaaaatttgtaacataattagtattttagaccatattgtatattggggtcttcgcgacctcaattgcagccgcatttgccctcaatttccatctatatcaataactgtgatgaaaccgcgactacaatttatttacttcagagtttttttttatatatatattttgaaaggggaaaaattcttttttttttttaagcaacttggtttgtagattaagcaacttaatttattttcttcgcttagattaaggttttgggtctgtgtctatgaaggtggttactttggagggatcaatcaggggcaacaagggtgctgctatatgtagaacaatccaatttcttattttagttgtgagatttgtagtcaaatgtagtaatgtttggacagttggaacaatttagttttgttatagttttggcaatgtagcgataggctctcttgatgtggatgtaagagtagatttgcattaactattatggtttgaacttgtaagctgaatttttgcaacttatgatgaaatttccaggggaggccgaagggtgtcactcccaaatacagctt

SEQ ID NO: 25333 - DNA, 801 bp, Glycine max
  Intron number 1 from transcript Glyma14g00750.1 (locus Gly ma14g00750) derived from phytozome v7.0 (chr-ID Gm14; pos 369603 to 370403)
tgaatctgtattcgctcaatttaaagaggcaacaggtacaataattttgattccatgctaaatctgttcaagtttcatgcaagttgctcaactaatttgttcaagaccaaatgaatatttgttgctgtatgtaaattactatattgagtttatacaatattgctgttgtctctcgtgtttaatacgattactaattgcttctggtcattccatattcatttaatgaaatagctgatatcaaacactaagttcggttggcagtatcttttgtttgattttgctttttttatgtctgatataatatgttacaagttctctgtaatagaatccatcaattttttgcttgattggttaatttgtcatgatgcatattccccattagcaacatttttctttcttagaaaccatcaaaatcatgcttcaacaagttcaactgtagtatatgatgaggctcatcttgctgctggttccattttaggcatcagagttttgaatgacccgctttctttttcttctccatctgttttctttttaaacactttaatctaattggtttcaccttaacataataatgtgctgaatctgcacgtgggctaatttcaagcatctcgtacttcaacttctattccttctgcccaaaaacaaattgacaaattaacatttgcccataaaaaaaaaaaaaaatcaagtgcacaaatatctgaccttgttggggttcggcatgtgctatctctttttcttaccgtttatccttgtgtttctttttaaggtgacttcatctcatattagacgacagaaaca

SEQ ID NO: 25334 - DNA, 892 bp, Glycine max
  Intron number 1 from transcript Glyma16g03830.2 (locus Gly ma16g03830) derived from phytozome v7.0 (chr-ID Gm16; pos 3201889 to 3202780)
agttagtataataatcgaaattgtgctttaccaaggtatgatagttaaacccccttgatatatagagatcttaaagatttaacttctatgatctcttatttgctggtttaaaattctactatttatcgtgtgaacaatttggttgtgctttaccaaggtatgatagtttcttttgaaaagattgcaactgccacaaaaatgcctttattctttactcaccgtaataatgtgtatatatatttatccttatggatttggattttaattattacagataaaactgtatacttttctgcattttgtgtggtgggtgtgtgagattttgaaattttggttcagctggaaatggatctgattgaatctcaaggaaggtttttttttatttggtttattgtttctgttgggctaagaattagagaatcatggttttcactgtttggttgattgagactatttttctaataatccgagcatctcctaggcagcagcagtggatcttgccaaaatattttgagggacacaaaatagttaaaaacacttaaaattattcatagtgccatacatggaaaaaaaattcttatgcatggcactactattaagtttccattctttcaagatatgtttttttcaagcacacaaacaccgaaaagttgattgaaaaggacatgatgatgtggcaaccataccaaactatgtttggttgactgaagaggatatggtagtattatattcaggcaaacaaccttctttgggggatatgagatttaataaatcaagctgttccttttgtgataattttttatattcaacaaagaacacgagtcatatttgatttttatttataaaaccaaatggccttaacatttctatttgccattgatttcagcaaaaa

SEQ ID NO: 25335 - DNA, 780 bp, Glycine max
  Intron number 3 from transcript Glyma14g09160.1 (locus Gly ma14g09160) derived from phytozome v7.0 (chr-ID Gm14; pos 7159892 to 7160671)
tgttggcaatttggtctctgatatcactacacgtgaagaccaatcgctcaatcattcagatgggtgtcatgagagaagtagttgcaatgatggagtttcatgctgcttaatatcaaatactctggatcatatcaataggtaatgttttttctagttttaattcaagcataattgaaataaatgtttgcctataaactattatcaagttattttgaaaaaaaaaattatctgtttaaaattctttacacattgcaacattaaacaaaaggagattggtcttgactatttctccttgcgaataacaatataaatgctgaacctttaccgtatattatttgtcttctaagtatgcctaataactttttcctaaacagataatataaattgcaaagttgagtatgcctttcaatgttcaaaacaattagaagagtaagaaagtgtcaagggttaggtctccaaaagtttaagtttttaggttaaaattgttaggtttgaatgaagcagcacaggtcttaagttggttacatatttttttttaattggaagattagggatggcaagaataaaatagtcttcacttggttaaagaggctataatatgatgtcatgaatcaattctccccaaagcttaagcttctaagtggaggcttctgaatggtttatattcctaacaagtaacaagaagaataatatgagtgtgcatgtcttaagttgcctttctgatttttgtattttacttgctctcctaacaattgatacgctttgcagctctaatgaagg

SEQ ID NO: 25336 - DNA, 936 bp, Glycine max
  Intron number 2 from transcript Glyma13g38140.1 (locus Gly ma13g38140) derived from phytozome v7.0 (chr-ID Gm13; pos 39040081 to 39041016)
gtccttcaaagcggtaatattatctcctgtggctctgtaaagaatatatgaagtaaaaggtgtacctccacaaatgtttaagttttgactattattgattgggttcaaagttctattatttggaatcttgacatggagcaaggacgtgtgagtcataaaccaggataacttagaaatttgtacaatttgaagcccttcctgtgacatgttttatgaattatgagattctacggcaaaagaacaccccaattatccatactctgtctgctagaacattacatacagttttcatcatgttgtgattatagaagaggaaattaatgccatgtatgtactatggtgaacgtgggtttgagtaaaaagaatcttatcgttcactttgaatttcgtaatgattctttcaatagcctttccaaaccaattgttattacttaaaaaaaaaaaaacttcgtaccccattgcccagaggctcttcactatgcgaaggtatgggggagggatgttgtacgcagccttacccttacatatacaaagaggctgtttccggattcgaatccataaccaataagtcaccaataaacaactttactaataagtaataacaaaccaattgttattacttattagtcaaaaaaagaatgtggacatcaaaaatgtttctcgtatgtttattaatgttcataaaattggagattaagagcgtcttatgtttctttgttacttagctaacaatgattaagtttaatctttagtcaactaataacaaggttaaaatcatacttctctgctatgcttggcggcaaagttcaatcaagtgactgtaaatttgtgattaattagcctatgtgtgtcttttttaaatctgtcacctttctctctctttcattattttccctaaataatttgcaactgctacttcaggttaaggacagaatc

SEQ ID NO: 25337 - DNA, 414 bp, Glycine max
  Intron number 1 from transcript Glyma14g24370.1 (locus Gly ma14g24370) derived from phytozome v7.0 (chr-ID Gm14; pos 29258760 to 29259173 reverse strand)
gccgtctcaaaagaactggtaatcaattagcctccaaaatccaagtattaaattttactacaatttcacttcatgtctaggaattattattgtacaaatatttattcttttttcaaaatacaaaaaaaaccattatttttctaaaataaactgaaccaattgtattggtaactaataagaagaaattggacaaaacttccataaaatttcttaggtgctgtcagtgttgtttgccaatcagaattgaagtttcacacatagcaaacaattttgattgacgagatgaaactccaattttgatcatcgaaaaacactaactacgcctaagaaattatatgcaagttttttccttagttattacgaattagtcattactaatgcactcacttttgtgtttcaaaaaacaggaactat

SEQ ID NO: 25338 - DNA, 507 bp, Glycine max; identical to SEQ ID NO: 19828
  Intron number 2 from transcript Glyma16g04290.1 (locus Gly ma16g04290) derived from phytozome v7.0 (chr-ID Gm16; pos 3628476 to 3628982)

SEQ ID NO: 25339 - DNA, 514 bp, Glycine max
  Intron number 2 from transcript Glyma17g04070.1 (locus Gly ma17g04070) derived from phytozome v7.0 (chr-ID Gm17; pos 2684135 to 2684648)
tcccgtccagagcgtaagttcgattgactgattactctttcgcggtgttagcttttagttgcgattactggtagaatgtttgcaatttacgggaatgtagcgtctgcgaattttgagagattgaaatgattgctgtgttatttgctgaggtgttgagttaattagttggccataattgaataaacatatatgtatatttcgccatagttggcttttatagttatgaattatgatcgctaccgttatgaaacttttgttttcttttttttccccacaatattaatattttagaatggagtttcataatccgattatgaatgagctaattaagtgctagagttaagtcttttgggagagagagttatagtttggtggttcttccagaaatgttattttattattatcccaatgtgtaagaatgaaagttcattaagaagttgttgccatgatttcttacggaagttgttcttgtttagtaggcaatcggacatcaacttagttgaaataggaagtg

SEQ ID NO: 25340 - DNA, 730 bp, Glycine max
  Intron number 4 from transcript Glyma14g03740.1 (locus Gly ma14g03740) derived from phytozome v7.0 (chr-ID Gm14; pos 2408074 to 2408803)
accttttggcggattgtggagctaacaatcctgtggtaggaattttgtatccgttttcaaagggatttctttgttatacatgctaagagattggccaactatacttagctgttccgctgttgagctttctttctttctttttttttttttctgtctaatgaatattctatatcctttgttcttttacttctttgtcttcccatctgataataattatttttataaaaatatatttaatctctttttaaaaaaattgatggaatttgcaggtagtaaaaattttaagaacccccaaatgctttgcttctgggaatcatgtgatgggtctttctgtcaaacctctgtgcacaatatttctggttataagtcttagacttctaatctcttgcacctacttttcccttgatgctcttcttttctttatttttgatgtaattgggactcccagttagatttcatgtcttctctcaaaataaaaagccagtcatagatgaaatactttatttcaaattatatgaaattattaatacagatccagagattatgtagtcattttaaagtattgtttcttttaagtgattcaactgtctttgtgcaacaactattaaagagctaaatttgtagtttggatgataaactgaagtagttttgtcatggtatttttgtgttccatccctatctttgacatagaagttgtgaaattgatattctaagtccgtgttgcttcaga

SEQ ID NO: 25341 - DNA, 969 bp, Glycine max
  Intron number 1 from transcript Glyma15g01990.2 (locus Gly ma15g01990) derived from phytozome v7.0 (chr-ID Gm15; pos 1306811 to 1307779)
agaatcagacaagtaatatctactctagtttcattactttaaattagttatatagttagattacttgtttaaacttctgctaaaaagataacaatgaaatttgtagcacttccaatactattagataggagtctttctttttctatacaaaaatttagtgcgggaggttgctcttcattccaaggctagaatattatagcctctaactataaaaagactcacaactgtcctaagtactttttttgacagaaacagtactacgtacgtactataagtctatgacccaatcttcagtagatagctaggcctagtgggagtcttatgggttagtcttccgtaaggaattgtgtgaagaacagagttgagttgatacttattcgagcaaatttttaggcttgattctatgagtttgacagaatatatattcacaattagttcaggttgcatatgcaacagcttaaaccttattaaactatatggttttaaattgcgatctacagccacaatattaagatttttgaaatagtagttagtacagttgtaagcctttttagaggctgtaatattctagccttggaatgaagagcaacctcccgtactaaatttttgtacagaaaaagaaagactccgcaattttttgtaaagtcaaggtttttgaaatctttgcaacgcatccttaatttaaaatgtttttctttttatacacaactagcacatggaaattttaatattttattttggaaggccatggaaatcttaatataatttgagttatttgttttaagcgtagctacactttttttatgaactgtcatactgtttgaattgttcagactgcagaacaatttttaagagcaatagcaagtaactgtttcaatcacatctttgtttcactgatacaacatataatatgcagaaagaatggctgatctaattatatattcccttttattttggtttgcagctgtt

SEQ ID NO: 25342 - DNA, 586 bp, Glycine max
  Intron number 1 from transcript Glyma16g06160.1 (locus Gly ma16g06160) derived from phytozome v7.0 (chr-ID Gm16; pos 5579516 to 5580101 reverse strand)
tggtatttgtgttggggggggcgtcttttatcaaggtaggaatttctttatccgttaagaaaaattattttgttctgattatattcatttataagcattagttcttgtggctgaaattcacattaatcttctatttcttgaatttttgttaatcaacaaatggaaatgccttggttaattagtgtcttacacatctcacgcaattgtgtcaaagtcatttctttgaattcttattgttattttatccagcaaagaaaactctcattctgttatattgaaaatttgatttccattttcttgtggaaattggaatagtactaattaaaatatgaagatgagttttttttttcactcttgttttctggatttctatgtctgtttgttcaacttgtgcatatatgcatctatatttcttactcgtaaagtctcatatgtcaactagaaatgttgctgacacttttgcctggatttttctctctgcaggttcaggcaatttcgttcacaaaaagagggtaaagagtatcccttatcatcatttaaacagagaggacatatttaagtagccttggggtagaaatgacctatt

SEQ ID NO: 25343 - DNA, 1044 bp, Glycine max
  Intron number 1 from transcript Glyma13g24930.2 (locus Gly ma13g24930) derived from phytozome v7.0 (chr-ID Gm13; pos 28217985 to 28219028 reverse strand)
gtccttgaagctgatatccagcacgccaataccctgtgggtttttgtttttttgtttttgctttcatgatccttcctctgttatatttttattttttatttattttttgtgaatgtaaagggtgatgatcactgttgcagaaggttggtggcctgtcaatgactcttactcttcctttattttttttatgaaaaaaatctttttttttctcttgggggttaagggttggtgattgcaaagtgaggttcttctgggtattatgattttcttctgaggtttagcccctgtttttttttttttttttttttgcatttgtttgctttttcctctgaactctggtcagtgttcttccttgaatttttccttcataaatagggtgcatttaatttactgacaaaatctcatgcttaaattgattttcagtgttgattattcttatgtttcactgtgtctgcctccctggtgtggggaaatttttgtgtgtgaaattgtcaaaacgtttaggcggttgaattccctgaaaaaaaattgttgcatgatatgatgattttgatgtcaaattgtggcttcttaatctctgagtgttattgcgttatgtctatcatttacctgctaccctgacaggcttcatagcattccattgttctgtgacatttagtgtttgatatgtgcttgtagtgaaatatctttagagaagtaacaagctactacataatggtgtcctttgtaaatattgcaatgcaatgataattctaaggttttttcttaaggaaaatgctaaccagtgcccttagggcattggttaaggaactaaaatgagaaatttttttattgggatgtgtaaaattacattttccataacttattttttacgttttatgatttctaaaaagtattttttacttttagtttattaaccaccaatgtcctaaaaatactcgttagtaagatcctttttttaattatgtcaaattatcatcaaatatcacagttgttgatcatgtgtaattgggatgtgcagggcttcagattttccaagggagt

SEQ ID NO: 25344 - DNA, 896 bp, Glycine max
  Intron number 3 from transcript Glyma15g00780.2 (locus Gly ma15g00780) derived from phytozome v7.0 (chr-ID Gm15; pos 471007 to 471902 reverse strand)
aggtatcttactattataatatgattctattgataaataatgcatgccaaacgggtgagctataaaaatatatgaattacaacagattaatgaaggtttttgatgcatccgcttgtatatttccgtgaaagagaatttgtgtgaaggatttgagttgagcttcttgttgtacaatcattccaaatggcttgatattgattgaatgatggccagttatggaaattgaaaaaatatctctaatttgactaaaaactgaagctggagtatccttaagatctttaattaaaacaagtaacattgtcttaggagttaggggagatggaagaggaagtcagttaggatattagtcagtcagtcaaggattgaggtaaacaaatagaggaatgtagaggaaagggattcattcatttgagaattgtgcttttttgtgaaaggagacaacttctatgaagaggaaatatttggaggagagatctctctcctttgttctgtcaattcaataaaatatgtttcttttacccatttatagtctagcttcgtaacacattgtctatgaggaaggatgtagtgtgtttggtttaaattcacttttagcataattgattaaaaaatcacgtgttaaaatgaagcaacaaatactaacttaagctttttcatggtgtcaccatgattttatggtctagaatcacttctcacttgttatccaaacacactaggaatgtactatatgcagatgcagatttcacctttttctttccctttgaagggacttgtagttttcttctggagctgtctctttaacaaatttctgtattatctctggatctatgattgtctgatcaatgataatttgtataccagatagatcgcatagctcattttgcatttaaggttgc

SEQ ID NO: 25345 - DNA, 693 bp, Glycine max
  Intron number 1 from transcript Glyma14g36580.1 (locus Gly ma14g36580) derived from phytozome v7.0 (chr-ID Gm14; pos 45933354 to 45934046 reverse strand)
acgcgcaggagaggtttcgcaacattcgtttgcaggttcgtttcaatttcgcttatgaatagtgataaattgaatttatatgtgtagcaagagtgatgaatttattcaaacgtaacgaattagttacggagtgaagccttttcttctgtggatgtgtaattacttaggtcagtgtaaatttgtctgaggttaaaaatggccattgctgagggatatgtagtagaaaatttggtttttatgttgatgcaaactcaatgagtgttattttgtttgtggaaatttcccatacatttgtgtaatgcaaaatttgaagccactctattaaatctttggatgctgagaaaactatgtgctgagagaacaagaggaatatgtggtagaaaattttctgggggaatatgtagtggaaaaccactctgttgtaaatcattgctgaggaagccagaggaatatgcagtagaaaatttgatctccaatgttgatacaaatgtagtgttactttgttagtttgtttgcgggcattcccaatatatctgtgcaatgcatcatttgaaatcactattttaaatcgttggatgctgaggaaactatgtgcctcctgttttctctagtgagatgtgtactttgatttactatacccatttgtcccacttcttgtgattgtgtctttatggatctatttacaggaagaat

SEQ ID NO: 25346 - DNA, 687 bp, Glycine max
  Intron number 1 from transcript Glyma15g13620.1 (locus Gly ma15g13620) derived from phytozome v7.0 (chr-ID Gm15; pos 10215892 to 10216578 reverse strand)
aaaaccagcttcataggtaggaattaagaactcctagcttgttttctcttctcagttaatagtatttgaattcattctgtaattttacgtctaggactagcaaattttcggtatgcagttatctttctttctctatctttttttttttcaattttcccccttatttttgcttaaattaggaattaggtaaattaatcatacatgccagatgtcttgcttcaaaggaaagggagtacatattccagggatacagagaaaatttcccttgtctatgcaattaactactttgcaaccaaacttacagttttctgttttccttttgaattgcattgcatttgattgtttggaactctgattaatctttcaaactatgtttttcaatatttgcttgacattctttcaaactatattgtaaatatgaacactaaaacacaggaaagggatctccgagaaagtaggaaagttgccacctttactcaataggcttttagatctttttagttttataatctcataagatctttattacctaaataggaaattgaagtgaagccaggaatgagtaattgatgaaaaaattaagaattggaaataaaaggagattatcattaagagacactatcaattaactggttctttaaattgtgtgcagggagtgtattgagtggtggcggtagtgaacccctt

SEQ ID NO: 25347 - DNA, 785 bp, Glycine max
  Intron number 1 from transcript Glyma14g36850.1 (locus Gly ma14g36850) derived from phytozome v7.0 (chr-ID Gm14; pos 46139584 to 46140368 reverse strand)
tctcacttcaagggcaagtaccgtaattctctccctctctctctctctcatgctttgatctatcttgtagtaatcgtatcgtgtctttctggatctcagtgtttctttttttatctgctgttccggctttctttgttatgtttgtttgaatcaatttgaatttgaatttgtttgtggtgatttagatctgagagattcagatctggctttctatggaaaactttatgaaaaaaactagtttttgactgtttgtccatgtgctcttcaagggtttttgttcaaatcatcaatttagtccatgaagtatcactctctttcttaaatagtccttgatttaatgaaattatgtaagcagttcctgaaagtgttgaatatcctcgagtttagtccccgtgttgatgtattttgctaacatcgggagattaatttgatgaatttttcaaatcttgaaggactgtcgcatggtttctaatcctttagggactacttatataatcccattagtttaaggactatttaggagataaggtgatatacttgatggatcaaattgattgattattcgtttttgtttttagttatagaatttttcatcaggattgatgttgctttatcttaagctgcttttaaccttgtttgactaatgaagattcgacctgttaccaatatatgttttcataatttgggtttcgctatgttttatcctgtttaatttttgtaagttttggaattgtggtgtggttaatgttttgtgtgctggtgttaattaatgtttttgcttgcag

SEQ ID NO: 25348 - DNA, 935 bp, Glycine max
  Intron number 1 from transcript Glyma13g03430.1 (locus Gly ma13g03430) derived from phytozome v7.0 (chr-ID Gm13; pos 3435368 to 3436302)
tttttcttagagctgggaagcttgacaccaaaagggtaacctttgtttttgttctacgtgtgttgttttgtactttactaggtgttttttttttttttttgaggtaatggtagaagtaaagtttaatttaattatttaaatgacatgaagttaggatgctaaatggtgtatgtttaattgctgagcttggaagttggaggggtacgttacatactagacatggagggaaatttgttgatcctagttactttagattaattatttatgtttttgtttttgtccatgcaattttgaaaattaggcatgtagatttagtttttagctgaactgtggcttgcagtaaaatgcttggtataatagcttaatttaaattgtttactacaggtttcattagttaatagttaatcacttaaaccttaaggaaaatagagaaaaaggggtatgcacttacagtgtaaaaagtcatccaatacctaccatgtatgggaagtttgttgactttaaaaataagagttagctatatattgacggtgtaaaatagttttacattatcatgcaatcacaaatcaccattgatattacttttaaagtacttatcacaaaagtcaacaatcttaccatgcatgataggttgtgattggatgacggtgtaaaactctttacactgtcagtgtataactatttttctttttaaaataattatcttaaagtaattcaaacggtgatctgtagttggatgacagttagtgcatagatattaaactcaaatagataatgagtagttaacatattgcaagcttctcatttgtatgggctacaatttttggtacctacataactgaagaagtgtggtctgttctctttaacattttttggaacatgtcacatgtcaaatttcaggatttgaaaggtagatttagagtgtttgctgtatt

SEQ ID NO: 25349 - DNA, 727 bp, Glycine max
  Intron number 1 from transcript Glyma16g27470.1 (locus Gly ma16g27470) derived from phytozome v7.0 (chr-ID Gm16; pos 31491355 to 31492081)
cgcttgttttcgccgctgccgacttcacttcccaggtaatggatcaacttttccccctttcattcttaacgtgtttctgtcaagtgctcaaagtataaacagagtaaaaatgtgcgtcatttgcaatttgatccttgcctttaaattatcttctttttttttggcaaatattaattgttagttggagagatcgaatcaactatctttctctcattttcttcttttttaaccactcaagcacacttatatctccgcttttaaattacctaaacgactcgttttcgtgttccttttgtgatcgctcatatgaaaccatttggtctaaaatttgatccttgctgccccaattctcttaaatagaagttaaatttcagctctggttagatgcttcaagccgaaagggcttttgcatgaacaggtgtgttaaatataaagccattcatatggtttctgcaaacaacttaagcttcatctgaggaacttatttttaaagagtatgggtatggtactctgatagattgatagacttaacttaaatacactaacttgttaatgagccttttaatttctctaggtagtcgatgtaggggatctaaaattattgtgtctggcatgcaaagtatgaattgcagttattttcttatgcttaattggaaatattttcacattactaattaatttataaattaatgaagcttattttgcctttgttaaaagaatatacaaa

SEQ ID NO: 25350 - DNA, 852 bp, Glycine max
  Intron number 2 from transcript Glyma16g27470.1 (locus Gly ma16g27470) derived from phytozome v7.0 (chr-ID Gm16; pos 31492111 to 31492962)
agtgcattttgccattattctactaggactttttagtttgtacaattaatgagaaaatgcacttctcatttcataaaaaaaaatgtaggctatatggattattgagtattcaaagagaaaacagaacctatagactaggaaattaaaagattctagatccctaaaatcaggtatacaaatcaatctctcagtacaaaatttatccaaatcaaccaagaaaagaaacagaggaataaaggaaggacataatctgaataaagccacatgtttgaataatctgctgaagaaaaatgcttagacatatttgaaatagattaaatttagaaaagggttttctagattgtaagatattctaacttcaatttgttttcataaacttgatcttcttaaaagattatttcagtctaaacctcgttttaatgagccttagttaaacattttgcacttagacttgtacttgttgtcatttttaaatctgcttgatgaatgagtactaagtaagatagcattcacactatattcctcctctcgtaattcaaatttctgttggtgtaatgattactcatatttgagctggtagttgctggtgtaataacttgtatagaattgtatgagtttggtgaaggatgactaaattatttccttctcagcatatttaatgaattttcattttatcaaactactcatctgttttaaatcaaggtctaggagcatactctatttattgaataggataaaaatgctctcattatttttattactacttgttttgacttttattgggtctttgtcactaacatactgatatacacatttgttagattattacattgcccagttttcctgcttcat

SEQ ID NO: 25351 - DNA, 709 bp, Glycine max
  Intron number 3 from transcript Glyma16g33360.1 (locus Gly ma16g33360) derived from phytozome v7.0 (chr-ID Gm16; pos 36304578 to 36305286)
tgggcttctcttgccccataccaccacagaccaaggtgattcctatttttgttatctttgtttttttattcttagtactttatgtttcttttttaatatcatgtgctatggcctgttaaagcatttctgttactccctttgtccccaaacaatagttccccctattaactttgtgaataatatatgtaaaatggcttactcaacctttgactgatgatgttgttggcacagatgggatgtagaaatgcttatttctatgaaatatttaacactattgcttctttatagttgtaattgaaaataatcaaacaaatctactggttataccaaattatagacagggagtgtttgatggttgtcttgtggttatgcaattagcggatatcataaagattccgaattctgttcttttgtttgcaagcagctcatctttatctaaactatagtctctaggccattcagcatttttttccttggttttgatcagctcttatttgtcttctgtacaaattctttatgttgaggcctgagggtgggatttctggattatgacagtattttttctctcttgtatctgatgcataatttttgttggtggtatatataaagttccacacaagttacgatatactgacttatggtacttgatcttattgccacggttattgctgtagaacttcaacatttgagaaacagtctacctgatcaa

SEQ ID NO: 25352 - DNA, 682 bp, Glycine max
  Intron number 1 from transcript Glyma16g33470.1 (locus Gly ma16g33470) derived from phytozome v7.0 (chr-ID Gm16; pos 36373752 to 36374433 reverse strand)
gtcgcaaagcaaaactctcttttggcactgctgtgagtcttttttccttttttgcctgaacaagttatatactccctggtagctaggtatgtgttaaaatataggagctttattttatactgttagatgctatatttttttatttttaaaatggaaactttatggtatcatggaaaatttaagggctttgatattgttactcagaaagcctctctttttgtttctctctttgtactatgtccaaactctaggagttttctgggaaccataacaacataaaattaaaaaaaaaaagaagatagatttttaatttcaagaatggagcaaaatgtttcattctcttctggctatgtagtaaatgctctatactaaatgcatgctagctgtccgtgtctatgtttgattggaagaatatatagttagtttggtgataacacttaatagtattactttcgtcatctatctttgtttactttaggatttgtttggttttgaactttttgagagtaactatggtctatggtttttcttaattatgcctaatagactactactccatgtgttatgtttgaacatttaagcatatcattattaatttcttatgctacttttgccaaaggggtacataatttgttcctaacaattggttcattatgcgttgtaaacataattaattaggcct

SEQ ID NO: 25353 - DNA, 927 bp, Glycine max
  Intron number 1 from transcript Glyma13g23770.1 (locus Gly ma13g23770) derived from phytozome v7.0 (chr-ID Gm13; pos 27098472 to 27099398 reverse strand)
actacgaggcattcaagtaagttgctcttataatctatatctcctttctttcattttttatgcatagatattaattattagtttattaatttttgttagcatacaggagagattgaatatgtgatatttttctccttcctctatcttcctgctcctcatacataactttactttgtttgagttataaaaaaagtttagaatcatctccttacttaacaaccttttgaaaaaaacagtttttttgttcgtaattgtaaataatattgctaaaactttggtctttaatcgaattaaaataatatgtgatttgtgtagctgattttatttagtgaaataaaattttattgttgcatgtctacctttaattttcactttttttaagcgaagctggcatacacatgtggtacatgtagcataccaggaatatattaaaatgaacatagaaacacaagtatgcatggccgaaacccatgaagagaaaagcgaaaaaataaaaagcactcttcactcttgaatgtgaggatagatcccaaaaaacctgtaaaaaccgactaaaagaatctatattattagttaactctatgcaatagaactgattcagagaattaactcaagccacacatagaaaagtgctgcaaagaggaaaccttttcactttatttgttgtttatatatacactttttaaaataaaaataaagtaaaaacatattaacatttttataattaacaataaaaatagaaaaaactcaaaaccaaactcactttatttctaccttatcactttattattattgcttctgtatggtgcaactgcaaaaatatttgtagtgggcttaatttgttaaggcgttgcaatatgcgcggttttgatttgggtatgtgattatgcaggtacttcctatcagtaaatataattgggttcgtgt

SEQ ID NO: 25354 - DNA, 933 bp, Glycine max
  Intron number 2 from transcript Glyma16g09360.1 (locus Gly ma16g09360) derived from phytozome v7.0 (chr-ID Gm16; pos 9236790 to 9237722 reverse strand)
ctgaagaggaggttgattttgaattgtttctcaaggtgagttttattttgtaatcttgatttgctaatcatctgttcaggtatcaacctattgagggtggtggatcttttggctttttcgaaattcgatatctacattctacactatgcatcacctttttcgttttcattcttttttatctgatccattactgttctcttctttgccaatcttaaatcttttcaatatcattgaaataggagaagaatatgcgaattgaaacaggtgttttctgttgctttagagcccagatgatgatcaaagatcagccggttgatttagagttttctttatttattagtacaacaaaaaagataacaataaaaaatagaagagaggaataagtagaaaagtatatatggtttttgatttttctcgtttgaaaccttcacttatagcctgtttgtttgacaacccaaatagtttgccagaatgaaaaataaaataaaaaaagcttccttcagtgaaattgcatcaggctgtgcaattttagattttagtgctgatataaatctaatccaaatggcatttaaaggatatttttcatttttattaattttcttaccaatttcctttttttctccctaaactcaaaagcaccttttcatccttcattttgctgaaatttccattgaattttctaattatactggttgcatcttttgtaaatgtataaccatattgtggagtattttaattgatatagtaaccagacagtataaggaatgaagtttgggactggttcatctcaagagtagaaaaatactagaaacatactagaacaatttcagctattgtgatcaggttaaattttgatccaaggataacttgtaatagtgatataatataatgatgacaggtctacttgaaactccaaacatttgtgaattctag

SEQ ID NO: 25355 - DNA, 870 bp, Glycine max
  Intron number 1 from transcript Glyma16g19320.1 (locus Gly ma16g19320) derived from phytozome v7.0 (chr-ID Gm16; pos 21290745 to 21291614)
caaacaagaacgaaacaagatgtaaacaagaacgcaaataacataacaaggaaaaaaaacacgaacctagacaaattaaaaagaaaaaaataggataggataggataaaacctgtattaagagccaaagctctgataccagatgatgtgaacctgactaggagcggatcgtttgatacaggctacgaaattttggatgacgccacttccagtgacggaagataagtcaggatagacgccataaggattaccttgataagtctgagattggttcaacaaggaacccagagagaaactctcaccaaattttatcaaatgccaaaagtttctttattgaaaacaaaaaccaatacttgtagtgtatctgaacaaaaagataaaaatagacatgggccttctaaacagtttgggtcaaaattacaataaataaaaattataactaaaaacatatttaactttggcctttaaattagtttgggccttcagcaacaattaatagtcttggtagtgcctctgcctctgggccttcatctttctccacttgggccttcaatcatcatcaatggcagctatacaaatgaccagccttgtctctatgacgtgttgggcctgtttaagtttgcctctagtcatgggcccttcaagtgcttcatggtccatcaattagccaggtcgaatctagtttgagggtgaagtttgtgtacagcagtacaggatatacagtgccacatttcaatttgatcaaatagtcctgtttcctgatgcatttcaatttgattatgaggtattgtgatgttttgttcttccatctattgattcaaattttattgctgcagggatacgtactaatacggaggctgttaagcaggga

SEQ ID NO: 25356 - DNA, 355 bp, Glycine max
  Intron number 2 from transcript Glyma15g19230.1 (locus Gly ma15g19230) derived from phytozome v7.0 (chr-ID Gm15; pos 16391520 to 16391874)
aacataagaaggtacttgactcttgaacctccatttagtatttaacacaccgaaattatatttaaagttctttcatagttcatttttagcataatgattaaatcaaaattgatatctgacttaataatcgactaatgttttaacaattattgattacagtcatagagttttataatctaactatatgctagaataacggaataagtttttttttgaaaaagcattctcttcccttgtttcctaggaaatgctagaatttgtgagcctctgcatcatgttaatatttttgttagtagttaaattaaagcttttgacatcaggttatcactggcattgcacttcctgttggatccga

SEQ ID NO: 25357 - DNA, 699 bp, Glycine max
  Intron number 2 from transcript Glyma14g08610.1 (locus Gly ma14g08610) derived from phytozome v7.0 (chr-ID Gm14; pos 6604159 to 6604857 reverse strand)
attcttcagagctcattacccagcactacgtcgaggttcgacattatatctaacattctttagtgactaaaattacctttttttattagcactgaaatcagataaattgtacacgtaaattatttcttcacaaatatgcatgtgtttgatttcaccctgtttgattatttagaatcatgttaaaaacaatttggtcctccattatcgatgtccttcaattcactaggttaatgcattaattgtttctaatataccagatgattaagacaaaaaaaattagataaaattttgcatttttaattttacattaatgaattaataaaaaaattttgagataaaataacttttaaatggataaaaaaatttatgcaaaattttattagcattaccgacttgcttttgtaattctcttaaaaaaatttaatgttaaacatatttaaatataaattatatcactttaaagttaatttcatttaaaattagtttttattaattttcatcaaaataaacactattaaaaaaaatcaaaatacacactaactcatgtttgaaaaaaacttagaaatatatatttttttctcttaaaaatatcaacagttgatccaaattaatgtaataatgatcatgttactgttaagaattacaagtgacagtagtattgttgttgtgctttcaggttcgacgacacaaaacagcgtt

SEQ ID NO: 25358 - DNA, 695 bp, Glycine max
  Intron number 2 from transcript Glyma13g21030.1 (locus Gly ma13g21030) derived from phytozome v7.0 (chr-ID Gm13; pos 24517522 to 24518216)
atttgtctcatcttgctcttgacattggaggtatattatatagtgcttatttattagaattagaattcacgtttcatggcttttggtatgtgaggtaatgtgaggtgaagtacagttttttggtgtttttcttttaatgttttgttttcttgtttgaaaattgtttgcccttattgcttaccatctatgttatatgattatatttggttcggttcctgttgatgccaagtggtttttgttgggtttctgttttggtgggagtttaagtgttagaattggcaatttctatcatcttttgagaccttcccttatttaaccttaaagggttctttctttgttatcttttcttctcgttttgtatcattctttggggttttagacctggttgtgtcccttatttctggtatttttacgctgttctttgaggtctatcttggggacaaaaaagaataaataaattaattctatgacagtgtctagaacagtttttttctttttctttttgggttcttcatagttttgttttatacttaatgaagtataataggtaaattgactaaattctctattaatttaattaattttaaagaaaataaatggctggtagcatgtgaaacatgtctgaactctgaaactaatcttatctgattatatgggcaggatctctgataaagttggtttacttttcaagacat

SEQ ID NO: 25359 - DNA, 564 bp, Glycine max
  Intron number 2 from transcript Glyma13g42550.1 (locus Gly ma13g42550) derived from phytozome v7.0 (chr-ID Gm13; pos 42500576 to 42501139)
tgactgtggaaccctcttctcaaggtaactaacctaaacaaccatcaagaacgaccatttatgaatcacttcacaagtcaaagaaatcattcatttatgaaggatgctatttcaatccgaggttgactcaaattcacgtctctatattcaaatgtgtacaatattaaacccacccgcattccttatcccttcttacaatggagaagatgatatatatacactgaacatttgaactaggtaatatatataataaatactatatagtatatagaatatacgtacctaactataatgacacccttgtgacttgtgagagagaaagtgttagtacagggaaattaaaattgagaaattttattaatgcagtggcaggtgcctaacatggagtatgtatgtgtgtgtcttttaggtgttgggaaaagagaaagagtcaaaaaataaaaatttgaggactgttacagcactttagtgacatgggtttggttttggttttgtttgtatgtgttttgcttatgacaatcatctgcaggagggacagtttcataacacacagagccttctgcg

SEQ ID NO: 25360 - DNA, 417 bp, Glycine max
  Intron number 1 from transcript Glyma14g25590.2 (locus Gly ma14g25590) derived from phytozome v7.0 (chr-ID Gm14; pos 31169343 to 31169759)
agaacttcagcaacaggatcaaccctccaaggttcactgttatcttcccttgaattacaactttggttttcttttcttttccttttgtttccaatggtatgcaaattatgtagattctcttggcatttgtggaaatttaggcctcttttggattttcctgtgatgctcaattgctttaatacaatcttaataaaaaggaaaaaaaaaaaaaacagaacaacataaaattaaaaccttcagtaattcctaacttaactagtcatgcgttatataaggaagatgtcatcaatttaatcctctctcgagtcaagttaaaactccctgtgaaattggggttagtggtggaatttctattacccagaagaagtgactctttgatggtaactttgtttccacttcgcagggtctctgtggaca

SEQ ID NO: 25361 - DNA, 651 bp, Glycine max
  Intron number 2 from transcript Glyma14g25590.2 (locus Gly ma14g25590) derived from phytozome v7.0 (chr-ID Gm14; pos 31169775 to 31170425)
attgtacactgatcaaggtataatttctcaaaatgattaattattataatgatatttatcatggcctctttggcagctcagcatcttaggaaacctaccaagcccatgtggatttttaaagttactttattaacccacccattgccctatttttttcaaactacgtacattgaattttacattattcttaattcttatgtgccaaatgagactttgttgtccctcattcaattctctgagcttaatcaaaaacattagccaaatttcatttaacaagaagatcattctcatcccacccacaagtgataccactttcttgattgcctttgattagaaactcatgttaagaagtattttcttccttgatctactttgaatgtttaaacagaaaactcaattgaaaaacttattgaatacatagaaattctgttaaaaccccattaagtcaattgctaaaagattaagttatgcaaaacagtagtctatcccaagtggcggctatcatcagcagatcatttttttccatagttcttgaaagaatcattaatatggagataagtttatgcaatatctaatgagtcctttttatttctttatttcaaaaaataaactgcagtttgatagtattaacaaacctggaattctgctgga

SEQ ID NO: 25362 - DNA, 785 bp, Glycine max
  Intron number 1 from transcript Glyma16g06840.1 (locus Gly ma16g06840) derived from phytozome v7.0 (chr-ID Gm16; pos 6154871 to 6155655)
gacgctgaaactgctaaggtttctctcttctgtcactacactaattcttattctttttttccttgtttaaattttttgtttttgtgcgatttctgggtcttttgaattatcccaatctctttgataatctttttcatcttcgtttccgatttgggtttggtttgtatttgcattttctcttgattatttgaagattccttttgtgggtttcttgcaagttttcttttttattattgggttttttacttccttggaaagcaaagaatttgtgttattagcattgtgttatgttttcccagtgtttttgagtttacattgatatgcactatagggttttaaatgtatttggcgacccagttgcgagctgagttgtgtgttgcagaaatttattacgattcaaggcgctggaagaattgcatatatcaaattgtgatttttacaattttaataacagtctgaaacctacaaatggggcttgttgagcctttcatttgagatgcaaaccctcttggatatttggacttgttaaatcaaaataatgacgaggaagtcctgtccctgtcctctgaaatgattgttatctttgatattccatgagacattgtggatttttctctaatacatatgtatttttaatttgtttatttgtactgctaccaacttttcctagttcaggtttactgcttctgcacttcaatgaactatttatttcaatgatctttcgcttaccattatattttgttgaaccaggccaagcttgctgctgtgaaagaaagatttggacg

SEQ ID NO: 25363 - DNA, 781 bp, Glycine max
  Intron number 2 from transcript Glyma15g01310.1 (locus Gly ma15g01310) derived from phytozome v7.0 (chr-ID Gm15; pos 803656 to 804436 reverse strand)
ttggtaagttacttcattacacttaaaatggaaacagttagttacctattgttaacttgttcattctgtgaaatgaaaggggtcaagtgtggttttataaactactttatagcttttagagaggaaattgctagcacggccggaacaccttgctgcaatgcagttcttagcttgataaaaaaaaacagtatttgatgtttgctattctaaattttgctttttaaactgtgctccaacttaaccccaaatgaaggcatgtgtgtgtgactgattatatggatctagtgaagattggctggttcagatatcattatccatgagaaataccgtgcgtatttttcaagcatggtattggagtttcaatcatttcatattaaacactaatttagctggagccttccagaaattaggttgaaaagctttctgttagactttatattttatttaagtatattgtcatttgtcactatacataagcttttgatatatggttctaaacttctaatggctcctactctccctattagaagacaaaatcattaattttggatctatctccacgcacatagcacattgaaaatttctgacattaggcatgttatagagtagggacttgggagttggaggggaggggcacaacaaagatttttttgaatcataacacattttttcttttttgtccaatacaatactccctacccagtatcttttgcttttatatgttctttcttaacgtcatttaaaaaaacaatatataacaaacatatttactatttggtag

SEQ ID NO: 25364 - DNA, 842 bp, Glycine max
  Intron number 1 from transcript Glyma13g21320.1 (locus Gly ma13g21320) derived from phytozome v7.0 (chr-ID Gm13; pos 24796458 to 24797299 reverse strand)
ccactgtctggctcgcttgggacaccaaacattctgtctgttcctctctctctccctccctctcttaaactttttgtttgggatcttttttttttctttccctaatacgttgttttaggttaactcatgaaattcttttgtttttctcttttttgagttcagcttcgtgttagtctggttaatttccaatctagacagaatacgggaaattattggcatttagcaacggttgacactaaattaggagcaattttttttcttcgaattttgttgacttgctttgtttttttttttttttgattaatttgtaatctagagtcaattcaagagattattggcatttggccatggtttgacactaaactaggagcagtttttgtttttctgattttgttgagttgttttgtttgtgttttagtctgcttagtttataatctagaaacaatacaagagattataggcattaacaatggttttggcactaaaatagtagcaatttttgattttcgaattttgttgacatgtttggtttttgttttagtctgattaatttctagtctagaaacattacaagagattattggcgtttagcaacggttgacactaaattgtaggagtgattttttgtttttcaaattttgttgatttgttttgtttttttgttttgattgatgtataatctagaaacaatagaagagattattggcattaggcgatggtttggcactaaactgggagcattttttgattttcgaattttgttgacttgttttgtttttgttgttttttgtgtgtggagatctgcagagatacgtggctttgaaagttcagaagagtgctca

SEQ ID NO: 25365 - DNA, 921 bp, Glycine max
  Intron number 2 from transcript Glyma17g01660.1 (locus Gly ma17g01660) derived from phytozome v7.0 (chr-ID Gm17; pos 1012968 to 1013888 reverse strand)
taaaattaaactctgagggttgtaatctaaatctagtaagtatgtctgttacacttttacttatgttgtattttggctatgattctgtcttggactttccccctatcccataatatagacaatagtctgtcattgactgctactagcattaacagccttaaaagtcccctccccatggaatgatcaggaactactactggttagttcattatttgtatacacttgcataatggaatgggggaaatgtcactaatagacccttgttttcagtaactgtattcattgggggtgaatgtgccttcagaattaagctgccaagtgccaagtgcatgcctaaggtagtgtttgtataggaagaaacttctctaattagtttctatagaagttttctcttttgggtcttgttcattaaaaaaaggatacatttatttttaagagctttacaaggattgtatttggcccaacttctccttttaaggagaagacaacaacaacaacaaaaaagccttatccccctaggtgaggttggctacatagattatatgatgccgttcggcatggttaaaaaccaaagtttattgggccaaacgttaccttaaagtattcttgtctctgatatgccatctcatttggacttgaattctggacaactggcacatgccactaatacattgtattgacttaaatttaatttaattcaaaaattaacaaggggagaaagggttgaactcttgcttggttgagaaggttctggaccaactatttcaaaggattaggtgttaggtgcaaagctagagtgctttttatctgacacagattttactcttgtggcttttgaaatttggtatagataaagtttaaatctcaggcatatatgatataactactagctgcatcttctgttacttttgaaaaaaagat

SEQ ID NO: 25366 - DNA, 711 bp, Glycine max
  Intron number 1 from transcript Glyma17g01660.1 (locus Gly ma17g01660) derived from phytozome v7.0 (chr-ID Gm17; pos 1013945 to 1014655 reverse strand)
ttcttcaccaataggtacttgtgcttctgggtctctatatttcagtatcaagtttcatttttttagttgttttctgtgagtgagtgagtttttaggctgcaaagggggttatgctctaaggaataatatttcaatgcctgtgccttctgccatagggcatttaatccatccttcttttttgtttgttttatacttgtaatcttgtataaatatttctgttcaatttcccatatgattttttattggtttcattaaatgcccaaagctattgagactcattttattcttttctcttatccacttcttgttttcccttatgttccgctgaatcaaaaaagtgatgggtgggtatctatattttattccccctgccctctctcttcatatgaaaatcgtgaagttttaattgaatgaagacattggggtgagcttaattaaatgaatgcttcttttcatatgcatgacctgtgatcctcaatttattgacatttgttcatctcccttgattctggccttgcttgtttgcgaacaaatatccacttaggtttataaattaaatgctcacaatctctgcttttattatcagaatttgaaggtagaggtccttttttttgtccaatttctactctattagtatttattaaaataggtcatgaatgagataatcattatcatatacaaggaatgctaaccctaattgtatatcaggat

SEQ ID NO: 25367 - DNA, 348 bp, Glycine max
  Intron number 2 from transcript Glyma15g08670.1 (locus Gly ma15g08670) derived from phytozome v7.0 (chr-ID Gm15; pos 6132946 to 6133293)
ttgttactgttcttgaaccatttttctccaaggtataggttctttttacacctccacttgtaggagtaattgatgtaatgtaactttgattgacctggttgactagtggctgaaagaaaatttgaacactccaattatgtgaaattaggaattttgctttaaatttaagtattttatttatgttcacgaaacatttatggactggaagatgtggaattttgcagcatcatatcactttatcttgaatggttatatatttcttgattgacgaatgaataatgattgaaactatttagttgcccgaagtgaaagttaatccattgtttttttcttcttttgtagtaccta

SEQ ID NO: 25368 - DNA, 399 bp, Glycine max
  Intron number 1 from transcript Glyma16g05090.1 (locus Gly ma16g05090) derived from phytozome v7.0 (chr-ID Gm16; pos 4400385 to 4400783 reverse strand)
ggtttttagctcccccaatttcttcgctcaacgtgagtcccctctttcatcgtttcagatctgaacatgtttttgcccatgtttccatcttctatttccctatgtttcattttattagagaaactcattattaactattaagacagaagaaagctgttgcaatttctttttacgttatattttgttgctgcgtttcgcctaggaaagaaaggtcggaaccttttgtttttctctctgacgatgatgcgattttttcgagttgtattttgatttctgtggcgatggtgcaatttttttattattttaattttgttgctgcgtttcgcttatatgaaagtggttacgtttgatgaataactgtcaagtttttgtgcttctgggtttgataggttcttcaaa

SEQ ID NO: 25369 - DNA, 762 bp, Glycine max
  Intron number 3 from transcript Glyma14g07790.2 (locus Gly ma14g07790) derived from phytozome v7.0 (chr-ID Gm14; pos 5877008 to 5877769 reverse strand)
acccccacttctggtaaatgctaaactaaaccctgaactctattattcttttgtcctttaccataagcacaatgtttgatgggtcttggttaaaagttaaaacatttaggcctcttccacctcccttctttttgcggtactcttacttttagttacataaaagaggatttaacatctataatacaacagttgaaatacagtctctgtttgtgtaaactttttgtttagaggtggagcaatttttcccacgagaatactcctctgttaccggtagtcaaccttcatattgaagccctatgaggatgcttatccaaaaattaaaacatgcaccatttactcatactcataggctatgataatgaatacaaataataggcccgacactgcaacacacaaataaatgaatataagtaaataacaagtaaataggtttctgacacaataggtggggatttttaaatatctttcaataaaagaaaaattttgatgttgcgttcttatattgtaacttcaagggatatctattttaaacacgtgtcttctttatatcgtctattgcctgaccttatcttttgctgttttcccatctagtgtaaggttttcaaactcagtttgctgtgtagaatggtcccagatattgttattgacattcagttcctgatgctctctcctttatgcactttggttccttgggttgttgtttctttgtttggcattgatttttctctcttcttcctctatgtgcttattgcagatctgtcc

SEQ ID NO: 25370 - DNA, 767 bp, Glycine max
  Intron number 1 from transcript Glyma14g07790.2 (locus Gly ma14g07790) derived from phytozome v7.0 (chr-ID Gm14; pos 5878251 to 5879017 reverse strand)
attttccgtcttttctctcagtttctaatttccgagtaagattcgcacatgcttatggttctttcgtttctctgtttcgtattcgtatgcatcaactcttttagcttttgaatgtttcgaaaccctagaaattcccttgaggttcgagaaaaaaagtttgacggagaaacggatttagagacgattgattttttttattgtttttgtgagtttcattgattttggaagtggtaagaaaaatggaatcgaattaggttattgtttctctgcattggctttgatttatgttttgaactgtgaataatgacggtgtttgtgtgtacggggcgtgattagtgcatcgtgttgcttatgtggaaatctggtactcgaactagttttaaatgaacttacaagatgattgagtagtttttcagactttacagatagaatatatttaattgttcttcctttttttttccgtttagttttagaagctaagcctgttgtgttcatggctgaagcacagtggtggtcatttggagttacattggtttatgcaattaatagaaactctttcttatgattgatttttttgatggaatgttggctgaattagatttgtcagactagagctttcgaaatctaaagtttagaacgtggttctttatctggaacttttgttctcttgaaggtttttaagttaccttgaaatctcagtttaatcgtctttcctttttgtttatttttcaggaggaagtaagttattgtttcttgctggaaattga

SEQ ID NO: 25371 - DNA, 969 bp, Glycine max
  Intron number 1 from transcript Glyma14g12570.1 (locus Gly ma14g12570) derived from phytozome v7.0 (chr-ID Gm14; pos 11429995 to 11430963 reverse strand)
gatccctttgatttgattcgcaaaggtataatttgtccttccatactttctataaatttcagatctttcacttacccatctcatttaattgtctgttcccccccctgtaattaccttcttttgttttgttttgattaggttaattgtattattggggtttttttgtttttgattttttttgtgttgttttttgattcttcaaagggttgaatcacttgagatctcgtaaaggttttggctttcataatggaaggttgtgttattgttgctcatgctttgactttttttcttttttgtcttcagctggttttaatctttcgcacttttattttgtttgttgttcctatgacaaggtttgatatttttggattttttattgggtcttaataggctttctgtgtagatacaattgaacaattcttttaattgttgtttacttcatcttaaccactttcaattatttgctcctgaaaaaaagagtttttgcttttatcctgctgtttcttacttggtgtgaaattgataagtgttcatcgatgcattttttatattcatatgattagctaaaagttgtgtctgtaattcataatacatagtccctttgttgtccaattaagttttatgggattcacttccaagtttcagttttgaaaatggtcaatcaatggttgcttgcagtaataatcaacctaattacagatgttttatgtatgcttgtacttctttgttgatttgactatgcaaattgttttaactggaattcaatattgtgttgtttatttgtttgcattcatgtatcatgtgatctaggatacagttgaattcatttgtttagtatatgatggacactttttgggattttttttactgttcctgttattttgacgacagtctggttgatcaactagtatgaccaaattgaattattttgcagggtttggctgaagctatctggaatatttctgttac

SEQ ID NO: 25372 - DNA, 650 bp, Glycine max
  Intron number 1 from transcript Glyma15g22770.1 (locus Gly ma15g22770) derived from phytozome v7.0 (chr-ID Gm15; pos 21450029 to 21450678)
ttttttgttgggttcagattctgtactggtaactggtaagtggctgctttctgtcatcattttcttcttcgttaaggatatatatgatatatctgttaatggatcaccttctttgtcataccatttgtaatattgttaatttttttgttatcatgccattattacgaagtatttaattttgcggatgactgttccccgtcagaaacttaactaatcacatttagtggaattttcatgagtctcgttggaaattggcaattaggattttatataacgccaaaatttcttctaggtgacttgtatagttattctgtttctgaggcacggcacatggagtagtagtagtctagtagactttcaaaaatagattccttaattttcgtgggttttgtgagtttatttgtttatttatacactatgctcacatgccttggtgacagcattttctctcagataatactttatcttaaaatattgtaattgatctctaaagtctattttgattaaacaaaaaatcacaataatttctccccctatcattctttatgattgtaatttgcaagttgaagggtgattgtgatataccgatattgaatttctatgttctgtgttcagaatttggtgatagcttcaaatccaataatcaaggt

SEQ ID NO: 25373 - DNA, 581 bp, Glycine max
  Intron number 1 from transcript Glyma16g13560.1 (locus Gly ma16g13560) derived from phytozome v7.0 (chr-ID Gm16; pos 14631303 to 14631883 reverse strand)
cagcttctggcttgtcactttctgtgaacaaggtatgtctataattctctataaaatagtaccatttttttagcctcatatttttttatggaaaattaactaaaaaatttcagtatcctatttccttggccatgtttgttttcacatatatactcttttgagatcattcactacattaagtctgaagctggcttccttttcttcaaggcattattctccatttggtttcatatatgttccagaagtgaaaatgatgagcatgattttagctttgtggcagtacttaaaagtaggacattacctggtaaatgttttcgaaatgcagtactggtatgccaaaggttactctttgcattttctcagcataaggaacttttgtatttatgttgttttacactatgattgatgattccattatttgaatatcaaagaaatgaccaaatttcttagtaaagtcaaccttatgtagttccaaattctcagattttctccaccaaaacaaaaaaaaatttaaaaaaaaaatcctctaagattttcaatggacaggtttcttgagtctttcttgtggtggaagaaccagt

SEQ ID NO: 25374 - DNA, 559 bp, Glycine max
  Intron number 2 from transcript Glyma13g06700.1 (locus Gly ma13g06700) derived from phytozome v7.0 (chr-ID Gm13; pos 6849610 to 6850168 reverse strand)
acaaagtcatcaatattcaagagaaaactaaagaggtttgtaattgtttgtgttaatcatcaatcagaattcatgaaacaaaatgaaaaaaaaaaaaaaacttataccacaattcaagttcctaacataactttctaaattctcaaaacatttgaaacagatggccttcctctcatccctgaagcagattgctggaatggaatctggctcattatctgactcattgatggcagagttctttaagctagttctaggaaccctttctctccctattaaccttcctagcacaaactaccaccatggattccaggtgtgatcattgatttattagcaaatgttagttgttaattgttagtttttattagagggggattcgatctttttccatgttagtttgcatgaaaattgaagatgaatgatttatttcattgttttataagttataatcactttatttgttttcaattttcttttcatataagaagactttgacttaggcctgtttaattcactgtttcttgcaggcaaggaagactatagtgaaaattcttagtaaact

SEQ ID NO: 25375 - DNA, 502 bp, Glycine max
  Intron number 1 from transcript Glyma15g40200.1 (locus Gly ma15g40200) derived from phytozome v7.0 (chr-ID Gm15; pos 47204804 to 47205305)
ttgataagaaggtacccttctgtgcttcaatgcttattgattatttcattgtaattcctttaccattgattttaagttttgcttttagtatagaatgatgcaatttggttgtttcattaccatgttgctgcctattattaattcttacccttatttagatgcaatctggaatatgggagatgcataatgtaaggaagatggtcaccattaggataaaaacaactactttctttagatcccttttttccctagattctccactacctatattaagtggatcagctactttccctgtttgagtgttttgttcttttgctgtttttttcttttggtaaaatattcctctgcccactttagcaagatgtagaatgaagtattagattatctttataagtggatctaatgttaaacaaaatgtatttgttatctctttatcctcccttttctcattcttacactttatgatctatttgcatgttaattctcaatgtcgaatagatat

SEQ ID NO: 25376 - DNA, 161 bp, Glycine max
  Intron number 2 from transcript Glyma15g18760.1 (locus Gly ma15g18760) derived from phytozome v7.0 (chr-ID Gm15; pos 15644970 to 15645130 reverse strand)
agttgtaagatcttccacttattttttgttttatttttgtttattgttcttcaaagtagttgtgcagaattttgtttcattaacattttagttaattgtttttcatgtttcagtctaatatgtttgattttgaaaacttgatggctgcaggcttacatctg

SEQ ID NO: 25377 - DNA, 964 bp, Glycine max
  Intron number 1 from transcript Glyma15g18760.1 (locus Gly ma15g18760) derived from phytozome v7.0 (chr-ID Gm15; pos 15645195 to 15646158 reverse strand)
cctctccgatcaacgacctctttcgtcgccctaaggttcctctctctcttcttccatcttctctgattcgatgctacctctcgctctccttcaccctgttattttttcgtattcaaccgatgtagttgttatcgctattttacgattggatctgcttacgcccctctggtttgctagcttttgttcgttttgaatcctatgaacctttaggaagttacttttagtatcgttttttttatgctctcgataacgatgatatcatacggagatttagatttatttccttttcgctcgtgatatctagtttattttcgttgatcttaggtttttttctgacagttcttttacgctaatttttttgttcctttagtttttttttgtactgatctgtttagcgtgtgttttggctcgcttggagtttaaaaacttgattttattagaagtgagatagagtgaagcgctataaataattatttggaagtggtttcgttgtaatggaatgtctttcgacatatgatataaattactttttgatgtgttgttaacagaaagggtatgagctatgtcttgagttagattgaaaataatttgatgttaaaaaaattggtggtaaaaaaattactttaacacttgtttgagcggtattaaattgaatcagttctggagtaaaactacaatatgttgaaaacgttattgagtgttatatcgagttattagtgtatttttgtcaatttacagacaaactaccggatttttgttccgtaatggccaaagcacaacaaaatttgttgcctctttggctgcagtgagagaataatgttcacgtgcaaacatgtatttgcctttgccatacatgttggccgcattttatgtggtgcatttgagctgcaaatggactttggattggctggacaccaaaataaaaacttgcctttgtaatactatttcttttcatcttgcagtc

SEQ ID NO: 25378 - DNA, 958 bp, Glycine max
  Intron number 1 from transcript Glyma16g17760.1 (locus Gly ma16g17760) derived from phytozome v7.0 (chr-ID Gm16; pos 19454557 to 19455514 reverse strand)
cctacagaaagacccccctgtgtcctgtagtgctggtatgtttctttgttcttttttgggtctctctctccttttttttcttcgtcttcaattattatacaattaaaaatttacacaaatgttgtacaattcaaaatgtagtttttttgaaaaatgttgtttctaaaaaaatgtatagagcaaggttttaaattgcaattgcagttatggtctggttggggttttgtcgagatgagcactatggtcgcaatgggcccaaaaaccttgctttgttgttgaaatcatggtcacagactgcaccaaggttttaaaaaagggtcctgggctgtaatttcagtaacaaggtcaaggcttttgggtgataacgatggccgcaaattgtagaggttgtatttgttcacaatttaaagtaatatcaaggaacataagaaaactacgacaacaatttaaacccttggataacacaatgttggttgatattgtgttgtgatggactttacatgatttaattttatttttatattatcttttgaatgtttgacaaacgttttttatgattattacattgttgtttacacactcctagggttgtatgcatatgtaggtctgtttgtgtggaacgaattaatttaatttttaactgctatggaaaatttgtttgttgctagctatcacaatatttcattgaagatgtatgaacaatatagtgtgtgggtccttaacacttctactactagtaaaatagaaaatttttaaatttagaggttgcgtgcaccccaaattatgtagttgattttttttcattttatttgtttggtaaaaataataaaatgatttcatgaggataggaacccccaatgcttctacgtttgcttaaaacctgtcaaaacttttagattattctttattcaatgagggcatgaagaattgaattttttatgttcaggcccagtgacta

SEQ ID NO: 25379 - DNA, 940 bp, Glycine max
  Intron number 1 from transcript Glyma15g10520.1 (locus Gly ma15g10520) derived from phytozome v7.0 (chr-ID Gm15; pos 7637329 to 7638268)
tccctcgcctctcttcccaatctagttgtttataaaatctcctttctcgctctcttcatttcacttgcttctgttccatctgcttcttttgtaaacctgttttcttaatccttttaaaaggaaacccatttgattaattgattaatattgtgttgttgagttggttaagcaagggagatattttcccctgctatttccatctcttcatcttcactcacgttatatcgattgcatttccatgccttcattgtttttagagatatataatattaagctattctccttgagaattcatagacgattttactagtcgattggactttcaattaaaggggtggtctgactctaatttcccttcaacaccctaccttttatctatttttatgttaagtttttaagatttttagcagctaaatgctcttggtcttggggtttggctataatttattttacttaattgccctagattttacagaaccaactctattctaaaatttggtgtatatgttgaagaaaaatgctagaaacacactcacgaacacactattttgcacagactctctttgataggttacaatttattaaaaatggcaatttttttgtggatttcacatcacatttaatgattctctctatgatttggtggtttttgataaattttaaccaattaaaaagagtgtgttgctagcactcctcatatgttgaattgaagctgagtttttatgtttttttttttaattattcgttttaaaaatctttttggccattcttcttaccttttttacttcattgttttttgcttcatggctgaaaactaaactggtcttgtgtaatattttgtggtttcttctaattatattgtatattgcctggactcattcagttcttgttggatacaaaaacaggtacccggtaccaggatctcccacccaagttcagt

SEQ ID NO: 25380 - DNA, 743 bp, Glycine max
  Intron number 1 from transcript Glyma17g04460.2 (locus Gly ma17g04460) derived from phytozome v7.0 (chr-ID Gm17; pos 2993913 to 2994655 reverse strand)
cacggtgaaatccgcgacaactttcgagccctcgcgtaagccccctctcttaattccatcttattatgattatgatgctgtctttcatcctactccttttgattttgatttgtaaaaatattgttagtgctagagattgtgatttgtgattttatgattgttgacattgggtgattagcctctctaatgtaatttagcttggtgttgtttggcctttaggttttgtgatatttgaacttttctatacaagggacttgtttttattgtgcagaagaggttttcatctggactttaaggggtagtgagactctaggaaaattgctttttttatttaccactacacatattttggatggtcagagtgatttatttctcatctcttgaaactgtgaactttactgtctcggacgagctaggttgtcctcgttcactcaatgatggttgttacgttatccttcctttgtttatctttatacaagtgaattttggtttacttgtatttttcttctgctttagtcttgtaataatgtatctttaactggtgctacattcacagttaacacgtatcagttcatggaggagggaatgaaagaagcggggattactagttttttttttttttttttttgtaaatagatcccattgtttaagcagttggagatatgtgttataacgtggttgttttctgtaatgttttgcttagcttatttattgttgacaaggttcaccttttgtatccagaa

SEQ ID NO: 25381 - DNA, 901 bp, Glycine max
  Intron number 1 from transcript Glyma13g28120.2 (locus Gly ma13g28120) derived from phytozome v7.0 (chr-ID Gm13; pos 31201679 to 31202579)
cttcctgatcagagaaaaaaggtaaagttacttaactgatgtgtatatatgtagcttaatctgtgacacaacacagttgtgttgtgttatgagttctgcttctatagtatatggatagagtttgtattcatcatgattgaaaatttttgttttcttatcccatcttgtgtggagctcttactcttctctggcactacttttttattctctctctctctctctctctctctcgcttgtggatatgagaaccgtttctagttaagaagaaacaaagtgtgtagcaaatgactatatttctcttctatatgcctaagtctgtagtgtctgatttgtgagagactgcagaaagttttccatcgcttaagatttgattgtctactattttggtttctatggtatctacagactattgcaatggcttattttagcctccacctctccccttttatgtttcatttcattttaatattaccagattactaatagtgaaatttgtatcttttttaatcatgaatcttttatccctctgaaatttaattataccttgccaattctacatttgggatttaaaacattcaaaaaatatgtttgtttcattacttttagagaggatcaagtcaaatgtacattccgtattttttgtaatacgaatcttatcttatgtttaactgtaaattaactgcctcatctttaaaaacttggtgcgacctttatcccctgttacaactttcttgtataaaaatatggagcataattatgtttccttcattaaaatatggatgttgcagatcatttaaaccatacgtatggctttgagtttgcttagtatcttcattagaataatttggtttgttgtgtttttgcagtcatctgtagaggtggacttctttactgaatacgg

SEQ ID NO: 25382 - DNA, 686 bp, Glycine max
  Intron number 3 from transcript Glyma13g29400.1 (locus Gly ma13g29400) derived from phytozome v7.0 (chr-ID Gm13; pos 32304175 to 32304860)
agggtgatcctgagttacttgtcttcattccgtaagttgccatgtctgactcacagtctcacacaccttttctgcttaactgatttttctctagtcttaatctgatataatattaaatgtgttcttaatcttttctctagtctcacacaccattagttttgttagaaatgtcagcgggggattcgaacccatgacctctcccccctcccttcacccttcactagccactgggggaaccttatatctcatctacttaatatattttaatcagctgttttcctttgttaccgtgttagtgtatatttgctgctgattcctgaaatttagattatattggatggattgtctgtttatatttgtttgcctttcattttcagttttaagatacttccatcttaatgccctataaaaccaagaaatttttcaaccccgtaattaacaaccagtatgtttttggtagtattactggttctggttggttctcctttacaaaagcttaactacattgttgcccagattcaagtttataacattcaaatttagtatgatcaactttctgctaaaaacagtaattccaacaagccaacgactttatctgtaacatcttccattttctatttagaaaactggtcctataagttcttaccgaacttgttatgcttctgtgcaaaatagatttacttcag

SEQ ID NO: 25383 - DNA, 567 bp, Glycine max
  Intron number 1 from transcript Glyma16g08460.2 (locus Gly ma16g08460) derived from phytozome v7.0 (chr-ID Gm16; pos 7860503 to 7861069)
gaatttctcagtcgccaggtcaatctctctacctgttagtttcatgtttcataatttgcatactttctcagtttttttgagcttcacaacttcaatatgttaaggggtttaggccagttggttgaacatggtatattattgtaaatccctgacactgtcttcgatctcagataaaaaaaaaaactagacaagactaagattgtttaacagaagtggttaattagcagaagttgaacttgttgactttaataaaattctgatcctctactcaaaactttccatatgttacatattgaaagttacataagcgagcttctacaaaaagttaagtacataagttgattttagcttatgaaagaagatttaagtcattttacttttttacttaatttcttcttttaaagtttttatggagaaatttattcagggtagataatataacatatagtaatgctaaagattagttaatatttgatcatttttgagttagctgaaattgtggtctgagtttgtataagattttgtgctgcagtgggtactctttgcttagagatccacaatacaaca

SEQ ID NO: 25384 - DNA, 352 bp, Glycine max
  Intron number 1 from transcript Glyma15g07970.1 (locus Gly ma15g07970) derived from phytozome v7.0 (chr-ID Gm15; pos 5612059 to 5612410 reverse strand)
tacggtagcagcggtgatactgttcaagtcataaggtgcatggttttcttttcaatgttgggattgtgaaattctatgacttggtggagttttgataggttatggaagttgtaatttaatctgggggttaacaaatttaggggcttttaagctgagtaggtgtgaaaggagggttttgtgtgtgtgcgcaccaggtgtttgaggaatggctaaaagaaaatgataaaatactgcgttttcgttttttttttaaatttcttcttgcttttattttcatttgtttgttcttatttggttttatcaattgttggtatcaggtgttcgtttctgaaatttgtggcacagcaagtga

SEQ ID NO: 25385 - DNA, 524 bp, Glycine max
  Intron number 1 from transcript Glyma13g14410.1 (locus Gly ma13g14410) derived from phytozome v7.0 (chr-ID Gm13; pos 18064301 to 18064824 reverse strand)
gaggtaaaaatagcctcagaaacttctttatgctgtaataacttctattcttacgtgtctttcttctatttttgtatgcatatccagtcaattttttaaatagacacacacgatatcaagaagggatatattattatttacccaatacaaaaatataacatgatattgtttcccttagaatgtagaaaaaaaacgaaaggatttacaatatttttttagtccctaattttttaggatttctatttttagttctaaacttttttctcacaggattttagtctctaaactgtattttttttttctgtccttacttttagttcccgtaagagactaaaaagatggaaaaaaaagttaaaggacattcgcaattaaaaaaaatattcagcaattaaaaacaaaaatcctaaaatgttgagagattaaaaagatagtaaatcaaaaaataaaaatgttgaaacctgatcgattgattctgacaacataatgtttgaaatttgcaggaccaggttgttcctcattggggt

SEQ ID NO: 25386 - DNA, 720 bp, Glycine max
  Intron number 1 from transcript Glyma13g28680.2 (locus Gly ma13g28680) derived from phytozome v7.0 (chr-ID Gm13; pos 31666836 to 31667555 reverse strand)
cagccagccaagttcaaatactcaccagcttttgtgtaagttgagaatcattcaaattctttgcttgcagatttactatttttggttatttgtaatatgatatcaaatatcttgatacaaaggaagaatcaatgatgaaacacagccactatgaatatgaagcatatcaaccttaagacaaaaaaatttccaactgcttgaactttttccctaagttattgagttctgagagatagttatggatataggagtatcaactatcaaactctgtgctccttcttcttcctgctagatgaaaatcactttagaaatcaacctcttgactcaactactataaaaaaataagggtgtaataatatgctggccttctttagtatgagttttgttgcaaaagtaaataattaatcgcatggctccattaactgcttctcaagtacaaggtaaatatccatgttggcagcgcacagagcaattttttttttctttctgtggtatattcctgaggtcatgctcctcaaacattttttttttcatttttaatttaaaggtccaaagtcttccatttacattcaattattatgaagactcattctatttgatttcttttttttttcctgtcaaacaagtcttctaaagatcacttattaagaattctaacttaacatataatatgatacacatgcagatattttgtggctgcattcagtgtttctggccttt

SEQ ID NO: 25387 - DNA, 726 bp, Glycine max
  Intron number 1 from transcript Glyma16g05770.1 (locus Gly ma16g05770) derived from phytozome v7.0 (chr-ID Gm16; pos 5153115 to 5153840 reverse strand)
cctcctttggttgctcaggtaagttttatgactttttcttgtatcttgttttttaaattcgctgaggagtttgttttgtgatacataaccctgaggtgtttaaaaagcaaatacttcagttcacaagtgtagtgactagagactagagatatgttatctagcatttatcaacctctttgtaggaatttttataaattaaaaatatgtcatctagcagctattttgaatgccacttataaggttagcagcaaaacatttttgttgaggtaaactgaagcggtgatattaattaaaaatagaaaagaaaagaaaagaaacgaagggggtgctagtatccctgactaaaaattggttttggtttgtgaatgtttatcaaaagagtacaactttatcttttcatgctaatagccagtttatccattttgcaagtacttgacttactatatctgagggaaaatttttcacttaatttttggggtgaaattaagatgtaagagaagctaaatgtatgacaatattaataataataatctatttctgtatcagtactctaccatcacatcatctcttaatcacttatcctttttccctatacttatgataaacaatgaattccttcttacctacaagactgaaaatgattgaagagatggcccctcactttgaattgatcattgcagttttgaaagtgtcaactctatatatattccaggtgaccaagttcaa

SEQ ID NO: 25388 - DNA, 622 bp, Glycine max
  Intron number 1 from transcript Glyma16g31280.1 (locus Gly ma16g31280) derived from phytozome v7.0 (chr-ID Gm16; pos 34699753 to 34700374)
gctgctggagctctgtccctattaaggcaggttagtccttttttattccctatgattcattatcactcatatcagtagcatattcatgatgtatacctattacctaatacctagtaaaggttcattattcttggctcttatggtgtcatatatcattccttggtttctcttaccttgaacttacttaacttcagattaaataaccaagtagaaactttttggcactaataaatttgacatatctagtcaaatgaattaatagttaagacattatttggctgaatcaattctaataactttgtccaatcaattccaaaattagaaaaagggtgaaatgtggttaaaagttcagaatcttcattgtgaaagactacctatgcatttttcatgcttctgatttgcaaacttttatattttatgaccgattagatacgcattttgagccaacattatagtaaaattcaaaatgttgaatttaagaagagatatgatgggtgttggttgtgaataacttttaattattcgttatttatgtagtattcatataaggtgagtttctatttattttatttgatgttgagttgctaactaacttcacttaaatatctaggcttgcaaagaa

SEQ ID NO: 25389 - DNA, 911 bp, Glycine max
  Intron number 2 from transcript Glyma16g31280.1 (locus Gly ma16g31280) derived from phytozome v7.0 (chr-ID Gm16; pos 34700482 to 34701392)
ttaggaaacaagtaagtaagcaagcagaatattttttaattttttttaaaattttaatgattttaagtttacttgcaagtttgaagttaattttgtaattgtggtcagagtaatgatacagacttagatacccaataagtagtgcaaatggacaagtcaaggcaaacattttttttcttttcttttttcgaggccttgagttaaagaatgcaattggataggccagttagctatttctatttaactttattttgcagaagcaattgggttctatttaaatagtactaaaaagaaaaatagataagacgatcaaaccatgaactggcatggttagcaacttccatttttaaaggagggggagaagtgaatgtacatagaaaagacaattgttctagaagtctttattttttttaatttaaattaaatcttccccaacattaattgttttagacgtctccatcatatataattaacaatcggtttattaaatatgttgcacgcaaatatacctaggtattctttcctcatgtttgttttggtatgaaatgcggattagtattttttataattgtgaagggtgtaaataaagatatatccactattaatttagttaaaggacatcatgatctcaatccaataaaattcaaagatcaatataactagtgctattttgaggagacatttcatcatgatccatgtttgacatcttaattgcttataactcttcaaaaccaaagcttgatagattaatcaatagttggcattttctagctactcattttccagtgtacactctttgatttttcctatttctttgctataatattttttttattaatggaaaattctgaaaacaaattaaatcatattggccaggtggtctcaaatagcacagcatttgccaggaagga

SEQ ID NO: 25390 - DNA, 835 bp, Glycine max
  Intron number 1 from transcript Glyma16g33010.1 (locus Gly ma16g33010) derived from phytozome v7.0 (chr-ID Gm16; pos 36107052 to 36107886 reverse strand)
gagaatctgcaaggttagatgattctgttttttgtggaaagattgaaactttcactatctgccgcttgatttggcgctttttgtgttaatttaaatgttgggttgttgtggattttactgaaagatttgagcttggttttgtttattttctgtgccattaagtttcgtttttctttgagagaattcttttctccttgtttttttctccctttaatggttggttctattgcactgtgatattctaaaatagttaattcacgtgaaggaaaaagatgattgctttgaatgcttttgcactctatggttatggacatgttagagaaatctcctttagaaggcgctttatgctattgtaaagaccattttgaacaaactgctttcttctggtttaattgcaagaggtaggtgtgaactgtgaacaaggcaataaaagaggaacgatattattaaccttttgtcccagtttctgaactctatttaatgtttgtttttttccttgaaatttcttactttttcctggataaatgaaggatttaattcactgaatgtcatttaaattccagcactttataattgttcataaaaaaaattgaacatattactgttgacaacaaccacttttaacttcagtgtctgttactgacctttttccatgtattagtatttgttcttagaactgaagttgcaacccaatttttttttcctactgttttctttggtttttcataaaaaaagaatgttttgattggtggttcgaatctgggagtgtgctgatatgcgtttttttacttgctgtacagttttgcagctttgctataatcagttaaccggaagc

SEQ ID NO: 25391 - DNA, 647 bp, Glycine max
  Intron number 2 from transcript Glyma14g01380.1 (locus Gly ma14g01380) derived from phytozome v7.0 (chr-ID Gm14; pos 775422 to 776068 reverse strand)
acctgcgttttcctaaccctgagcgcatccccaaggtactacttcacttcttttcccttgttctgtgttgcacaaatgttgctcttggccttttcttacccttagttatgccaacgtttggcatagaaaaatcacagaagtggtgcttttattttcttttcatgaacagtgttttgtatagttttgattagagagaaatcgaatgttgcctgttaaactctataatggatagtgttgagattatagggatttaggtaggaaaggaagtagagagaatataaaaaaaaacttgcatatgcaaagaggctgtttccggattcgaacacatgaccaacaagtcaccaaggcacaactttaccgctacaccagggctcgccctcagaaagaatatataaattaatatttttttttgttaccaccctaattagggtcttaattccccaatgatacattaagatatttccaaaagcttgaatccttgtggattggttatgaaactaatccttagctggagcatatagtttctcgttctttcccaagaatatattatgcgggaatagaacttattagaaactaatattctgataaataaggaaactaatcagtaattctgtgaatttattttgtgaagtcaggtgagaaagtca

SEQ ID NO: 25392 - DNA, 942 bp, Glycine max
  Intron number 2 from transcript Glyma13g16770.2 (locus Gly ma13g16770) derived from phytozome v7.0 (chr-ID Gm13; pos 20674164 to 20675105 reverse strand)
ggctgcaatattgtatacattctactcaaggagtatgctatatttcatcctaaaatactttttgtttagaattatccatttttaatagtctgatatacattctaaattacctaccatagctgaaatagtattgttgataactgtgatttaagtagattgaggaacaatgtacttatggcaatggtatagtgtaataggttatttatttttcaaatggagaaaataggtgccttggatttatctacatgataaattcttggtcaaacaaatatctcctaaaattttacaataaaagggctttaatctggttaaagttgtgaattttccattcaaatgagtggaagtactatctgaaaattgaaaatggaaacatcaagttctatggcatgtactctttggtaattgtaatttataaaacataatcatgtgataaactggttactctactcttctgttttccttccgggtaactagctgatttgagattggatatgttcttttctttttttggcgtctatctttgatccatcctatagatatcttatttctggaacatttcatccgtctctcccaactttttgaaataaatgtcgtgttgctatccttaggagtgtaaatgtgttctttctcgtgctgttgttcctcttttgtattttataggaatttgatattctttaccttacatcacctctaaaccagtcaaacttgaaactattcctgtcaggtcaagatctggaaatttgctatgtggaaaggttaaatgaagccattcttgttgagtcatcctgatactatgtacaattgttctcaagtttattgtagtcattcactggtatgtaaaattgctgtttatggatttgttgcttgcagttttagttattaactagttgttatcatcccatttcaggctcatacttcttatccttgtggtgatccttattt

SEQ ID NO: 25393 - DNA, 1049 bp, Glycine max
  Intron number 1 from transcript Glyma13g38930.1 (locus Gly ma13g38930) derived from phytozome v7.0 (chr-ID Gm13; pos 39669156 to 39670204)
gctgtgttctggaagatcggttgccacaattccaagtaaattggctttttttttttataaaaaaaaacagtttttactttctgcatgcaccaaactttggttttggttctaggaatttccgagaaaggtgaatactatgtttttgtttgttacatcttgtttgtgttgtgttttgctgtttttttgtgtgtgtaccatgtgtgttttatcttcgtggttacatgagcttgatcgaaaagcaagtaacgtgggatggagtgaaaaatgtgtataaaaaattatgttttttcgagtttccgaatcaactttggttaagtatttgttgttatatgtttgcttttcgtgtttgtacagatgtactttctcaggaccacgtatgcggggatctcatatgaaattcatgttcatattagattctgtttctggggttgatttgcttccaagatatgatggacatgctggggtcttaattatgggtcactgcttccttttatttgattcgtattcgtgttctgcaatatactcttttctactttggaactttgtgcctggattgcttctgttttgtcttcaagaatcttagtttttatatataaaatatttatttataaaagaagtttgtttgccattggattgccaggcgcactatctattggatttatggtctgtgattctctaaacgaatctgctaattcggaatttgtctttgttttcattctgtttggccttacttatttttcccctgataagaaaaaaagatttttattttttattagctaatgagcggtttatctgccgatcaatctttgtcatgcaaacaacttatgagttagattaaaagaatccactctatttccttgttttggtcttctcagccttttcttttctttttagactaaatattgtaaaggatctttgttgcttgctcattaatctcagcagccaaagtggagtttgaattattaagcttttgactttatgatgattaaatgtctttgtttgagttagttgagtgtggtttgatttggcaggctattaatctgggaaga

SEQ ID NO: 25394 - DNA, 688 bp, Glycine max
  Intron number 3 from transcript Glyma15g02740.1 (locus Gly ma15g02740) derived from phytozome v7.0 (chr-ID Gm15; pos 1890017 to 1890704)
ctactttagcctatattggtgattgcatatacgaggtctctttacttttctgtcaccacccattactctattcataaattaattattgtctttaagtagtagtttacttgctgcaaatttcatgttctgggtgtttttgaaaagaaaaaaaaaaaagaaactatctttatgactggctgaagaagtaaagaattttgtcttttaaggattcacaagtagaacataaattggctccgcttaaccacttgaagtctgagcttagtatgttttagcactgttttttggatttctctatttgatcaaatgaacgaattcccataaggaagttgttctttgactattaacaatgagctcaagtgctgaagttaagaaccttatgactttgttgatacacggtaaaagtatagctagaacatggttttaaattgtggtctgcaaccgcaattgctaccgcatcaaccacatttttcttgcaatgtcaaggattggagcaaaaccacgactgaaattgcaatttaaaaccatggctagaattaatgatgtttaaattggttacaactcacaacaatagacttgcaatttactctattcttattttttatgaaacaaagtataaattgtcgtcaactatgtcaattgaacttctagatatcttattctcattcccccccttgaaacgtgcagctat

SEQ ID NO: 25395 - DNA, 464 bp, Glycine max
  Intron number 3 from transcript Glyma16g03170.1 (locus Gly ma16g03170) derived from phytozome v7.0 (chr-ID Gm16; pos 2738286 to 2738749 reverse strand)
ataacaccccgaaatatcgctttgttgttcgtttcgtatccttttgttaacgatatcttaggttaatctatgcttgacatggattttagaggaggaataatgagaattgattttggttattgctaggtaaatttgaatttgtttcaacctcgatttgcctagaaattataaattgtagcttttgctatgggttggaacatttttattaagttttatgacacactcttcttgaaaatataaattttaaccaaaatctttttaatttaaaatcaatgttgtaaacgttcattggaacatcattttttatgtacttcaaatttgtttattcttttatttatggcttgaggatagcacatgaacgattgaagttgtttatctggtgatgttttttgttttttctgtgggtgtaaaccttgacctggtttttagagcaacaaagacattgttgcacaaataatatctgc

SEQ ID NO: 25396 - DNA, 616 bp, Glycine max
  Intron number 1 from transcript Glyma16g05210.1 (locus Gly ma16g05210) derived from phytozome v7.0 (chr-ID Gm16; pos 4517834 to 4518449)
tctttggggagctttacatcttactaattgtatactgaaattttaaactgaacgctttactgtttttttttcccctccgttaattgttttactataaccttgctataaagcttcatcaattaatcttgtagaaaggtgctccacctgaagaatcaaagaccactgctaaacgaccagatctaaaggccgtaagcaaggcaagtgaaaattcaatggctttattatttttttcatagaatattgattgtaagtctcaggatatttttctgtgatgatctagtataggatttttctcttctgatacttgtcatagcattgccattaaattacattatccattttttgttaccttttttttctttgtagtgatggatgtatttagttaatctgttaattatgtgccgtatctttgaaacaattccatggactatttaatttaagtctgaacaattaactgttttttaaatgtgtattaatgtattaatttattaatgtaatttatactattaattgttttgatttgattattttcattaattgaaatcaatttaattatactttctaagatgtatttgttttcctttaacactatcctccatttggggatttttggcag

SEQ ID NO: 25397 - DNA, 737 bp, Glycine max
  Intron number 3 from transcript Glyma16g05210.1 (locus Gly ma16g05210) derived from phytozome v7.0 (chr-ID Gm16; pos 4518779 to 4519515)
ccaaagcggtaatgaaatttcttgctatgttgtatttatttatttgttctctactttggaatattatagatcataaactataaatgtgattttcatacaaaagatttttgacttcctatgatgtatgaagtcaagtcctatgggtatgaagtatgaactagtgacccaatatggagaagccaatagaatacactgaaaagcccaaacacctagggccttaatctcaccttgggcgagaaggtagagatggttgggaaaagttagttgcaggagagagaaaatagtagttttttatataggggaataaaggataattgggaagtatacatggtttttttttgttgcttgaaggaagaaacttggatggtgacttgaagagagatttttgactttggttcagtactgttcttattggtgctgtcctttatagctattatctaaaacaaacattggactaatatttagcaaaacaaatgcaaccttagagatgggagtgacaagttagtcataagatggaaaaatagtagtctgttatttaaggaaataaaggaatattgggatgtattaggttatttttaattgtaattggtttttgaaaaaatagccatttcttggattgtcttttctttcactaaattgaatgcatattcagaatttgataggaatttcttatcatccatataaacctatgctccttgttcccctcattttttttttttcattgtcacagtacagct

SEQ ID NO: 25398 - DNA, 804 bp, Glycine max
  Intron number 3 from transcript Glyma13g31400.1 (locus Gly ma13g31400) derived from phytozome v7.0 (chr-ID Gm13; pos 33813896 to 33814699 reverse strand)
atacgccaagttcttggtatgaaattttcacttttttttttggctgttttgaaatgatattgaagctattttcttgtctcttgtctgttgagatttaatatattttttatttacagcctgtggtcgctttgccgccatagcagtgctataacactctatttgtaaccctggtttgaatcattattgattgtttaactgatatttcatttttttctttgtataatttcttacagtattagctatccatttctaagaagatttcctcatatattactcaactgaaagtacttattttgaaagaagcaaattattttaataccacatttcattatattattatttagttatttgatcatgattatgatgggcttgcatatgtgtgttgttttaatagtttaatgttgtccagtattaactacgagatgtctacaaaatgtaatagtttattggtttgatctgatgcaagtcttggatgctctctatctggacttgacttggccaatttaacattcaaatttctatcttgggtgccattatgttcttatgtgaacaaacctgattttactttgttttatcaattcttacttttagtatcaagtatagaagtatattgacttgactatttactaaatgcttcattctactaagtactgacaactagtgtgtatatcttatttattaattataaatttcatggctgggtcaagtaacacataggctgaactatattattgttgccattatctctttagtttgtattaacagctgactaattttattggaagcatgcagatacttgtgggt

SEQ ID NO: 25399 - DNA, 481 bp, Glycine max
  Intron number 1 from transcript Glyma15g11850.1 (locus Gly ma15g11850) derived from phytozome v7.0 (chr-ID Gm15; pos 8732340 to 8732820 reverse strand)
accgtctcttggcagcttacgtcaattgtcagaaggttagaaaagaaaaagaaaaagcttaactttaactgctcttgtgtgatgtgtatatgcacacccccaacaccccctctatgtgtaaaagaggtagacaaattttgactcagtggttgaaaacgatcgatgcataattatattaattagtttctgcacactagctttctttggcaagttcggatctgagttgtgtggcatgtgtactgtgaaactgtggacttgttttttttttttttttccttgtttctttctactaataacactatgttgatatggcaaagaagtcaaataaaagaacccaccctttaaagcaaaagtgatatagacagttatttgcttcatggaaattattatatcatgttttttttttggtgatacatggtttttagttttcacacgttcctttgcaggttggagccccaccggaagtggtggcaaggttaga

SEQ ID NO: 25400 - DNA, 735 bp, Glycine max
  Intron number 4 from transcript Glyma15g10500.2 (locus Gly ma15g10500) derived from phytozome v7.0 (chr-ID Gm15; pos 7624314 to 7625048 reverse strand)
aaacaaatttgcttcaggaagaaggttgtctgattttcttttttttacttggtgaatcggcctttttttaatacaatgtgtggatattccttacttactagatactccgtagtagtttatgattttcataatttatttagtttaatgtgtttttactcattttcaatttatagaagaatgaaggtgctgattgtcacatgctgaaaatgaataaggctctgtttggaaaaacttctcaataagcacttatagaagaagaaaataagaaggtaaagtgaagtaagcttctctcataagtcaaaattagcttatgcacaagttaaaataagcttttggagaagctaaatgaaagacctctgatcttctacaaattagcttatgtataagctaattttaacttgtggggacaacttatgttgttttaccttctctttttgtatcttataagtgcttattgagaagtatatccttaaggtgcctaaatgtaaatcttttctttttttttgggggggggggagtgcttagtcaatgtggtactctgtataatggttgaacgagcatgtttagttttcaggatttttgttttttgggtctacatttctattattacattatttgaatttcatgattataattcttatttgtgttccttttccagtttttttgtctggatacaatcttcattttcttttggggatttttaaaatgctgcttcacatatcttatatcacagat

SEQ ID NO: 25401 - DNA, 881 bp, Glycine max
  Intron number 2 from transcript Glyma13g30130.1 (locus Gly ma13g30130) derived from phytozome v7.0 (chr-ID Gm13; pos 32883092 to 32883972 reverse strand)
cctgaactgggaaaactaagttacctaaattctctgtaagaaatctttacaatgtcttttgtatttttctataataattattgatgttttctttctttttttctttagatatcaaaataaatcttatcattgttagctcattaaggaaagtcccaaaatgaactcattcttggattgccaatcataaatttcagtcccctaataaacgctttaatgggttatagtgtaataagaatgtaacataatttgagggttatatatgtatctaatatatgtgtttgtttcaaaagttcatatacatgatatgcaaaaaacattcttataattaccccatccctccaaagttttattatgtattgttttagcacaataacattcttcttttatcacacaatgttctttccatcattgttatttaatctaaaagtatcatgcaatgtttgactctgctatgctttataaatactaaatatcattttttcacatgaatctaattacattgattattttttctttcattgtatattttatattttctctttaatcttccatgcaatgtcattttccaagcttgcatataacatttttctcttctccaaacaagttaaaatttaggcaattactttttgagttttcaactccattaaaagttatttattttgatattctgcattagtttataaaaacacatatgaagtctttgagggttacttgtgtttgtaagacatattattatgaagacttactatttgattaatttagttccttacatgatatcacaccatattgttattaattacctaataaagcacatctaactttatattttactatttttctgatctagataagcttcctttgtttctttaaaatagtgtgtt

SEQ ID NO: 25402 - DNA, 663 bp, Glycine max
  Intron number 3 from transcript Glyma13g40470.2 (locus Gly ma13g40470) derived from phytozome v7.0 (chr-ID Gm13; pos 40983663 to 40984325 reverse strand)
ccgcatattccactttctttcccaatctggttagtttcaaatgcctgttacaactgattacttattttttttactaaatgcttcaaataaacattcaagataatttccgtttttactaaatgcttcatataatgcgtccttctgtatgaagcattcatgataatttgcttttgattttgacataacattcgaagttgagttttatgctctgcgaatcctctttacatactgatctttatcaacttttggtgcaatctaagttatcggggaatttgtctccatttagtatatatttgatgttccatgtcacttactcttttttgacatgatgagttgttcccaaatatgttaaaaaaatagatcttaaagtggtgagtctataaataggtccttctaatacatagatatattcttggtaatgagctgaatttggaatatggctaataattcattgacaaagaccacgagtccatgacagaattaggataatatttcggtcaacattccttttcaagttcgtgtggaggtgattctgggggatgatgtagcattaacattaacattgtgcatcaatacaacttgataccaccattggcgtgttttcttgtataggaagatatttaattatattgttgaaatatttgacaggaaagagcagagaga

SEQ ID NO: 25403 - DNA, 725 bp, Glycine max
  Intron number 1 from transcript Glyma14g10710.3 (locus Gly ma14g10710) derived from phytozome v7.0 (chr-ID Gm14; pos 8900985 to 8901709)
tgttggagcgagttttgccagtgacctctctactggtcagtaccgtgtctttttgctttaattttccttaatcataatttggaattaagggcttttgtcaaagcacctttttctccagaaaactttgttggatctcaaaagtcaaaactaaaaagattaacttcaataactacaagcccacatagcccgcatggcatatgtttcatggaggctggtcatgtcttgacgtcactgtcatctatagaggttactcaggttagcatgcaataagatccaaagggtactttttattggtatgcaaaaagcattttttaatgctcaggctttctttatatgataattgatttaagaccaggagtttaagtatttggttattattggaaaattatgacttatattttggaattttaaaacctataaactttcaagtaaaatgatttacttaactcattattcatgaatggttcattagttgtgactttcagtatagtttctttgaaaagggttactgcttggttagcttcattaattattcattgccataatcttcatggtcattgaatccaatactgggcacccttcttctgttggtaatttcagcttagttctattgaaatgactttattccctttcccccttcatcaagtgtattatgtattacttgtttctaatttttactgttgcattcaacaactgactgtttgttttactacagggttctgaaa

SEQ ID NO: 25404 - DNA, 459 bp, Glycine max
  Intron number 3 from transcript Glyma14g16700.1 (locus Gly ma14g16700) derived from phytozome v7.0 (chr-ID Gm14; pos 18185056 to 18185514)
aggcaaaagtaagtaaattcacatatttaatttatggttgttttcataaataatatagtcccatattattttatatttctatccaatttagcgtagacaatttgtttagcaccatccagactagtctaatatcattttgtattcagtggcttccattttttattttggctgtttatttatggtgtcttccattcaaaaggaggcaaggttgtgtatatccttgttgaactaattttagtagtagttgttaatgagtggcctgaattaggaaaagcaaatatcagttttctgctgttgttaatggggtctacatgtgctctaggcaagccagactcatgagttatgacttataatgtaccaggaatggtcttcttatgtttaattgttgtgttgtgttgtacacttgtagtcttacttttattggggaacttgctgtttactactatgtttttctacaga

SEQ ID NO: 25405 - DNA, 873 bp, Glycine max
  Intron number 4 from transcript Glyma14g35440.1 (locus Gly ma14g35440) derived from phytozome v7.0 (chr-ID Gm14; pos 44404928 to 44405800 reverse strand)
gctctatacggttcaggtacttctttccgggtttgatattcatgagattgtaccctataactaatagaacctaagtgggcatttggtttgagaaaatgttttctgttttcattttctatttttactttgtttcctattttctgaagtttacataggaaaaagtgaaaacaggaaatgaaaattaaaaggaaaatgctaagtggtatgaaagtatttatgtaaaagatatacgaaacaagcttattggttgttttttcaaattttggtgtgtcttgaattctgtcaagtgtaactgtggatatgttattggttcaaaattagacatgtactgtttcatgcaattggttctacaaaagaatcgtacgaaatagcagtgctcaaattaaaaacaataaaaaagctgttttcattgttttctatacaaacttctgaaaaaaggaaataaagtgcaaacaaaaaatgttttctcaaatgaaacaaccccttaatttacattcaatgatgttaacaaaaataaccgtaggtggattttgtaattctctttatagaacagtttgtctactagttaaggtacactgagattgttgttattgctgcatccattactcctgcttttttaggttttccctctcttcttagaaggtgatttttttttttcattggaagctgtgctttcttatttattagttattagtagtgtatcttaaatttctagtttcactagcaatttctggtctccttcacttgtgtgcatcagaaatttatacttcattacttactaataagtaataatcataattttttctccttttattttctatctgcctgaagctcagaaataggtagaccagaaaatacagggcttctgctgcc

SEQ ID NO: 25406 - DNA, 681 bp, Glycine max
  Intron number 1 from transcript Glyma13g09440.1 (locus Gly ma13g09440) derived from phytozome v7.0 (chr-ID Gm13; pos 10780908 to 10781588)
aaggaaattcatatcttggctgcacaggtaatttaatttacccctaaatataaattcacctattttcttcggataactcttatcattcacaattttgacatacttatgcagtcacataagatcaagagggtattaaattaagattttaaaagattcttttaatataaaaaatttaaagattacataagaatattataactaattaggttttttttcaagatttttatgacaatttagattttaattgatttatatatcataagaatttaaaagatttgaattttttttatagatttataagatttgaaagggcaatgtcaattttcagaaatatatttaaaatgataagagttagtaaaaaaaagaaataattagatttagataaaaaaaataaaaccaataaaaaaattattttttaataattaaattgattataactttatgttctcatatactaaccctctttgtaataatatcttttcattctcacttttggatttacataatatatttaaaaatttagattgattttcaaaattttattaaaattactccaattattccatgataaatctaatgatatgtttaaaggagttcattataaacatatactagaaggatgcggtgagattgaaaatttgcataaaggttattgagtatatgtagaggacaaaattaaag

SEQ ID NO: 25407 - DNA, 326 bp, Glycine max
  Intron number 3 from transcript Glyma14g07100.1 (locus Gly ma14g07100) derived from phytozome v7.0 (chr-ID Gm14; pos 5262778 to 5263103)
ggtgagtgcttcatattcatatgttgattttttgtgtgttttcctatgtattcatctacttgtgtcatttttcattgagttaatctgatatttcgaatgggaatattgaattctttgatcttcattgtgtctgccatctattttgtggagggtgcatactaattgagcatatgaattctgataattttcttaagtgatttgttctgctatgaaattattctttagtattggcacttttgttatttcactgaattttgcagaccagagaaaacacatagtattgtgtctttagttgcaatataattacagttctttgtttctgcagt

SEQ ID NO: 25408 - DNA, 1047 bp, Glycine max
  Intron number 1 from transcript Glyma13g03740.1 (locus Gly ma13g03740) derived from phytozome v7.0 (chr-ID Gm13; pos 3786659 to 3787705 reverse strand)
tagtccaagttcttgccctgcacaactgattcacggtaccccaaatttctcaaccttatcaaattctatttactgtatttatttatttatttttgtttttttatgttcactgtgccattgaggttttgattgattttttttttttgtgtttttgagaattaccctttttttgttttcctgctttgctggtgggttttctcttacttccctgaaagttgtttcctttgagttaaagttttttgctttgtgcatctccaagcactgtgtttagtgttgggttgtgaagtttacgttctgtcgttgctattttggtttactgtattggtttgtcttctttttattatttcaatagcaaagttgaggggttttggattgagggtgtgatgtttatgcacagtttatgtggaattggtagctaaatcgggaaactttggctttgggaatattcatagggttctcctgtctctttgcctccggctccaaccttggattttaatttcatttttttaatgatgtcaatatagtatcgtctgttttagagtgaattgtgcaaaggcagtgttgtttgaacatgtaatttgttttctttgctctttttcatatgcgaacatagttggttggaaaatttgtttcttgggatagttggtattgttttctcttcgattgatccagttttcctttggcagttgctgaggcctttattgcattggtggttttgttacctttttgtttttaattttaattttttgtctgtgtgttggtcgtagttatttctgttgtcggatgtatgacaatgatggagatatttggtatttataacttttaacatatttaccgcttgtttagacttcaattctagttagttacacttataatgtttcataatcttgttatgttgatataaagttgcttttgagctgtaatttgtcgtgttattactgtgtttgttgccgttactacttgtatataattattgtttctctagtatatttgatactgaattaatctgtagattgaagttatacacaaaaatttgcacaagaggaa

SEQ ID NO: 25409 - DNA, 809 bp, Glycine max
  Intron number 1 from transcript Glyma13g40540.1 (locus Gly ma13g40540) derived from phytozome v7.0 (chr-ID Gm13; pos 41049293 to 41050101 reverse strand)
gggtgccactcactagagaacccggctttcaccaggtaataaaatgatagtaacacattttttaacaggatttttaatatatttgttttattactactgttagttaagatttattacgccaacaaatcacgtgacttgttaattaaatagagaatgagatcacaaaattttgtgaatatgaataaattttaactaataacataaaatgtataagaaaaaagtgtgactacaaataagttcataatttttttttaatattaagttagtttgcttaagtttattttttaaaaaaagtgttttttaaataaaataactaattttatgattttttatgttcttgtctaaactgtttttagttaaagtaaaatattttttattttttttaagaagcaaattctatccgtttcttaaaaaaaacacttattttaaagttaattttttaaaatttaatcattatattaaacactgttattagaagacactacatgcctacatttgataaatgagaaaagtgtaagaggttacagatggtttatgtgggagatgagaaaaattagttccatatataagaggttgttacagacaattgaatatatgtgcaattaataagagtaaaataaacaaaaataatgcagatagcaaattgggttatgggattttgcattttgtaaatgagaatattcagcgaaacttgaataaaatttataacaaaaggtatagtagtgaaaactgtgactagtactcttgtgttattattattattgggaatgctttgtgtgatgttaattcccttggcttgcttatgcagt

SEQ ID NO: 25410 - DNA, 995 bp, Glycine max
  Intron number 1 from transcript Glyma13g37650.1 (locus Gly ma13g37650) derived from phytozome v7.0 (chr-ID Gm13; pos 38678069 to 38679063 reverse strand)
ggaacaaaattgagtccagaccagctttgtccaaggtaatgtttcttgtttttctcaattggtttggttttcatagatatgtcctattggggtgccggaaaatgtgtgggaaaattttaaaaaaagtttttttgattattaaattttaaatttttagctcaggcttttgagggttcaacttctgttaagttaattttatttttagaggtggggactgtgaacgagtgatttgcgtggcttgtttttgttaatatgatgctgcaaactgattttgagttattgggattgtgtgtatttaggatattgtgtgaattggcttttttcactactttgctttgtatgttctttaatttttcttttctttttgtttcttctgtactttgtgtgggaggttaagggttgagttgaatgtttttacatcaaacagaactcgaatgcctaataatttggaatagcagtgttatgctagatctgttgttttaaaatgctgattttattagatatatcaacagattgaacacctgcaaaatttatttttgtttagtcttagatggctcactgacattgattttgcaagttcattggattttaatccataccatgatgctatgtatggagagcttaaatcttgttttgcaatagggtgaataatgatttttttttcagatgttgctcttgttgtaagttatgtcacacacacttcctatccttattagagagaaaaaccattgttccttataaatatatttattataattttttttcctaatattggatcggtgacagattggtcaagtttttccagaaaggatcatgcatggatcataaaagcaatacttgaacttgattacgttattataatgcagcttacatggcatgcttgattttgtgtattacaaagaatattgcattattattggggagggtgggtgtagattaggtcctttttttagctaacaataacttatatcctgttgtacagagaacttacaagc

SEQ ID NO: 25411 - DNA, 504 bp, Glycine max
  Intron number 4 from transcript Glyma13g20070.1 (locus Gly ma13g20070) derived from phytozome v7.0 (chr-ID Gm13; pos 23540886 to 23541389 reverse strand)
gcttattcattctctcatcaggtttttaatttctcttatgaatttacatttgttaggatagtgaaacaaacaaatggaaaaaaagatgtgaaagcaaattgttggtgaacttgaacatcataggaaaattgacttagtctgtcatataacttatattacaaacaagagatgctagcaacacactctttaacgctttcttttcaatacactctcaattgttgaaattcatgcaagtcccactaaatatgagtcacattccttgtttggtgggtccaattcccaaattagggggatcctcatgaatttcaaccagtaggtgatagtgtaatataaagagagagtgttgctaacactcgttacaaaataatacatagtataaagaactaaaataagaatatggatactagtttgagttccttgatattttgaacaaattattaaacttcaaagtttggttttaaataaataaatataaatgtatatcttgacagcaaaactggaaga

SEQ ID NO: 25412 - DNA, 706 bp, Glycine max
  Intron number 1 from transcript Glyma13g20070.1 (locus Gly ma13g20070) derived from phytozome v7.0 (chr-ID Gm13; pos 23542644 to 23543349 reverse strand)
tttgagatctgtctgtctctttggtttcagttcaggtactctcattcattttctatcttcattggacccccctttttattttttaagaaaaattgctatttttgcactttcccatttcctcttttctatgcaattaaatgttgctgggggctgtttaatgtttaaagttctttaatttctttccttgttttggtttggtgaaaattgttgtagttttagcaccagggtgttgcacaattttgactggaaatgctgatttgagtagacaaatctgcattctatgtgttacttaaggaagatagttcagttgttcatactgttgtattcaacattattcggagaatgaggatttcaaattatctttggttttttagatgcagtctaggttcctttggggattaggattttgatttgctcacaagctaacttttccctctttttccccttcccttgatggtgaatttcattagtagaagccagatgctaattcctcatttcctttttttaagagcttagaggcttacataatttatgagactctgtcattttcagtatcaaatttcatagttctaatagcatttaatgatgtaagctgatgccattggatttcctattcaaacgcaagatgaatccgtgaattgttttgtgttataggtatgatatcttgaaatttacatattttctggataaagggtcaaagtgagga

SEQ ID NO: 25413 - DNA, 534 bp, Glycine max
  Intron number 4 from transcript Glyma15g10650.3 (locus Gly ma15g10650) derived from phytozome v7.0 (chr-ID Gm15; pos 7737418 to 7737951)
ttacagtatgtactgaaaatttctcacacccattcattatagccagagaaatatagtttcatagctttttataatattgcaaaggagaagatgttacatttacagttttttccctagttgtgtgatagttatattatttacaattattgtacaagttatttttgtaagatatactagtggccaatgcaaaacttggttccttattctaagcaatttgaatctgtaaaataatgaaatgcttcttacattgtcacaagcatgctcctactactgttgaattctaggtcataggatgaggtctctccaaactcacatatagaatgggaaaatttgtagtgctttgttaaagacacagccaatgagccaacctgtttatttatttttattattaagtagcatatttgttctaatgctttaaacttctaaccttaaatattttttatagtgtatgtatgcatctgtgtgtgtatacacacattaaataactgtttgatttacattcaggaacccttctattattgcaggaaattcact

SEQ ID NO: 25414 - DNA, 370 bp, Glycine max
  Intron number 4 from transcript Glyma15g20930.1 (locus Gly ma15g20930) derived from phytozome v7.0 (chr-ID Gm15; pos 19010810 to 19011179 reverse strand)
gagattactacacctgttttgtgaaatgtctcatttacaatctctatcttatttatttttatatgaattgctagcaagtttagtataactatattttttaatttaatatgaatttgtttcagcaaacataactgtagaaacatgccttttcatatcaaggcaacacttaaacagccaaagctaaactacctgtagtgtgactttgcagttagctgtgtggattttgtgagattattttctgaaagttctatatttaataattaatacatttatttgattaggagctattttgtcaatgtacatttataatttatgatgttctaacttatcaaagatattatcttagatggaagatcaagataataggaaa

SEQ ID NO: 25415 - DNA, 583 bp, Glycine max
  Intron number 3 from transcript Glyma13g35940.1 (locus Gly ma13g35940) derived from phytozome v7.0 (chr-ID Gm13; pos 37321062 to 37321644 reverse strand)
ggtttaaggtttctgctgtgaaccttgaggtctttgagattgatactgttgtttgtatgccgaaaagactacttacttttgaaatcccaaaggttcatctgcttcgatctcgctctgatttgaaaattagagggcaatatatttgttgggttgggagcaaactgttgcagtcgagaaatattctacacactagcagccaggtcagtgtttcttctctattacaaattgagcttgatagattaaacattatgttgttgcatcggtatatttggttgctttgatattaagaagattgtcatactgtagctaaaattgcctggcacacgtttaagccattaagtgaagataaataaatactttatactaatctctaacagctctctatgcaaaaacccttccatgtttgaagggtggtaattcttgaatccacttgtgttcaatttcaacatttttttttttaaataatgatgtgaataaggattagactcctgaattatattacatagcagctatgaaaccatgatatgtgataggaatctgaattaaagagaaatataagttgtattattgattggaaaactag

SEQ ID NO: 25416 - DNA, 823 bp, Glycine max
  Intron number 1 from transcript Glyma15g17070.1 (locus Gly ma15g17070) derived from phytozome v7.0 (chr-ID Gm15; pos 13361859 to 13362681)
tccttcatactctctctcagattctttgttttgaggtatgtgggttctttttcttcttccctccacttttcacgggtctcgtagtgctggtttcttcttgtctccaaccttaattataaattttatttacttcttagttttgttaataatttgattgttggagttgtgaatggtggaccctttgagccaaagtgttcatatttgtcatttgaagttaaaactttccaccaattgaactgaaattgcttacagtttctgaatttgtccgaaaaagcttgtaccaattgcatatttgttcttgtacgcatgttttatgtgaagatatttagctcttgttgatatattttattttatgttatttgcttgttaaattataatgagcttctcctgttgaatagtttgatagaagaataattgacacaggctaatatgttttaaggagaaaagcaatgaatttatagtttaggaggtaattttcaacatgttggatatcttactcttatgaatatattcatatcaaatgttgtactcgagatctgaaattggcttcttgcatgatctgtccatctgatcattctcctgaatttttgttcaatagcttgtttcttttcatatccagaatttcctaagggcaagatttatgtagatgagttttttttattggtgtgtgtggactgaatttactttgctgatgttgaagacattacttgttacttgacaatcacaagtggtatttatgcaatatgccttttcctggtaatcattgaaataatcagtgtttaataaataataattcatattttaggttctcttctttatacgg

SEQ ID NO: 25417 - DNA, 374 bp, Glycine max
  Intron number 1 from transcript Glyma15g05510.1 (locus Gly ma15g05510) derived from phytozome v7.0 (chr-ID Gm15; pos 3894347 to 3894720 reverse strand)
gttgcactactgcctgtgttcaaagcgactgtaagtgattatcattatggtttcttcaacatgattttcctcttcactgtttttttttatatatattaaatgttcttttttaatataaaaaaacatcttaattcattcatttactttgaatttaacttttattgctctttaattatgcaatacaaactattttcgtgtttttattacatttttaattcactaaaattataccaaaaaagtgtgatgcttggcaaaatcaaaacaggaaactagtagaatgaaattagatgatataatatgatctggatgtataatgcgagctgaaaatgtcacatgcagcgaggcttcaagcacggtgtgatcgcaagtgcagc

SEQ ID NO: 25418 - DNA, 490 bp, Glycine max
  Intron number 1 from transcript Glyma16g27420.2 (locus Gly ma16g27420) derived from phytozome v7.0 (chr-ID Gm16; pos 31469440 to 31469929)
tccatcttcaacaaaggctttaaggctgccaagtactgtttgtttattttgtttgatttttttgtatataatctggggtttaatttttcttcttgcaattgtgtattttgtatgctttgaaatgaatttaatagctgaatttaatactgtgcatcaattggccttgttgaactatttgggatggttcgtgctgaattttcccttttctttatttgctaagttactgggtgtttttttagttcaattgttcatatatgaattgtgaggactgtgtttcagtttgatttaaacaatatatttattgcaatagctcatctggacaattgttcttattttggtgtttcttttatattattattattattattattattattattattattattattattatttcttgggttgtttaatttatctataagtgatttgtttaccaatgttcatactttcagtaaaacactgctgaagttgacaattccacgtataa

SEQ ID NO: 25419 - DNA, 937 bp, Glycine max
  Intron number 1 from transcript Glyma16g03290.1 (locus Gly ma16g03290) derived from phytozome v7.0 (chr-ID Gm16; pos 2812449 to 2813385 reverse strand)
ctgtatcccctgcctgctacagtagctcagaggaagtaagcatatttttatccatttgaatcttgagcagttcaatgtcagattttcattgttcctaataaatatttaattacttggcaagttgtgatgagttttgaagttttatagcttttaacatattgctatatatatgaatttttaaatgataaggatactgactttaccctttcggattcttcaattttgcttctcatctgttcttgtcatcagctttttctttgtagggaacattatttcttaactctggggggtgtcagctcagttttaggagcattatttcttatgacattcatgtgaaacattttgcccaagaacaaattttgtaaaatctagtagtatcaaagcaggagacagaacaatgattcttcatatgatgggaaacatattctggttgtacgtatatgtcattactgtattgtggacatattgaagctaattctgcatgattgaaatgattctcataatccattattaaaggaaaaaagtcaatgattagatcagtttgtttttgctctttagtttattaagtcattgaacatgtattcctcaattttctatcttgatttttgagtattcttacagcatttgtttaagttgtttaacttgaaattttatgggattaaatgatggatttataccaagataatcttcaacaacaatctctaattaatttgtaagatgatcactttgttgatgatttctgagtttttgatttgatgccttgaagttgattagcctgaacttcatacctaatttatgagtcttgatgtgtatattttttgcatctctcagaaacattctgtagacctggcaatgtttaaaatgttttttcatcttttggagatggtataaaatgatgtgaatgctatttgcataaaaaacaggtgacttcatataa

SEQ ID NO: 25420 - DNA, 651 bp, Glycine max
  Intron number 6 from transcript Glyma15g40430.1 (locus Gly ma15g40430) derived from phytozome v7.0 (chr-ID Gm15; pos 47421804 to 47422454)
acacctgcaaaaaaagtagtctataaaccaattgagtgtttttgttgaatgtgtgtatcagcagttgcctatcatgaatgcttaggactgtttattttcagttacaattgtcttttatgattcctttcagttacaataactattatgttagtggttattgtttaggaagtcagttattacttttataatttcgttcagttacaaaaatctctatttaaatagattattattcaataaaatgtgtgcattcatctctcttcattctgtgagttaagttttttttttccaacagattggtatcagagccttcttcttaagagggacctgtgagtgaaccgagtgaaacccaccacaaaaagccaacacaccttgcttcaattcatcaaatagatggattctaaaacaccgtacacagcactagcaccacctatgtttgatggtgataatcatgaaatctgggcagcaaaaatggaggcacatttggaggcaaatgatctctgggaagcggttgaggaagactacgaagttcttcctttaccaaccaatccaacaatgactcagataaaaaattaaaaggagaggaaaacaagaaagtcaaaggcaagagcttctttatttgctgctatctcaaaagaaattttcactagaata

SEQ ID NO: 25421 - DNA, 457 bp, Glycine max
  Intron number 1 from transcript Glyma16g24810.1 (locus Gly ma16g24810) derived from phytozome v7.0 (chr-ID Gm16; pos 28774963 to 28775419 reverse strand)
caaacaactcccttcttcaggtatatatacttatgcatacagcttaaaatcatgcttcctgtgttcatttacccaataaaaaagtaataaacataaatttgattgaatagcaatgctaataatgtccacaatattgaatgttagttaagtttgatcttataacaccaatgttatgtttagtttagatgatgaaaataaagagaatgaaaatataagaaatttttgaaggtatgagattcacgaggaatacacacaatttcttttctctatttttctctccttcccctcaaccaaaacggctttggttattacctaaaatcaatttcaaacatgtgtaaaagataaaagacagtaacacatgaatgtagtacaatatatgcttattactaattattcagtgtcattggttataacttatacaggaaaaggtgatttgtttgacaaagcccataagaga

SEQ ID NO: 25422 - DNA, 463 bp, Glycine max
  Intron number 2 from transcript Glyma13g22360.1 (locus Gly ma13g22360) derived from phytozome v7.0 (chr-ID Gm13; pos 25910757 to 25911219 reverse strand)
caaataagtcattgggtttgattgagtaagtatgtgcattttgaaatcattatgacatgctttattgttgtttgatctggtttaattaagaatttattatgcttaagttagattcaattatttaatgggaactttgcttatgtttcagtaacacacataggtttattatcctttttcttgatgaacttttttatatataaggaattaaaaattgttcaggtctagttatattttatataaaattagtttacaaattaggcagtaggcacatgatctactatattatggaaaggtcttcagataactgtacagggatacatgttgaggtccaatgtttttcctcctttatgttttaagtatgttttgtgtccctatccattaaagtttatgtgactcttgatgaaattctctatactttttgtttggttggtcagcccagacgggattgaagcactttgtaaag

SEQ ID NO: 25423 - DNA, 732 bp, Glycine max
  Intron number 1 from transcript Glyma13g22360.1 (locus Gly ma13g22360) derived from phytozome v7.0 (chr-ID Gm13; pos 25911245 to 25911976 reverse strand)
ttgattcttctcttcgcaccggtagttcaatttctcgtttccgattggttcccgcccgcgaaaatcgaatctcaatattcagtaaaaagaatgatgaatcttcaaaattttaatcaatttttttttatttgaaattcggagcgatgagttttcctgtgttgaagtgcccaagttggcgaatttcgatcttgctcgatcaaggttaaatctttataattgggttgtgttttccagtggtcgagttgcggatattcgtattaaacgcgttaaaattcaaagcgtgagcacgaagggttttatttgccgtcagtttcttttttaacagttaattaggagggaaagggtggtggttgtgttaggtgtctatcttgtttttgggctgcttcccatcaattacccatttaccctgaatagatattatttggctatttatgaatcattcacatgtgaagtgattgtcttatgcaaaatgtagtgtgaattgtgatattcccaggcaattttgttataggaatgtccaattatgatctatattatttgcagtgtgcattttaatttgaatatttttagtgtgtatctagctagcttctgttttctgataacagataactgcaagcacataacttggatgataacttgtttctttcatttgctgagttcttgatagtaattatttcatttcatgttttcatttcagaaccaaagaaatcaaccacgaagcaatttgatcga

SEQ ID NO: 25424 - DNA, 821 bp, Glycine max
  Intron number 1 from transcript Glyma14g01480.1 (locus Gly ma14g01480) derived from phytozome v7.0 (chr-ID Gm14; pos 834990 to 835810 reverse strand)
tataaacaaccttttgtgataggtgtgtgtttttgcattccaagcagcctatgtagtcataaattcctgatttgtctatttgtgtcctggaattcaatgtttgtacttggtacatttactttgtcttgtgtttgttgggtatcatctaatgtataatagggtactaaatatattaagtttttgggatgatataaactgaggttctagatcccatatgtggattgtgctgttctgtttggcagagaaatctcagcagctttctttttcctccccgtatttgcatatgattcaattgagccattagtttttgagtttaagtgaagaagaacaaagttagctttgaagactatcatacttcacaatttattttatcttctctaaaagctaattttaacttaggcataaattaattttatcttatgagaaaattttatttcattttttcttccataagtacttacggagaagttgaaccaaataagatctagtccatgttcttgcaccacaatttcatttcagctgatcattcctcttacttggtcatcctacagttggaaattgtggttaactcacacagctaacacctaatcatataaaagaagagcttcccgcaaactcacacacttaacattgaagttttctttgtttcaaagtttagaagaacgagttttgaaaataagatcgtaacaactttttatgtcttaatttcacatcttaccaacttttatttggtatctacgattctaattcattttctatttactttttggtttgggtatgtgacaggtgttgctggtggagcagcatccggtaagacatca

SEQ ID NO: 25425 - DNA, 973 bp, Glycine max
  Intron number 1 from transcript Glyma14g01010.2 (locus Gly ma14g01010) derived from phytozome v7.0 (chr-ID Gm14; pos 528831 to 529803)
cttcctcttctccaatttcgaggtctcaattccgggtaagtaatgcttcccacgtgctatctttctccttttatatattccattcaatttcgcccacttcaattcttccttcttcttcttcttcttcttcttcttcttttttttttttttttttttaaattctcccccatttttaatcctcatatactaaaatcggtgtgggtcttttttatttctaaccggggtatgagctgttgtgtgagtttggggatgcttcgacagaaggtggaatagcattttttttagacctaagcaatgatatcctcccccccctctctctctttcatctggatttggttcggctagtttcagacacaaattaaagaataagctatctctgtaactgttgtgtttgtaattaattggatattcaactagtaattaagacgttaagtactgtatggtaaaagtgatctcaaagtaggagctggatattgatttttgtttgagatttgagctcctttctatctgaaaattaattaatatggctttatgcatgtgtctgtttgtatatagtattgcgttaagactccaatttggaatatgtatgtagatattctatttggtccatcatggctgaaatggtttcacatgtttaaagtgagttttatcttgcggcttctactaataaaagttgggtttttttaagatcagctgttgagcaactaaaagtacaaagagagagtttttataataaatacttttttttttccaatgtaaattttccacattttgttccttagaaaagggttgacattaacaaaactgctaaaagttcaataaaggaaccacgtatgaaaagaaaattttctccacccacaatattcatattcatgatatttctgtcagagggcaccggaatttgtgtttttgctaattcctttttaaacgtgtgtcagctttgaacagccacaagcacgcattgcttgttcaa

SEQ ID NO: 25426 - DNA, 728 bp, Glycine max
  Intron number 4 from transcript Glyma16g07660.1 (locus Gly ma16g07660) derived from phytozome v7.0 (chr-ID Gm16; pos 6924112 to 6924839 reverse strand)
ttttgtgggtggaattccttctactgtgaccgaaggtagtgtttcaattgagctaatttttcacctgttgaaaatagtgaggtgttgatgttgtagacgccttagtgttacaaatttgaatatttgaggatttaacatgaacaataggcatatataataatgtgttcatgctgaggagttgtgctattgtataattctttatgcatcactaaacgaatgcctagaaaccatgtctactctagtgcgttgaaattcttccagaatgtaatcaatgtatctaagtttcaaattctgaagttttttttattgtatgtgtattgcttttagagttgagagctgttggaggttttgttcttacattgtacacaaaaggaaatcctttgaggtttcagtgcatttttgctggagactacaattagtataaatatctcttatgttcaagctttctttggtgatgcacattccacatcattcaatattagggtggaaaattttgtgttgaaatttctccaaattccaaagacacacatttgcacgaatttttatgttatgtcatgtgtgaacaggttgtgttaagttaattaaccttgctggaatgatggacttacatggctgatttctagaaaagcaactattgacttggaaagtaactagctaaccataaaagagatgcagaaactagatcctttgcggattttattattttaattagagattcgcttgtgcag

SEQ ID NO: 25427 - DNA, 764 bp, Glycine max
  Intron number 1 from transcript Glyma14g01410.1 (locus Gly ma14g01410) derived from phytozome v7.0 (chr-ID Gm14; pos 795176 to 795939 reverse strand)
ttggagtgtttggtgtgttgactaaggtgagcaatactcgacatgatgttaaacataatatgtaagttttctaaattatctattttgtacattttcaaatattctgaatcttcctacattagccccactatttcactcacgtacctctggtcctctgatagatactgattactgaatcattttcactatgttgagcattgagagaatatattccacaagaacacgacagctccattattagaaagttatgatgacgagtgcatatcttttatcaaaaggctaccacagtcatacaccatgcagtttcaaacttcaaagaatctccttcctcttcgcatcatgttctggcctgtattttttataatgaaatctagtacaataaagttttcctgattttatgctgtgtcctgtcgttagtaatgtctgttttagtacacaccttaattatcaagaacatggcttccaaaagttttaagaaactagctattttaattttggtttggcacagacacacatgcttatcagcatagtttagatttatttacactatttcctgcaacttcttctatgctgctagtcaattacttaactttaggagagttgtcgtagacatcttcctttttaatttaataagcatgttacatgcaaaccaaaattatgtagttaccaaacaaacataattttgaattcaagtaggtgccatatagttcctttgattgtagttggctgtagactgtacagggaattcaattgcactgaactcc

SEQ ID NO: 25428 - DNA, 965 bp, Glycine max
  Intron number 3 from transcript Glyma14g37210.1 (locus Gly ma14g37210) derived from phytozome v7.0 (chr-ID Gm14; pos 46476944 to 46477908 reverse strand)
aaaaagtgagccaaattaatagtatttactagtatttgagattaatgatattaaaatggatttgtctaattgagcatcttcaacacaagatttcattttaagatcttatctattttttatggatcttgtaatattaaatcattttttaaaatttttttcatcttttactctaatctaatagtgtatctcattttcatatcttaagatttttaaaattttttaagtcctacaagaatgagataaatcaattttgtggagagggaataaaaactcattttttttaaaataatttaatttaatttgcatttaaagattgatattaagacaacttggcactaaatgtcttctcttttatatacattaaaatgatgaagtttgaattcgtaatgtcatgtaaattatttaaactcttcaccattagctaaaaattagcggcatgtgaacactagatatcctagtaaaggatgttagttgagtggtgatcatttctttttcccattttctaatttattttattctctcctatattttcactaccaaaaaggctaaaacaaattaaattaaaaaaaaataggctttcttctattggaagataaaggttacacaatattccattttgatatgtaaatgtaaatgtgagtttcttagaaaatgttttcgctatagttcttaattagatattatttttccatgtgctatgcaaaaatggtttaaggaaaagttcttgaagcatctcttcgtgtgcatatcacatcatgtcaataaacacaacttccaatattctatagtggtcactcttcattttgactgttatgttatcataaccaaatattttctcttcttttatattatttactttccccgcttatatcaagtaattaatatttgattaactttttttgtaattttataatccttcctttgttacagggaaggaattcaaatatacgtgattggggattcat

SEQ ID NO: 25429 - DNA, 839 bp, Glycine max
  Intron number 3 from transcript Glyma13g19040.1 (locus Gly ma13g19040) derived from phytozome v7.0 (chr-ID Gm13; pos 22636271 to 22637109)
aacccgactccaagatcagaaccactgaattcacggtttttccttctctagcttctactctcagattttttttttcataacctttcaatttatcatgaaaagagatccatgccatttgaaattttgtgaaatacaataaaaaaataaataaaatctaagaaaaaaattatgtccattcacttctttcttctttattctactactattgttattactattattgatattgttcaacacctcatgtccacatgtctgagataattttgagcactttggaaacatacatgaatcatcattaattaaaatctacgacgtggttttaggttctgggtccatgtaccttttgacgttgacttcaaccttaattaaaaaaccatgtaaccaactctaaccactcactttcggtccagttggccaccattttttcttttcttttatcactaaaatgaaatagaggaagtaatttgatctttgtttatttaaaataataatataatcttgtgtacaattaatcatagtagggctaattttaatttaatcatagtgctcctgttaactttgtattattataatattattatggatggataagcattatcattcttacgtgagtaacgccatttctatataatttttttcctaattttcccttctaacccgggcaaattcccagtggacatttttttcctcaaaacatgaaaaaataatttttttttttaattttgaaaattattgttctagaataatcacttcctaacaatggtgaagttatgtgctaattagggtgattaatgtttgtttttaatttttggtttggcaggtccaaggtggtggaaata

SEQ ID NO: 25430 - DNA, 876 bp, Glycine max
  Intron number 2 from transcript Glyma16g07110.1 (locus Gly ma16g07110) derived from phytozome v7.0 (chr-ID Gm16; pos 6410757 to 6411632 reverse strand)
gagaggttccttctctaactaacttcaatcacctctcattctcaattgaataacaacgacaccgtttcgtatattatgctgaactcttttttatctcatgtcatgctcaaagggtaatccaattttttgcacatgtacaaagcctgcttaatgttaaaacaactaaagtttgagttttgggtctatcaacatttgttattggtttttcttttaagtacaaatatataattctattctttaaaataaaaagattttttctaaattttttatttagacctccctttctagtgggtcggccctacggatgtatatatctggttcataatatgagaacaaattaaacacttctcttcataaatacttctcttgataatcgaaaatttggaattgtttgagtgtaagtgcatgtttggattcatgttagatgatccagaatcatgtcaaaatatcatgtgatgtggttttaggttaattttcacatgtttggttctacgttcaagaattgattttgagttcaagcaatcttaatagtgtgtttggaagggtgtctcatcacagtggacacgtgtcatacttaaagctgctactactagttacttctgggtaaatagtagaattggacttgaattttgacacgatgtggctcagtagacgccaaaccaaacatgtgttaagtaatttttgctttggataaaaaaaactatgctgagttgtttttctactaacttgcttttagaataaaaaatccaaccattgatcacataatttcaaaattaattttacaaagctcatccaaacacacactaagtaatgtctgttcttatttatataaatatttggagttccctaatgtagttttagtttcatttgtttcag

SEQ ID NO: 25431 - DNA, 977 bp, Glycine max
  Intron number 1 from transcript Glyma16g02860.2 (locus Gly ma16g02860) derived from phytozome v7.0 (chr-ID Gm16; pos 2438326 to 2439302 reverse strand)
gtttttgtttgcagattcaggaactggtgtgtgaggtaatatatttgctagatcttcatttccctttttttttttgcttcatggggtgtttgttttttggggcattggagcttctttgttgttttgtggctcaaaaagtttattccttttgaaggagttgtttgcttgatgaatccttgtgctgcttccccttcaattcttaatttcttatcggcaatcgagatctggtttgtttcaaatttgtttaactattcctttcattttttgagatttgaaaaaggttgtttttttttccttctgtatttctaccatttgaatcaattgtagataggcattgtttcaccgactgcaatttttctgaaagtactgcatcattgcattccctcctccccttttctcgtggctgttaaaattgtgatgttaattattgcctagtcttatggtgaaccataaccgactttgatttttaactattcttgctgaagaaatttgaaattcatcttaaaagctgtggctgcacttctgatttattctgtcaaaaggaatgttgaaattgctaagttgactgaaaaaaaaaaggctatggtaattgtagtgttttacagcatctctaacttgctgccctagtttgcctatgtctactttatttagtgtagtaataaatgtaactgtcatccttccttttggagaaacttctcattttaaaacgtacaattaatggacctttttttttaaagtttttgtaacagtacaggcaagtgacagttacattttctttaccatatgaagttctctctgatgtagaagatactatttctcatatttgatcgagggtattttgatatgaatttctttgtagatggtttttgttgacttaaagaaccacttccttatttaaatggtatggtttaccattctctcattactccttttgatttatatgaagatttcttcaactcggggtttcattgacataa

SEQ ID NO: 25432 - DNA, 949 bp, Glycine max
  Intron number 1 from transcript Glyma13g40870.1 (locus Gly ma13g40870) derived from phytozome v7.0 (chr-ID Gm13; pos 41318810 to 41319758 reverse strand)
ttatctcataaaacttctcttgattggcgatagtggtaagtcactcctcataatttcgtcgattattcctgcaggttatgaaacacaaaacattgcaaacaaaaatggcatgatttttgtctcgaattgtttaatttggattttgatgcaagtatatttaatctttgagtttgaatcttttcatgatctagcttttgctagtatttgaatgattgttctattaccgtgatacaactaggagattctgttaagtgatgttatacagacacatctatataaaaagcactccgtcaatgttatctctctctttatcagatcatattatttatcatatctatacttatcagagtttggtgtccaccgaacttttcctaattctgtttgatcatagtctgaaatctgaatatgttggataacttctccatcgtatataattaggtccctctctactttgacaatgatatgctttattgcaacatgtactatattaataaccactttactttgcaacttctttatagagtttttttttttctttttttcttgaatgattatttagtggaaaaaaaaaagaaccaaaacatggtaacggaagttgctttttagctttgttttcttgcatactttaatctgtttaatccatagggaagaagaaatttgaccttagcttggcgtttctcatgaactcttttcccgtgccttgattatttactatagtatatatgtcatagatatagattcttccatcctctctgtttattttctttagaggatcaaggaatagaataaaagtattatagtaacataaagaaatgaaaaaaatactgtggccatagaaactgctagagatgtgcattggtatgcaaattccttaattttcacaaaccttttttttttgttattcttggttgcaggtgtcggaaagagttgccttcttctacgattctct

SEQ ID NO: 25433 - DNA, 539 bp, Glycine max
  Intron number 3 from transcript Glyma15g22050.1 (locus Gly ma15g22050) derived from phytozome v7.0 (chr-ID Gm15; pos 20693259 to 20693797 reverse strand)
cccttgagtcttctgacagtctgagaaataaaaaggtatgcaatatggtccgatatattgagcatgcataatgttttgatggtccatgaacaatattttgtatttttctaggtctttggaacaaacaggaaccaacttatgaaatctgaatggaattaacttttcaacaccctgtgctttaactttaaataggttttttcctaaactcccccccgccccctccgtgtttcttgaagatgaacatgtttaatatgagggttcaaaattttgagctatttatacttgtctagataagtagataaccatgagttgagtctaacttcaataatttgataaccatcttattgaaagcgtaaagggatatcagttaagtcaatgactatattcagtattttcaaacatatttcttatagtatagaagaaaataatgcattgaatgctaccattgatgactatatacaagagagggagaaagttttgtattttttttttcttttcatatgttggattattgttgctacattgcagatatcagctcg

SEQ ID NO: 25434 - DNA, 736 bp, Glycine max
  Intron number 2 from transcript Glyma15g22050.1 (locus Gly ma15g22050) derived from phytozome v7.0 (chr-ID Gm15; pos 20693800 to 20694535 reverse strand)
agttgaaattggcggcagattctgaagccaaagaggttagattttcaaaccctagcaatgtatcatgtctttgtttttgaagcctgtttggaatattttattatcctgtttctctgtttgaatcttctaccctttgtttttgtggatcacaattgctggtgatcttattatccttgtttatgcagtttgaagatttgttgcaattcttgtgttattattcccttggttttcttttcttgttctgtttataacattgtgtgttcacttgtcagagctattgatgttcattacttgtagtttagttgatcaactaacttctgctgctcagaaggatggtttaaattgttaattccctcatatcctaattgcttaacatttttctttaccctgacttttaagatgtatgtgtaagctatatggtttctttctttcacggggtttggaaagattagaaattttttatcaagtggtggtaaatagtactgcctttgtttagccttttggagtcgcatacactagtggtattggtatctcttgatctctttgacattaaaatgttacaccagtttgtaccaaatcctttggcaatatttggattgtgacattattagttataattagattcaattcattgtttaccttgattacttttagatagactgataattttaacaagtttatcattcttacatatttttcaggataagtctttgggacacaagccaaaaaataacaa

SEQ ID NO: 25435 - DNA, 430 bp, Glycine max
  Intron number 2 from transcript Glyma15g18380.1 (locus Gly ma15g18380) derived from phytozome v7.0 (chr-ID Gm15; pos 15113281 to 15113710 reverse strand)
cccctctctggagaagtggaccaaaaggtccaaaggtatataatttcttgtatttttctttttctgtttccccttgctatggattcaacctcaaacattttctttttctagaaaaaataattagctctaagtttttcttatatagtgctcgcaccgatctacaacaagcaattccataaactctttaattttatgccttaaaaaaactcaataaaaattggcagtgatagcaactaaaatattttcaattaaacaattgaattgtttaatttaaactgaccaaatgatatcaaacgagtctagataagttggttgaataaagtgcatgagttgtggtaaactctgctgctgtcttcgatacctatagataaaaaataagaactaactaaatgatattgaaaattcatttttgtgtgacagtcactttgca

SEQ ID NO: 25436 - DNA, 732 bp, Glycine max
  Intron number 1 from transcript Glyma13g35460.1 (locus Gly ma13g35460) derived from phytozome v7.0 (chr-ID Gm13; pos 36866935 to 36867666)
gtcgagacatcatcaggcaatgtactatttcattatatcaaattattacttttgtttgcttttggtcaaaaagaaaaaagtattttcctgcgtgaattatgagttgcctcttttattgagttcattaggcatgcaatgttagcgtctaaaagtttttacattatcaaccagttagaaataatcttttatatgatttttaagatagctattattataaaattcagcaaatgtactgtacaccacgatttatgattggatacagtataaaaaattttatactatcggtgcatggattatttatttatttttattttgatcttacaagaagtatgtttctcaagggtggggatattttcattttgcttttgaatcccaagttgtttaaacagaatcatatattgcatgctttggccccctttttctgtcatggtcactattttaacaaaatgtaataatgcatttgtaaataattagaacagaaaaacagaaaagggaatgaagttggagttttaaatgttacgaaaataaatttcattgcactgacaaacattataatgctttttaacaagtggaagctttttattaaaaacattataacgatttttaaaaaacatatattataatttggatattttttattttttttacttgcatttttttagtcttcttactgtctttttgaaggaaaagttgtggagttgtaaataatgatgaaaaacatgttattggcag

SEQ ID NO: 25437 - DNA, 987 bp, Glycine max
  Intron number 1 from transcript Glyma14g09750.1 (locus Gly ma14g09750) derived from phytozome v7.0 (chr-ID Gm14; pos 7805109 to 7806095 reverse strand)
cttcatttcctccgtccccgaaaccaaaaggcctggtactgtccaacactctaccttgtactcactcataattcatgcttttacgtgtgcttagatttcatgctatatagctgcctacgtcttaaaatataaagtgtattcatattttataagatgaattatatttataattgttcatttgatttgaatcaatgattataaatcctttagagtgtagcctcttttctttttatgcataggaaagaaatagagtgtagtctttaaattaattagatgtatagatcggttcttttataagctaaatgttatttattaatttgttatgtttttattagtcagaagaatttgaatttataatctttttttttctctcttaatcatcaaatcaatcttatgacttctctatagataagtttttagatatttgtaatcaacattattttgtatttgagtaaatatatctatagtttaagagattctgaaaaaaagagagagagagagagaaagtaagaggtttgtgtgattcacttttcccttttcaattttaaaaattattttctaaaacaatttttactatgcaataatcaattctcatccaaattattaatttttaaaaactatttataaaacaagtattttaaaaacagaaacggttagatgatttttttttttttcatcagccttcttctcttttcatgttgttcaatttttcctttagttttttcacactttatttcctgtctttgcaccatctactataccaaagctgttgcctatgatcaatcgtgtttagttatattttgaaaaaaatatatttaaattaaaaatcatagatactttaaatgattaatttttcgttatttaggaatcaaagtatatcttgtatttgcttgaaacagtaaattagatatttattctttttattctctctttttatattctttattatcagcattgtttcagtctctgctatttgaagggtgcggg

SEQ ID NO: 25438 - DNA, 962 bp, Glycine max
  Intron number 1 from transcript Glyma13g16430.1 (locus Gly ma13g16430) derived from phytozome v7.0 (chr-ID Gm13; pos 20384351 to 20385312 reverse strand)
tcatcactggtatgaagttggttaatgtcttttccatttctcatacataaggatttctaattaaaattgacattttgtaggataagatcataaatcttgagatttttttattaaagtatgatgtcaaatttatttatatgagtcttcctgtcctattaatgtttactccctagattctccaaggtaccactactacaaaaaaaagttatattggcatcacttattttatcatcattaatatttgtagcatcacaaaaaaatttgtggtgagttttctgaaaattacaaattaattgattcgccacactgatgttaatgattttttagtgcgtcttggcaactaatgttttcatcttactaactaaaattagaaaaattgaaacagtacctgacattgtgtttatgttttgcgcgtttctattgcctcattttcgttgagaacgtgttcgatcgtgtggaaacttgaaaaaaaaaaagagagagaaaggtgaaatttttcttgagatatccaccacttaagacaaaaaaatggctgtttccgttttgtctcttatgacatgacatggtctgtcattaacgttctgctaaatacatttgatataatttcttgaacacgttttatatattcccagttagtgtggttgttgaatctaaaacaggaatagtctttgtctacaatatgggtgagcgatgcaaacgtttccaagggtttagaagttagaactagctaggtccacggtcatagttttatatccttgattaactttatgttggtcaagtcgtttatatttggtcaattaattcattcatatgagaaaagacagaaatacaaacatgaaaaaatgttaattactcttataattcgcatgcatgcatctaattatatgatttaataaatagttttttgtcatatctacttggtttcaggaaaaggagagttcgtaacttgctcttcacagaag

SEQ ID NO: 25439 - DNA, 991 bp, Glycine max
  Intron number 3 from transcript Glyma16g25380.2 (locus Gly ma16g25380) derived from phytozome v7.0 (chr-ID Gm16; pos 29337657 to 29338647 reverse strand)
gcattagctgaggcaaaggtatcaatttcttcattggtttcctattatttattatttattttttaattttgtggatacaaatcttacaatcacttcctcttaggacgctgtggaataataactatttaagaaattaagaaatacacaccgagaatatttgtgatttgtgatggttgttcttgacatgattgactccgtcaatcttctcagagttcttatatgactttgtgaaatccttggggtactgttgtgttgccccttttcctttataaaacaattaaactggtttcgattattgataaattcgtcttcattggattctttatctctatagtaatgttgtgcattcgacagttatataggtatccaatggatggtaaatcattgtgcattatcttcatgatactaaaagactgaaagaatgcttgtattttgtgtaaacactcagggtttgcttatttgagatgaaaaaatgaggtgaaagataggttgaggaatggagatggggtgggatgaaatgaatttgattttctctaatagtctcttcttagtggctggaaaatctatttgtttcatgctacatgggagactgagttacactgcagtttcaatcttcctaaacttcttctgtcactagttcatcctgagttttaatatccttaaacaagcacactgttgagcaagagaggcagttgaaacacaagatcatgtctttactctttgcttgatttgtaacaatattcatttctgaagaatgcaaaacttatttaaagtatctgcatctgattgttgtgactgaatgtgcagaaggatttcaggttgtcacgtgcctttcaagaaatttctctaaaaaactaaataaataaaatagtagaaaaaatacatcataaagtttcgaggttataccaaacgaacaattgggaatcctcctcatctattgataattttaaggtacatttagtgttctaaccttgataatcttattaggctg

SEQ ID NO: 25440 - DNA, 790 bp, Glycine max
  Intron number 2 from transcript Glyma16g27060.2 (locus Gly ma16g27060) derived from phytozome v7.0 (chr-ID Gm16; pos 31105942 to 31106731 reverse strand)
ttggtgccacggactcttcttctcttgcggtgaaggtgagactgatgaagattgttgtatagatagaatatcttgtttggtttcgcctcaaagaataatagttcgaaattgattttagataaatttttcacatattttactttcatacccaaaaagaattcagaattagttttcaattaaagcaattttagatagcttttgggtagtataacaatatttatactgttttttggtttcctaggaattataggttaaaaaatttaatttctcatgtttgataagcattttgaaaaaaataacattcttgagaaagaatgttcccgggaatatttttttgtctgctttccacagaaacttttttgagtttaatttactttctggaggttaattgttcttttaatacagcaaaagcatcaattatttattaaattatataatatggtaaataattaaaataatcaataaaaatataggtaactttttaattattaggaaatttatttaaatattctcaatagtcaaccaaacaaattttattcaaaatatggatcatgattttcaggaatgaaaaaatttctcccttaccaaatgcctcctaaattttactcataacttttataataaaaaaacattcaaacaaaagtcacatcaattcaaaatcaattttaaccaaaattagttttggcaaccatcatctaaacacgcacggaatagaatagaagattgttttaagtgtttgtttagtctttgttcagaagaaagcagcagaggtgtcttctgagctcaaagg

SEQ ID NO: 25441 - DNA, 916 bp, Glycine max
  Intron number 3 from transcript Glyma15g20990.1 (locus Gly ma15g20990) derived from phytozome v7.0 (chr-ID Gm15; pos 19181257 to 19182172)
acttgcaggtaattaagtttgacttaaattttgttttgatcaatatggttatttttccatttttaattaattacctttaattcaaaattttatgttattacctgaaaacatttaatctagttttacttggtcaacaacaactcaacatttattttttagtgccagcaataatacccggccgaggaggtctctatctgctagctatgccaggaattatagacaaacagataagccaggattatatattaccccccaaaaaagaatgaaaaaaatattttttgttgttcttgtaacatacgtgacgtgtatacatgtgacagaaagatagagaagtagaaacatcagtaaaattagtgtggaaaaaaatgaaaataaaaatcaggactagtggtagtctttggtagctgtggctattaaataggattttaaattgaagtttgcaattggaatttcaatgcaattattaatattatgaaaaactgttgacatgcatttgatgtattaacaaaatcggtcgcaatgaatcattatggtcaagagatttaggtagtatacatgagaatgaacataggttttaaactgagtgtaatcattgcatgtgcactaaaaaaaattgtagtagctatgtgaacgtcaagattccaaaaatctttacattgaattaaacaatcccagttgtagtttttgaccatttcttaaaatactgaattaaaaataattttttatgtgtgtgtggtcaactaaacctctaaggcttgatctttggactatattttgttatgattattagcttgatatcttcatatataatataaaatttgtactatatcatatgatacctttctaagtctgtgtgatcaaagaagtaaacgtttcaaataaatcttcatataaattttgaagggaaacaaacaag

SEQ ID NO: 25442 - DNA, 323 bp, Glycine max
  Intron number 1 from transcript Glyma13g17870.1 (locus Gly ma13g17870) derived from phytozome v7.0 (chr-ID Gm13; pos 21561589 to 21561911 reverse strand)
gaaaggtgagaatttgttatgttttgcctcagaaaacatgtactttgaattcccttccaatgtccctattaagtgttgttttcttattctgtttataattccaagtgtggttaatccgtttattagagtcatcagtcactgtttgattggattttccatgttgttagttgttactcttaacttatactatggtacaaaaatgagtttaaatatctgttttatgcataaaaaattatctgtcactatgcttggaaatcaatctgattttttttttcttggatgaagaaggagccaattggagaacaccggagtcccaaatttaa

SEQ ID NO: 25443 - DNA, 162 bp, Glycine max
  Intron number 2 from transcript Glyma14g40590.1 (locus Gly ma14g40590) derived from phytozome v7.0 (chr-ID Gm14; pos 49570014 to 49570175)
cctcatcgctatcgtcctggaactgttgctcttcggtaatttgctcctttcagtaattgttttgttttttcttctccttcgcgttttgaattttcgcgaattattgttttttttttcgtggtttcagtgagatccgaaaataccaaaagagcacagagcttc

SEQ ID NO: 25444 - DNA, 714 bp, Glycine max
  Intron number 1 from transcript Glyma13g39730.1 (locus Gly ma13g39730) derived from phytozome v7.0 (chr-ID Gm13; pos 40264832 to 40265545)
ggctattatcgccttcctcgttccaaagctgcaaggtaattaattaaagatgcaaactcatgttcagaaaatggttgttatcaaagtcagaaatatggtagtttggaattgtagagaattctcttctgtgattttaaggggttatttagcttgcgtacggctttattcggctaggtgggaaaagtaaagtgccaagaggaagagggatattttggttaaaagcaaccaaagttaaaattcttgtaagctataattgaagccatgccatgtgaagcaaataatgtgcagcaaaagattgattaaggttaacttaaatagttgtttggttgttccacttccacccctttattcagttttagaaaatcagttgcatgctactggaatcttggctaactcaattaaaaattatttacttttgattttgaagcgactacagagtaatattgaatgaacataataaacttgtcctacatggtttcttgacatgcatgcttacatcacagctaatataatttttatatattctggttggatttcaatcagcataaatttatcgtcacatagctatagcactggtttaggttggttaatactgcagaagcctcttaggttgcttattagtaaatgtttatcttttagtaaataattaattaagagccaatatgtggtcctgctttgaattgaataattagttttttctttatgatctgcagg

SEQ ID NO: 25445 - DNA, 865 bp, Glycine max
  Intron number 2 from transcript Glyma13g43050.1 (locus Gly ma13g43050) derived from phytozome v7.0 (chr-ID Gm13; pos 42823568 to 42824432 reverse strand)
acagctgtgtcccagcctaacacctctcagaaaaggtactccaccttttttctttcttgtatccattttttgttacttttcgacagaggatattcattcccagagtcacgtttcatttttattttctcgtgtttgtggtccatgcaaactaatctctggcccccttctttctacttgtcaccgtatatcatagatctagtgtttcacaaaacccttgttgcacttttgagtgagagaaaaaataactggagttttccattattaattactatcacttgtatggttatgctctcaaccacagagagaaaacacaagggaagggacaatttttaagctttgatctccctgtaccctgtactggccgtttttgttctgttatacttctttgccatgttctctcagataagtcctcatcggtttttcgatgctatctgtcacttattatgtgccttcgttatcttccttgaggtttgacattggcatgtgaatatctgactctgtctctatttccctctcactttgtctctccgtttttaatttctttttggtccctcgtggcgaaagcctgttttttttttttttttttcttgttgatttggattttaaaaaaagaagatatgtataagtaatagtactaaatatgtaaacttgatgagtgatggcaggattgtgctagtgtggtaactagtgtgagctctttagactttggccccacctcgtcttttgtttttttttttaacttttagcctggttcttaccagtttcactgtacactttcatgcataacttaccatttttccttgtggacccattaacaaacaaacaaacagaactgctcctgctccagtggtggggtggcccccaa

SEQ ID NO: 25446 - DNA, 338 bp, Glycine max
  Intron number 1 from transcript Glyma16g04720.1 (locus Gly ma16g04720) derived from phytozome v7.0 (chr-ID Gm16; pos 3993031 to 3993368 reverse strand)
tgatttgaacaagtgtgaaccttgggatttaccaagtaagtttaatttaatttccctctcataactgtactaactttagcttcttttttcttatcgacaaatatcagtttatttgttttattaaaaatatcagccaaaaagatttgaatccaccattttttttctttttttcatcttttttcaatcactggatcaaccttatatctcctaataattaactttagctgctggtttgtaatttgatgattgtttttgaggtttgaatgaaatattgacttggttgagttaatgtgtgttgtgcagagaaagccaagataggggagaaagagtggtacttc

SEQ ID NO: 25447 - DNA, 956 bp, Glycine max
  Intron number 1 from transcript Glyma13g19860.2 (locus Gly ma13g19860) derived from phytozome v7.0 (chr-ID Gm13; pos 23335619 to 23336574 reverse strand)
gagcagcctcgttgatccgatcaaagccaccccaggtagcgatgttgttgtaattgtagtgttgggtgttcaaacaagtcatcaatggtttctgatagtgagacccctcatgtgatagttgtgttttccctcattttctgctgctctttttttttttttttgtgaagattgattggggttaaataataataataatatttcttgtgctaatttgtctcttgctttatatggggtgctttctaataaatgaaattgtgtgaattttaattatttatgtatttggtagacctgattgagtgaacttcctaggtaaagatagctgggattttgatatagaaatcactggctgcttttatttaacattttttaaagtgtttttctccttcaaacccagggtgagtagaataaatctgcatatgtatactcatctgctatatttagttataggatcttctttaggagagaaatcttttatgctcgtcttttgtgttggatttaagaatttgtacgttagcttttttttttttggggggggggggggtggattgcgtttctttaattggtgtattactagcattggttctggtaattctctatgccatagcatacaatagctcgagttaataaacttccctgaaattattgtatcagtttatccttgttatttgagtttttttttttcagcttactggtttcttcgtttacaaagtgtgtgtttgtatcaagtttaaaattgtactattgatgatgataatttgaaatgatgcatcctatgagacaaagtatgtgattctttttatgggaatttgaaaatgagtactatctgaatgctagactccgaaggaacacggttggttttggatgttaagtctaaacctgctgtactttttgcttcttcccacttaaatcattagtctttggaatggaatgcagggaaattaaagaggaatccatcc

SEQ ID NO: 25448 - DNA, 748 bp, Glycine max
  Intron number 2 from transcript Glyma15g05420.1 (locus Gly ma15g05420) derived from phytozome v7.0 (chr-ID Gm15; pos 3835226 to 3835973)
tctttccccccattgtctgcgccgaaagctattttgtttttaaagaaggatatactaatattaatactctaagacatcaactcgtatttcttccgcccttgacattcacagtttcgccctgttcctttccacatttgtgtttcgcttccttcctcctctctttgtcaaaccacttcttttctctgtgtgcctcgttttttctttttatagcctttcattcataccagtcatgttacatatatatttattgcttttctatgttgaatattataattacggttttactaacatttgactctttagattgattttaaatgtttaaaagcgatagctttatattagaaaaagaaaatatttattataattttataattaaaaaattatactctattgtgttaaaatccgtgttactactataagtcaataactaagaactagtagtccgtgaaatcaaattcggggcatcgctttttttatttatttttatcttgcccttaattgtaggtttctgttaagtgctttatttattttcacgctcttttatgcttttgtctgaatagcatggctatacattccagtagcctcagtgactctttgttgtgtgctagtactgtaaaattttactcaccttgagaaatccttaatttcgagggctcttattttgttttaaaaaattgtactactactaaaattaaataggggtgtgacggggattaggaatataaaaactgtaaatttggggggttag

SEQ ID NO: 25449 - DNA, 808 bp, Glycine max
  Intron number 2 from transcript Glyma13g44280.1 (locus Gly ma13g44280) derived from phytozome v7.0 (chr-ID Gm13; pos 43760253 to 43761060)
gatcgcaagtaggaccatactttgcttttttattctttgttcatcttaccaaatcagctttagtttatggttattcttgaccattctagttttgattacaattgctgtgttctttgtaatggttaatacagttaattcaaatgttatggctagttgatatcttagtgtcatattgagatctacttgctttgacagattgaaacatctcagaaaaataaaatcttatggaatcttgaaagactctagttatgatggttttatcatgtaacactgataaggatcaggttatgaaggatttgtgtggaggatttttttttctcgatcaaattagggatagagaggaaaaataacttacatccggtatctcctctggctttgtttcttttttttctattgcagcaatccttcaatgtaagtacaaaagactgatgattagtgactgaacgtaaaacaactttatttcttagctgccttcttggtattgttttcccttaatttcactgctgagcaaggatggttattgctaatggatgattcttgacttgtaagtttttttatttaaccttataatgcaatttataaaacaaacggtcaaaaatttcagtgtccaatgcttcaaaaacctctgataaaaacattttagctggtacctgtgaaatgaaccttcttgtaaaatttgccgatggctggcacagtaacctttttcctttttccaagatcttttcgtgatggctgctgcaattctatgtatgttgatctgtgtacatgtgcagattgcagtgaaaagattgaaagtttggagcaacaa

SEQ ID NO: 25450 - DNA, 667 bp, Glycine max
  Intron number 1 from transcript Glyma13g41660.1 (locus Gly ma13g41660) derived from phytozome v7.0 (chr-ID Gm13; pos 41895086 to 41895752 reverse strand)
gcaaagcagaaagaacggaaagggttcaagtcggagtgagtttacctccgctcgtttcaattgcgcttaatctctgcattttttctagcttcattttgcttttattcttctcatccgtacaccgcttcaatttctataaatgattaatgatttaattgaagttctgcttaagctatgattttcttttgggttcctatctgctgctggcttgtgtgaaaaataaaaaatgctctaaactaggtaaggtgcatgttcagacttcagatagataaattttattgagttaacttgttcgaatttagagaatgaatgtgtccagtgtcatcccgcttattaaattaatgaacagtatgtttgaaacgtagagtggatggaaagctagatagctgtttctatttaatttttaataccataaagtcagattctgctaaagtatactggtaaaagagaattatgcataaatatagagttaattagctttgtggaaatgctcagttttttaatactgcctgttttgactgtttttgagtccttcatttctttacaaaagattgtataattatatctataatatcatttttttaactcctggctggcacaatttctcaatgaagcattgcccttccattcaggtaccacctttgctggatcattgagacaaaccttt

SEQ ID NO: 25451 - DNA, 764 bp, Glycine max
  Intron number 1 from transcript Glyma15g05220.1 (locus Gly ma15g05220) derived from phytozome v7.0 (chr-ID Gm15; pos 3719991 to 3720754)
gttctgatattcatccttccctccaggtattgaagaactgttctttggatgatttgttagaaaccatgtctgatgttcattttctgttctgttttatctaagttcatcatggtctcatcaaacattcatgtgatattttttttgttttttgtttgaaatgttgatttactgaacacaattttctaaagaaaaaaaaatactatttcttatttcctaatgcattttatttttcatctgaccaacaccacttctccttgtgtacccccactctttcctacagttgtccatacctaagccccactcttgtttgatgatctcttcacatattttataacctttacaatgaagatttgattaatttttattttatttccttccaacaattcaatatggtgttgttttggagtcactggtcttcagtttcacaaatgtcattcagttctttatccgacctatcttgtggtaaagaattgtgcaacctcctccaaaagaaggaaacacacatatactgtgaaataattttatgagaaaatatcgtgaaaaacaataattggtttttgtgaaatttgaatagccaaaaaagcagcaatgacagatgaatcctaactcactggagctctttgtttcacttgtccatttaattatcaaatactgtaatactgaataaacattattattatatttccataaaagaaatgcagtgctcattgcttttggacatgtctataggaccctgcattccagaggctgatattcataaccat

SEQ ID NO: 25452 - DNA, 593 bp, Glycine max
  Intron number 1 from transcript Glyma15g07470.1 (locus Gly ma15g07470) derived from phytozome v7.0 (chr-ID Gm15; pos 5234132 to 5234724)
tttaaaatttggaaagtgtttaatagtacatttatttcaataattaagataatttaatgaaaaacacaagcacttaaatcaactagccttaagtttgtggaatattagcttaacgagttcaagccatctatatatagtagcatcaaaacttagagaaaaatattgtccatatttattttatggattcgaataagattgttttcagtaaaagatcatttgatctttataaaaaaaaagaataaatttgtgtttttctcaaattacaccaaatattcttcttctttttaacatttcttttatcccattttttgttaacgtcaattgaaatatgtgagcagatgaaattataacatctttgttatactcgcatctcagtgtttttttcaaattgtactcaatatccttccacttttttatattacttttaccaccattttattaacgtcaattgaaatatgtgaatagacgaacaatttaattaatcaaaacgcacaacgaagatcctatgaatacgattttgcacttctagacaaatataatttgtttctttattctaagcggttattctattcttggtaatcaagaacttgttc

SEQ ID NO: 25453 - DNA, 931 bp, Glycine max
  Intron number 1 from transcript Glyma15g03540.1 (locus Gly ma15g03540) derived from phytozome v7.0 (chr-ID Gm15; pos 2453891 to 2454821 reverse strand)
cttcaccgtctcaacagcacttagttgcaaaacaggtatatattatatcctcactcttctcttttattcttgtacaaacattaacctagcaaggtgatttatttggataccggtttaagtttctttttttttttttttatactctgcttggagggttgttgaagatgttggtttaaagaaatatacatcttaagaatttattttccctttattgtttccttactttactctacaaatttttgttacatttcttctatgttttatcatatatattatattggcattccctagtgatacaaaaattccaaatattgtgataataatcatttcccatccaagtgttattctatgcaattttaataaattcacatgtctttctgattctaccgcaatgtctcacgctaagatgatatctttgagttagagattggcaaacggtgagtcaaaataaagaaactaactaaattgccttattctttttgaaaacttatttactgaattttcccattgtacttggagaacttgaagccttataaaccccacaccagaatcccatactccaatgtgggactcaggtttcatactttgcaattggatcctaacatccaaccatgctccacagccctcaggtcctagcgcccaataccaattgatttgaaccttgagaggaccacactacaaaactagttgttgtagttggaaagcaagtcttataaatcccacaccagaatcccatacttctagtgcaggactcaagtcccataccttgcaatggatccttacaatctcaacacaatctttgaaaataatagatttcaagttcctattccatcatagatttaagaattgcctaacttatcattaattattctggattttggggtcatttgtgtcaggttcattctgttgtgttactatacaactactatca

SEQ ID NO: 25454 - DNA, 898 bp, Glycine max
  Intron number 1 from transcript Glyma16g07170.1 (locus Gly ma16g07170) derived from phytozome v7.0 (chr-ID Gm16; pos 6452319 to 6453216 reverse strand)
tttcattgggcttctgcttctaggcaccaccaaaggtaaaatggcaatggatctgttctttgttcttttggaattttttttttgtttttgtgagtttcttggtatgctttagttgggaatttactaatagaagttaaacaataaacatcatggaggcaatttctaggctctttggaccacctttgcatgtagttttttgctatttataatttgttaaatattcagtgattttgaagttgaatatcatgaagtcaatttctaggatgttatttcaggaaatgaaatactaatggaccacctttgcatatacttttttgctatttataatttgttaaatattcagtgattttgatgtaaaatttattgaatttacttttcctaaaccagtggtggggagttggggtggagcctgatgtggggttttacacgtgttcctttgtgacctatgtttgttaacaaattattcgtttttattaaattaattgctgtcaagcacgccttcaatcatgcttcaagtatcttattatgggaaataattgaattttgtatgttttgttactgattaatcttatggatttgtatgtaatatcataggaacttagaagaaagttgaaagtaaaaaggaacaaatttaaatgacaaccaactatataatagtttaagatcaactttgacatatttctaggcaaaaccaaggattttaaacagtttgtgtacttgtttcattttcaagtttccaccatggaatatataatagcttcttgtatgccatgctttactgtactagagaagaattaagggtagggttttatgtgaggagtatgattttaaaccttacttaccattgctcaaactgtgaaatgccaatcaattcaggtatccttttctgccctttgat

SEQ ID NO: 25455 - DNA, 612 bp, Glycine max
  Intron number 1 from transcript Glyma13g43670.1 (locus Gly ma13g43670) derived from phytozome v7.0 (chr-ID Gm13; pos 43276912 to 43277523 reverse strand)
ctggcctcaccattgccagcctcgccattcctcaggttcacaacatttagccacccaaattgctttttttcttatatagcttgcttgattgcatgttttagatgtaatttttcatgttttttcaaccggtactataatcacaaaaattttagtcagatttttttaaacttgtactatataaattgtttcgtcgctaattttactttttcttatatactagtagcatgtctgattgcatgttttagacgtggtttttcatgtttttcaactagtactataatcaaaaaaaactttcgtcagtttttaaaaacttgtatataaattctttctcactaattaatttttttcttatatagcgtgtttgattgaatgttttagatgtgatttttcatgtttctaacataattataacttctgcgtcttaaatgtgaattttctagtctcggccagttttcatacaccccagtaggagtctcactttttttttttctttttctttcaaacataacatttcacaaactcttttattattaacataaacgtacttacatcatatgttaacgcgtctgaaagtttcaatgtttgtctcttgttctttgcagggaatcagtt

SEQ ID NO: 25456 - DNA, 672 bp, Glycine max
  Intron number 2 from transcript Glyma15g14660.1 (locus Gly ma15g14660) derived from phytozome v7.0 (chr-ID Gm15; pos 11155433 to 11156104 reverse strand)
gaaaataacagggtaatcatacatgatgatacacctttgtttgtgttgcactgtcgcatttcgcttttttgtaagtgtttgctttagatgctcgagaaaagtttttgataggtttaattactcatttggtatctgtcatccttgcacgatctttacattttaatcggttttaattcctgttattttgtaagccagagactaaaacagattaaaaagaatacgtgtgaagactaaaatgattaatttttaggtgtagagactaaaatgtaaggattgtgtagatataggaattaaatgagtacttgaaccctttttgatatttgcttactgaggttattaattattaaatatgttgctccatgtgagaatatttttattgttattgtcactaccgttgttatgttgagaagcattgagatcatttggtagagatgtggggttaatttatttttatgaggcaaaattttcaccaaaacccttactttaaatgactctcaagttttcatccaactgtgaatctttgcttctaagggatgtgagttgaggaattagagttgcttagacgctcttgatatatatttgtggttttgtattttggatttgagttgttcttcagttactatgtactagtaacataattaggatttccaaagcaaatctcttcaggaagct

SEQ ID NO: 25457 - DNA, 893 bp, Glycine max
  Intron number 2 from transcript Glyma15g36910.1 (locus Gly ma15g36910) derived from phytozome v7.0 (chr-ID Gm15; pos 42407273 to 42408165 reverse strand)
gcccttgaaaattctggtttgtctctcattcgtatcccaattcgcaatttttgtttcgaaattctaattcaattctgttttttgacttcgattgatgccaattttgtttttttgtttaattttcggtttttgtttttttggtgtgttctagtgtttgattgtggaatttttgttgttgtggatagtactgtgtcattgtgtgtttgctttgtggtgttttctatttggtttgatcggtggtttggtgcggttgggagtaatgtgtgtgagaactgggcttggattgagcggtttttacttgttttgggtctaaatttacttgttgaactgcaaggaaaggtatattttgcggttatgcaacttaggtgttgagatttggaatgcttggtatgtaggagtgaggatgggaagtgggtggcgtgtatgagtgtgtgtggggtttgagtttgatggattcggtggagctgacatgtgaagagtttagactttagtgttaaaggcatgtgtgccggagtgaataccggtgggataccggcatgggtagtagaattttggaacttagttcattaaactaaattataaatcttgtttgattagttgcggatagcagagtatgagcaggacttattttattgtgagggatcttttaattcatgattgtgcattaagtactggaaaacttaatgatttgtcagttgtcatctcataagaaatggatacatagagatgtctattatctatttcttttgggaaagctgaatatcttagtgttctctttgtgcaaatagtatttttagtttctgaacttgtagatttaagattttttctagattttccagattcatgcttgggcccattgtgatcgtttttttctttctttttatgcagaaaat

SEQ ID NO: 25458 - DNA, 759 bp, Glycine max
  Intron number 2 from transcript Glyma15g15260.2 (locus Gly ma15g15260) derived from phytozome v7.0 (chr-ID Gm15; pos 11691886 to 11692644 reverse strand)
tgtgtcccgtgaggcttatttcacagccattgacggtgcaatactcctccacttgctgtttttcatgtttaaatatgtaaattatcatgattcattattatataaaataacacgcaggaagtttgtttaaatttatttcttagaaaaaaaaatacttattctaataaaataagtaattttatgtattcttagtgtgattctctaaactcttactacttacaaaagaaaagatatttgctggttattttgagaaacaaatctcatcttttaataaaaccccacttttttaaaacacttattttaaaattatttttttaagtttaaacaaatcattcattgattagatttaaagatttgattggaaatgttatgttatgtaatgtaatgtaattctctggtgtcttgataaatcaattttcatatattttttctttgaaaaagaataacttttttctctctcagcagaactaatgttgatccaatttgaaacaaaaacgatttttggacaaaaaaacttaattgacacctattcagataaaagagagaaaagaataaatatgatagatgattggatgtgataggaagataaaatatagaaatcatgagtgttaattagatgtttgaaaaagttgggtgttaaaaaatcgttgctcaaataaaacatacgaatattatgcaatgatattgatgtattgctgtgcatgataactattcataatcgtaggtaccggggctgataatagtggaggtttgccacca

SEQ ID NO: 25459 - DNA, 211 bp, Glycine max
  Intron number 3 from transcript Glyma1784s00200.1 (locus G lyma1784s00200) derived from phytozome v7.0 (chr-ID scaffo ld_1784; pos 371 to 581 reverse strand)
ttcccatagtatgtcctctttgtcagttgaatttcactgtattatccacaaacatatctgaatacttcttttccttgttctttcaagatgtgtattaatcatatgtttgatccaaaactattttgaatttatgtaatatggccacatggatactaattatctggtcactatatcaggctagacctactttgtatcaagtagtgaaggagat

SEQ ID NO: 25460 - DNA, 925 bp, Glycine max
  Intron number 4 from transcript Glyma13g23820.1 (locus Gly ma13g23820) derived from phytozome v7.0 (chr-ID Gm13; pos 27135486 to 27136410)
taacacaggtaaattatatccgcggtatgctcagaatggaactttactgttttatataatcagattagattcataatatctatatcaaatttagaggtcatttacttgcacttttttttttctgttttcaaagatttgtataggaaatgaaaaaagtgcaagtaaaggctcccttaggtttttcaatttcatataatggggtattttaaaagggatgaacattaagttattatttgatgtgacccatgattttggtatctcctattctataactatctgcaacaagatcttgtggagtgatgtaatgtttatagtattatatggcctttacacctttatgatacttaagttactatgacaaggttgtgttatatggagtaactattgtgcacctcaatgcaaaatgtcatctattgcctctcttcttgactatcaacctacctgtcaattttaagcctttaaaacttgctactgttacttaaaacacaacctataatttttgcattaatttgggtacttctagtatttctgtttcattccttgttgcatggcatagaagttggaattatggaatatattcacaaaatacaaataaatccagagtcattacatttctctatgttcaaaataaggcaaaaattatggcgcatcatgtgagtagtgatgtagataaattggacgaaagttatggtttttttttttaaacatgatagccccacccccaccctcgaaatgtgattaacttttctgttgatctcctaacatgatggtatttatcaattgtcaatttgggacatgtttactgagcatatttagttgtatatgcattttcccttttttacacatgacccaagtaacaattggatgatcttccacttgaatttgaatctagtaataatgttagacattttgtcttagattgcaa

SEQ ID NO: 25461 - DNA, 873 bp, Glycine max
  Intron number 1 from transcript Glyma17g05160.1 (locus Gly ma17g05160) derived from phytozome v7.0 (chr-ID Gm17; pos 3491095 to 3491967 reverse strand)
ttgctgtgcagaccaatcacttagacaccattcaggtcttcataactcaactaactaccttcaaaactctttggtgtctataatatatatacctagggtttcagaaatttttaaaaacatattccgacaaacttctaagttactctgattagttgtttttaattaaaaatgatgagaaattgtgagaatttcttctcacctgttttgggtcctttcttcattgcaaaattagttttataatattctttttaaataaagttttatatgatatttttcatttaataagaaagatatataatgttttttatttattgattgtttgaagctgatgagctatcaatgactttttctttagcccggccccttatatgatattgataagctgagatgaatataatttgagaatttactaccttgcccccatcatatcaaatatttaatttattgattacaaatttccctattatatacttaaatcaatcaacatgcataaaaaatatctttagaaataactttatttttaacacaattcactaaattttgatacatgccaactgttagttttaacatgataaatataagtatataatttttttttcatatgaacaataaataattattgattacagatatattgatattatatatatttgtgggggcagaaataattttttgttcaaaaaataactaataagtaaatattttataacctagcagtcagatagaactaataaaggttttaattccaaatataatatatatgaacttacgtacgtacgttcattttgagtgcatgatcagtagtggtgcactagctagctgatgattattaatttccgtaatccaatattgtcatttatttctttcagtggt

SEQ ID NO: 25462 - DNA, 378 bp, Glycine max
  Intron number 1 from transcript Glyma16g32280.1 (locus Gly ma16g32280) derived from phytozome v7.0 (chr-ID Gm16; pos 35441039 to 35441416)
aagtcaacattagttcacaagctacatttggtaactcttcactttttttcagttcttattgttatttatttccctttatgttctctcttctgtcggttgtctttacctttctcttattggacaaaacttagatacagatttttaggtgtttctgattgttcttctatcagaaataaaggtacctggtaatctgtgtgataaaagtctgcattaaatgtcgacctagattgttgaggtgaagcatctattttggtagtgtaacatcaaaagcattcaaggaactgtatccaagttttgtccttttttgttttggttacattggttattgtgtgtttatgtgtgtgtttaatttctggggttggaggggagttgaagaaa

SEQ ID NO: 25463 - DNA, 612 bp, Glycine max
  Intron number 1 from transcript Glyma14g02870.1 (locus Gly ma14g02870) derived from phytozome v7.0 (chr-ID Gm14; pos 1826184 to 1826795)
attttcatacgtgtggagccataagcttgctgtgtgtacgatacccaactttgtttttcctttatttgatcttacctctctttgtggatctaaaatgttgcttctttcttctgcagtgttacttgttagaattagattgccacactttgaagtgaggcaatttgattgaatttgaagttaatgactttttgttcaaacgaaatctttggttttctgtttgtgtatgtatgcttatatttaagtttgtcaaatttgatgattcttgcgtttgatttagcttgtcttttggattccttttatccttctctggttctattaatgtgggtagtgttttagatttgattctgcttcatcccaaccattgtgatttggtagtgaacttttgctatgtgggttaattctttttctctccccttgtttccatgatagattattatagttgagttggcattttaatcctgaagttatgaagtgtggttgttgttgtctcatggcatacagagagagagtacattgcagtgtatgaatacctgttttgttttgaaatcgtgatgcacagtctataatgtttttaaattatttcagaattgttgctctgctgtagttgatttg

SEQ ID NO: 25464 - DNA, 342 bp, Glycine max
  Intron number 1 from transcript Glyma13g31270.4 (locus Gly ma13g31270) derived from phytozome v7.0 (chr-ID Gm13; pos 33713058 to 33713399)
tgggttttcttccttgtttactcttggagggagaagtatgattagcttccctctttcttttttatttttttatttacgtttccagctttggatttaccttgtaaaaatcggatctcacctggctttctttcttatcaaatctgtggttagagatacgttataaacttgtcaattttgccttccctgcttcaattacagaaaatggtcaataatcttaccagattatgcgtaagtttttttgctgcagttcattgtgatttgagatattaatcttccaaaatcaaacttttctaattcctgtggggtgtggacttgagacagttttctcttaattttcagctg

SEQ ID NO: 25465 - DNA, 864 bp, Glycine max
  Intron number 1 from transcript Glyma16g06100.1 (locus Gly ma16g06100) derived from phytozome v7.0 (chr-ID Gm16; pos 5525212 to 5526075)
tcgcgtcttcgagtttcacagcgaagtcgtaggaggtactctctctctctctcctctcatctttggatccccaaatctagggcttcttcttcttctctgcaaaaattcgttgaatcactgtcttaatttccgtcatcaatttctgatttcgaatcttcgtctttgtttactttacatcgttgaacttgtgttgtgcttacttcactgtgctgattttgataagctcttatttttatctttgaatgttgggttcggatcttcaatttcgttttgtgatcttgcttgtgatgtttaattttcagtgtgtgtgctggtgtttgtgcgagatgtgagtgaaggtttttgtttttgtttcatttctgtgtttttttttattgagtttgaacttttgttgctgctttttgtgatttgatttctgatttgtgatagtgtcttgctgcgatgagtttggtagcttcgattttgtgcggagttgcatgaaagtcaaatgtggaaaatggaaatccatgttcttgaaaatggataaattagatttgggagctcttttgtttgcttttttatgtgatggaaggattagaaattagaattatgttttttccttttttatttttggggttataagggatagcaaagccccactatactagaatactaagaaatggtatgaaattgatgtaatttaaattaaaatttgaagtgggaattattgcttgcttgaagtaggaattatgctgttgttgaagcattttcttttcccccaattgcatgtttgctatgccctgtttcttgctgtatttttgtgttgatttacttctttaataaggtctatattgtgtttatgataacttgttagggtttcaaaag

SEQ ID NO: 25466 - DNA, 700 bp, Glycine max
  Intron number 3 from transcript Glyma16g06100.1 (locus Gly ma16g06100) derived from phytozome v7.0 (chr-ID Gm16; pos 5526819 to 5527518)
gtatttttgaggtaagctattctagttttccaaccacagttaattatcttgtgcttcagactctgcaggatgtaccttattttagggctatgaaatattgaaattgtctccccagtttaaatgatattggtaaaaagtgagtctaattataatttctcaaggagagacattgcccccaagaacagttaagtaacctatttgtgttgcccaatagctagagtctgtgttaaacacatgttatagacatggacatattgtctccatttttagaaatgatgaacattcttctgtcattgttactcatacatttagagcatgttttgattagattatttttagatattataatctaatcgatagaaaaaagctgatgttagaggggttaaatgataaaaaaattgtattcagctgttgtggcatagctagtgatggggttacccaatgcataggatgaaaatgactttgtgttctaatttggtctcattgtttttggtttctcccttgggtatgtctgtctgattagagaccgggaataatcttctatatttgaaaaaatgtagatagtttcttgcatcctttagtattattatttttaaccacttttcaaatataatggctaaaattgaaaaaatttagttgattatttgcttaccttgaaattgcaggcagcaagttttggtggctctaacatagatccaac

SEQ ID NO: 25467 - DNA, 775 bp, Glycine max
  Intron number 2 from transcript Glyma15g06170.1 (locus Gly ma15g06170) derived from phytozome v7.0 (chr-ID Gm15; pos 4364340 to 4365114)
aaggtccattctgctcacagcaatataaactatggctgtagctcagatgcatttatgcacttgttatgattgtgtacacacaaaaggcttacttgcgtgcctattctcctatatgttttaagttcttgctgactagtgtttggtagaagatgaagacaaggtttccgggatttgtgcatggaactttaaagataaattcatcctccatgtttgttatgggactaaactgttcacttcactttcctcttctctttctttagctcatgtttattttaggttcccttgtgaatatatagagatttaaaagctatgttgtctgagtgtctacttttgtagtactttggttggtaatgtactaatgttacttcttctttttgttctatattttcttgtgtggttttagatcacatattttctgatggaagaagttttaataaacgaaaaactatatttctgtggccattttatgattgaattataaagatgataattcctcctgttgacactttttatctgcttttgaagttcccaccatttaaggaaaggcagctagctgttttatgcttgataggaaaagtttcactttgttaatgccagtgtgtcccagttattagatatacacttccacaacttaattagaatcgagtaatcatggtatgggaggagtttgatttgtattactgctcatcaaactagtgtttgatcttgtagcattctaaacttcttccttctgcttgcagtgtttaacttggagaaaacattcaaaacaacattc

SEQ ID NO: 25468 - DNA, 147 bp, Glycine max
  Intron number 4 from transcript Glyma15g07130.1 (locus Gly ma15g07130) derived from phytozome v7.0 (chr-ID Gm15; pos 4987128 to 4987274 reverse strand)
aattaggcagtcctatcttgctggagaaaataaaggtttgctaacctctaagctctgtttaattttttgctttattttctcctttcatgttatcatgtttgattgtttgttgagttctcttctttttccccttaatgcaggtgcttg

SEQ ID NO: 25469 - DNA, 595 bp, Glycine max
  Intron number 1 from transcript Glyma14g40470.1 (locus Gly ma14g40470) derived from phytozome v7.0 (chr-ID Gm14; pos 49403617 to 49404211 reverse strand)
tctctctttctccaccgcaactcactcaccttcaggtatatttccttttattattattattattattattattatttcaaatgttagttttcttttttgttgatttgcaagtcaaatcaaatcaaattaaatctaaaaacggtttcaatgcattagatgtttctgttaattggcgctagtgttgtggagttttgatctttactttttcacttccgcattgctttcgacctagttcttcgattcacaagtttctgccctctgcattcctcatgagcattatttctttattttttgttctccactacttacgagatgagaacactgcacttgctattgttctagtttcgagagaaaacccgaaatgaattgtggctttgtaaagaaaaataagctatagggatactctgtaggatattgtcatgctgcatttttaatgagcgtggaattagaggaattttggccttcaattgtagaaagttttgaaatatatgaatcaaattttggccttcagtttcagttgcttgaatgttattacggtatactgtttggagtaaagtaaccttttcttttatatttttaatgccagggatacaaa

SEQ ID NO: 25470 - DNA, 607 bp, Glycine max
  Intron number 2 from transcript Glyma14g38160.1 (locus Gly ma14g38160) derived from phytozome v7.0 (chr-ID Gm14; pos 47389123 to 47389729 reverse strand)
tcttagctgtagcagctcgagactcagtagccatagtgagtgccatacaaattaaattctcctcgtacaacaaattatcgtatgatctaaaactagcacgtgtctatgatattttatacattcaatctctatatagcatgtaatcaaaattttcaatcctaaattaaaaaactcaattatatatcacacaaaaattagttgagattatgtgaacacatgatagtctcaaatcatataacaacgttttgttcttgaacatattgatactctttgattaaaaaaaaaaactctcaacacactattgaacactctattttgatatgctattttattgtgtatacaaatttcaagttgaatgtgttaaaaagagtgtgttaaatattattataggactcttgtaaattgtgtgcctcacgcacagtaaaaagggaaaagtaacaaattatgcataatgtatgtatctattaacagttggggggtccataatatcggtaccaagtgttacttggcagaagagatgcaagatatgcaagcaaggatgctgcaaatgccagtctccctcccccattcttcaacttcccacagcttcttgctagtttccaatctc

SEQ ID NO: 25471 - DNA, 707 bp, Glycine max
  Intron number 2 from transcript Glyma14g08270.3 (locus Gly ma14g08270) derived from phytozome v7.0 (chr-ID Gm14; pos 6313049 to 6313755 reverse strand)
acttgcaagttccattctttcagttttatcatcaggttttagtatgtatttgctgttgtgatctgctactgattctgctatatatgctcctcatttctgattctgcttcatgtattcgtggccaagaggatatttgcactgaaattaacaatctttttggttttttttacttctgggaagtgtttggaagattttgtaaaattgagggggagcaaagtgattcgggctgaaattgcccttgtcattttaagttatcatatctcacataagtttgttatgattttctttttgctataatttgtcaacctagtagtttgaatgttagtttgacttgcagcctttttcccgtcaagtagagagaaagagagagtgagattatgttcactgattactaagattgacaggtgaagttaaattgaatactaaatttgttcaacatgtatcaatatgtaaggtttttatttttcccgttaaaaatggtgcattcatcaaatctgaaggtatctttaattggattttcctttatcaatttatcttataaagctacgttatttaatgtttaaaatgagcgaatgagttggttgtcttcagaaaaggaaggaacagcaaaatcttagcttagcacccagttttctgttcttattaactgaagatgtgaacataaacagatgatgcttgtgcttacatgtttgctgcatgcaggtact

SEQ ID NO: 25472 - DNA, 946 bp, Glycine max
  Intron number 1 from transcript Glyma13g37790.1 (locus Gly ma13g37790) derived from phytozome v7.0 (chr-ID Gm13; pos 38747509 to 38748454)
tcttctgccacaggttagtgtatttgaaaaatcgtttgttagagtaaatattcttaagagaaaataagttatgcattgatagttttactattatttaatcacaacccataatgtttaataagtttattgatttttataagtcatatcaacagctatttttgattctatacgttaagtttgtatgttgactatgtaaattttgttacactactggcagtgcattaaaattaatcttgttctgttatcagttgaaaaaagaacgggaaaatatgtacactacacagtctagattggttattctcatatctcacaataatttagtgttgtcatctaactatctacgcatatatgtgttttggttacattttgtgtgacgtgcatgatatttattctcactttaatatcttccgataattgttctcacctcatctctcgaaatcataaagaacatataatcttgttttggaaaggaaaaggttatgcaatctacattttattggtttctttctattagtaagcatccctgttcagatgtaccaatgcatggttaggcgttaagctgatcaaattgacacgaacagaatttaatcatagtgcattataaaggttttttattcattcaatggtgaattgtcagattccctagtacgcaggggctagttaaatagttgcaaccggtaaaaactgcgtgcgatttaggcctatataataatttcctgggtgagtctctggtggcaactccaacgtgccaattctgtcaattttacagcatgaaattaaaatcagagtgtaccaaatttaactcaggaaaacatgttttggttaccctatgtatgacatggtgtgaacagttccacgctaggttatttcatggctcaaacatattctgcccaaaagggaagaatgaatagcaatcgaaaattttatgtgcttgcatgatgtgcag

SEQ ID NO: 25473 - DNA, 419 bp, Glycine max
  Intron number 1 from transcript Glyma15g06860.1 (locus Gly ma15g06860) derived from phytozome v7.0 (chr-ID Gm15; pos 4808961 to 4809379 reverse strand)
tcttggtcttcctcctctcctcctcctacactcaggttactccatacttcaaacacttatgcttctcttctctacaaactagctacattatcattatagcactgttttgggaagtaacaaccttgtacttacgtttctactcatgtcttcctgcttttctttgcctttctctctgtttttagataaatttgcttctcacaattcacattttcctttactcataagttaagtgcattctaaattttctccccgtgatgattattctaaattttcatgcatacaatacataatgtagatgacaactaattatgtttttacttgttttttttttattttgatttgaaaaaaattatataatagtccccccctgaaacataactgtgttttttttcatggtcatttgtccagtgtggagctag

SEQ ID NO: 25474 - DNA, 694 bp, Glycine max
  Intron number 1 from transcript Glyma16g34610.1 (locus Gly ma16g34610) derived from phytozome v7.0 (chr-ID Gm16; pos 37237662 to 37238355 reverse strand)
tgggagctccttgcttacggctgataataatacaggtatttttttttctatatttgggtttcacttgagatcattatgtaattccagcttgcttaaagatgtggtgcagtgccattatctatcatgctaatatagtttgaaattcactgaaaggctttatatgtgtaattctgtattgcactgatattatgagaaaaattttggtttctattggaagtttgagtggtacactagttttgatatttttggtttatgataattagtattttactggacaaagagaattggttgccatataatacaccttcatatcccgttaccagtatcatgatgctctcttgggcagtcattttctattaggttacattaatcaatcctgggattgtcctgttgaatatgtttcattcatatgtaaatctctatagttactgtatgtaggaagaactttctttaagtttcaaaatttctgccttatcgttgacttgtctgatgaaatatctctactcgccaatgattttttttcctactacccaccatttgattaagctgcatgttttgagctgagttattgactaaatgagttcttgttggaatcatccataaacatgcgatgaaaactttgctggtgcatatgtatcccaaaccaatttttgtgatgttttgcaacagcagcagccaatagtggtaaacgaag

SEQ ID NO: 25475 - DNA, 829 bp, Glycine max
  Intron number 1 from transcript Glyma14g36660.2 (locus Gly ma14g36660) derived from phytozome v7.0 (chr-ID Gm14; pos 46001982 to 46002810 reverse strand)
cttacaggaaaggttagaatctttgtattttttttgtcttcttttagagttttagtatgaaatagtggttgcactactattattttttccaatttgacatatctctctctcaagcatttacaattgaagatggagctcggattactttgaacttgatagatcaacttgattatcttaaaggcaattgatcactttctactttcatcaaaataattgaaagttattccttactcgttacgctcggattatagcattttactcaagtttttactgaaattgtgttgttctagtgacttggcaaaataagtttgtatgcctgttctgcttggaatttattttgtttctgaagaaagaaatataagttaacaatactatataaacccaagaatgatggctgatgaggtcaacctccaactgaattctgctaagtttatggtgaatgatatgtagttgctagttattggcctgtagttctcaataaatgatatcttccatttccttaaattgtggtgctgtgttttataacttgattgtttaaccaccagtctcttacaaactccatcctgaatactgttatatttaaacatgactgtatttgaaaatcctgtttctaagcaattgctaatgattattatattgctcaagagattgagaaagttatcttggagactcataagtcacttggatgtatttagttatgtatagttgataccttagtttgttggtctttaaatgaattattataagttttataatttccctagaatttaatttattgtttactccaattgcagcctcctttctctggtggaaatagacacaagatcca

SEQ ID NO: 25476 - DNA, 893 bp, Glycine max
  Intron number 1 from transcript Glyma13g31540.1 (locus Gly ma13g31540) derived from phytozome v7.0 (chr-ID Gm13; pos 33952611 to 33953503 reverse strand)
ttttgcttctctcaattccgtgcttctcggctgtaggtaattctatttcttttttcttcgtttttatgcaattgggtgggttcctttaaatattttattaattttggttttggttttggttttggttttggttttaattttgatctgctggtaaattccccaatatgtttgtcaataaaaaaattaaaaataaagtagatgaggtgttgtcttttgcgggacttgataccttgtttttaggactttggtaagataattaagtttataacgatcgtatatagtgatgcatgtaaaatccagggccgtttgtgtaatttgcaacagcggttttgtgttttggggagaatcttttcccagggcctagatgccaagtcttatatcagataggtgctttgctcgagtatgtaggcaattttactgtcagacactcactagcaattgaacatgcaaaccttaaatcctctccaatagtctaactattgaacgagaacgtattgtttgtgtcttgtttgtggtcatgttctattaatttatttataatattgactacataaacaccacagtgtgtatttatttagaattacaatttagtaggaatacatcgagcttttaaaggatttttcactattatgtaatcatatgttgtcatataataaaaatcattaacttttctaataattactactttaaacagaaatgctaataatagtaaaatgtgtgtcagagaatgtgttggtagcattcatctgactttaaaagtcatgtctaagttaatttgtaagtagtcgacagtgtaaaagtttttttcactatatatcaaaattaaactcatttttttatgctattaatagggatcaaaactaagaccctagttggttgtctttggtttgcag

SEQ ID NO: 25477 - DNA, 968 bp, Glycine max
  Intron number 2 from transcript Glyma15g07820.1 (locus Gly ma15g07820) derived from phytozome v7.0 (chr-ID Gm15; pos 5504327 to 5505294 reverse strand)
agataggacgaggaggttttggaactgtttaccaggtattcaggttacagatgctaatataagtttcatccatggacttgatatgaatgctagccacttgaacttcaaattcttcagagcacagaggggtttattctgcgtgttattgcagtttgcagtatctttctctatctcttcctctttctcctgctgttgaatatcacttttaagagtcaaaatgtgaagtacaagccaattttagaccagctaggattccacactttgcaatggaaaaaacatcaatacattgtttttgggctataaataatatcgttacactcacactctttttttttgttcttggctttcatcattaggatccttggcgactgtccaaaactatatacatacggcattctagtgcttatatatccaaaactatatacaataggttaattctttcccaaaataaaacaggataaactcaaatttaattctcttatgcatgcacgccataaaaataaagaattcaatttgaggtgctttgttcagcatgttaaaatatttcctatgcccttggccaaatgacatccagccataatcatcctgttggcaatgtatgtatgtctccaaaatcatgtcaatttgattgataatgcagatctaaaccacactgtaatttcttgttggtaatttctgcttggatacgtatcaagtgtcccaaacggagatccaaaacacactgtaagacttaccagatctaaaccacctgaattttcttaggcaagttaaagagctcttctgatctgtgtgaagggaatgctacaatgttgtacttgaacaacataaatattactttaggacactgtatatgcgttaagttattcaaggtgccaagaaattgcatcatattttatcattttattctcttattgacgttgagccattctaaatactcatgtgacaattttgctagggaacattaagag

SEQ ID NO: 25478 - DNA, 351 bp, Glycine max
  Intron number 1 from transcript Glyma15g34750.2 (locus Gly ma15g34750) derived from phytozome v7.0 (chr-ID Gm15; pos 39246066 to 39246416)
tttaactgaggcaagttctaatgcttcagtttctaatttcattggtagtttcctcaatgattaacaggtctatcttgatattcttttcttgcataatatttttctgaatctgaaataaactcaaatgataataatatcttgttacttaatcttattccaatgtaataatatttgaaacctgctatcttggtggctcaagacattaatactgaaatatattaactaattaagggctagataccatcatgcttatagatatttgagaatgggatttaaaatatatgcattctaatataattatccatcaaaagaggcgtgttataagcttcagattttagtgtttgccttttc

SEQ ID NO: 25479 - DNA, 396 bp, Glycine max
  Intron number 1 from transcript Glyma15g10730.1 (locus Gly ma15g10730) derived from phytozome v7.0 (chr-ID Gm15; pos 7800408 to 7800803 reverse strand)
ttacctttgatttgttccaaatttgcttcaatcgggtacgtctggatcgttaaatactgttataactctggtttttctcttccgcgtctattggggatcttctgtgtattcaggggctgccaataatattgaaaatataattttctttgatcacttttctgatccgtgactgtgtgtagagtattgatatgtcattgaattcatttcggtactttcagttttctctctttttcatctgggtattttctaaatgctgtgagcactgggtcttggtagcttttgttttttttctatttctcttattttttttctgttcgattattgattgattgattgttttttctcaatctaaacgtttcaggaactcacatattctaggctgcaatactgagattc

SEQ ID NO: 25480 - DNA, 695 bp, Glycine max
  Intron number 3 from transcript Glyma15g15830.1 (locus Gly ma15g15830) derived from phytozome v7.0 (chr-ID Gm15; pos 12170009 to 12170703)
ttcaaggtgctgctttggaaatttgtgtaaaccttgttgtagaatggcatttggcaaactctgttgatttttataacttcgggtcatcttttgtttgctgaatgacatttataaaccaaatgtgttaatgttagatacatgaaacttagggtgtatgagtttagcaatttttctttgacattattatataaattttttacatctttcaatgtatttttcgatttgtggatggttaaatggatagtaagaacttgtgatgctagttggtactgctgaaatgttgcttggcaggtaacgtgtaatagaggaacttaggatattgtataactgatgaaagaggtagttttattatagtacttctgatgttgcattgaatctcactgtaactgggcaggattgtttgtgccatgtgaccttcttttctgtttttcattttacagctagcacctaatttagtgtttggagacataacattaattaatatctattggttaaatgctttccattttcaactaggttcatgatcctgtctacagttgtgttaattgtacttttgagtgtttattttgcttgctcctacaactctacaagtttcttttcactgaaggcatgattacattggttatttattgataatatagaatatttgtttaattaaatatttgattgttttaacccaggaggaaacttaccta

SEQ ID NO: 25481 - DNA, 831 bp, Glycine max
  Intron number 4 from transcript Glyma15g05740.1 (locus Gly ma15g05740) derived from phytozome v7.0 (chr-ID Gm15; pos 4060662 to 4061492 reverse strand)
aagtaatgtgctagcatttgctgcctttacagcaatttgtttttaaattatatctttagaaattagaatatatgaaaaatatcccgtaatatcaacattatatcttttagaatatcttaggtgatattggaggaatagtttccatatctcgttatagtttcatgatttgttttatttaatttgaatttagaatttcctgagtatagataggcatttgtgttttgtatcacattcatcatgtcattttttttacccaagaaaatattattcggaatctgtattttctctttttttctttccatacctaaatccctataatttgaacagtatctgtgtgttacctttgtagtctgtcttgccactattctgctgccgagttccttttccttggctgtatgatacaccagccttactttcaaatttcaatttgaaaattcaaattattttgggttctcctaagttcttttgtagcttgaagcaaatgccattcttgatttttggagaagttgtagttctttctgaatatattttgcttgccaggaaatttccactaatgatcattacaatgtaatatcttcttccttgtttatgtaacagtccaataagctcttcagtttagtctgatttttgttccatgcatcaagtgtttcctattacctttgcacattatgggattagtattttgtgatgctgatatgtattgtatccttcttattaaatatggtatgaaagctaacaattttgcttgatctgatgcttctgtcctctccacatgagtctttttggctacttttagatactgggatacaaggcagtcaaatccagtgcaca

SEQ ID NO: 25482 - DNA, 505 bp, Glycine max
  Intron number 4 from transcript Glyma13g17260.2 (locus Gly ma13g17260) derived from phytozome v7.0 (chr-ID Gm13; pos 21028496 to 21029000)
atagagtcttgataaaggtgtgttactctctagatctttgtttattttgatgttgaatgttaggaggagaattgcattggatagtttttcaatcatatattaggttgtttttggctaaacaacttaattaagcccttattcaataagttctaatcacagaagggttttttaccataaaatttgttagaataaggtgaaaaagagcttatttgataagctacaccaaaaagcgaattgaaataggccaaaaagagcttccaagagacataagatattttcgtaagcttaaataagttccccataagctcttccaattttcccccataatcatttaatgctcaaggtgtattgttgttctgcccattttgtatcttgttcttgccatattttgctacaaggctgtggcatttactgaacatggtttctgcttattttacatgcctgtggcaatgaattaatgatggtatctactgatttgtttaaatactccaggttgcagaagcgg

SEQ ID NO: 25483 - DNA, 619 bp, Glycine max
  Intron number 1 from transcript Glyma14g38490.1 (locus Gly ma14g38490) derived from phytozome v7.0 (chr-ID Gm14; pos 47618720 to 47619338 reverse strand)
tctgttacattttcgatactggcctaggattacaggtcaagagctggagaaattgtcgggagagtatcctttataattattaactagttctttatcccatgctttgtacatgagtaaatgtttatttttatatcatctcaatcagtaaacaattttttttaatatatatattatattttaaatttacaattaacaatttaaattgtgattggaggttacttttaaccattgagaatttcttttaaacaaaactataataattttttagaaatatagacaaaatagagttgattgtaatggatagatagttaagaagattcagtatacaaatacagatgagttctggagatggttgagaataatttttttgactagttgcaggggtagtgtgtgaaatacacttccaaaggagagaagagaaagaatattgaaaatgtctgattaagagagtctcattagttatgtattataatttataatataggcataggttttgcctgttacacatcgtctatgttatatataaatttgattcatcaccagtttcccttgatgttatcattacagtttgaagtctactatagtgccattgtttgagaaggtattgagtgccagtgat

SEQ ID NO: 25484 - DNA, 501 bp, Glycine max
  Intron number 1 from transcript Glyma13g32410.1 (locus Gly ma13g32410) derived from phytozome v7.0 (chr-ID Gm13; pos 34598623 to 34599123 reverse strand)
tgctgtagaagcacatcatatttccgagcattcaggtaataataggttaatatttcctagtgaaactgaaatgccagagttttgaagtgcttctgcttttactttcatcatgttatgattcagttagttgccataagcttttctttgccatgtctttgctaaataaattgttcaaagaatttagtctttctttccctcagaagttagaaataaagcctttagagggggattcaatatacttcacatcaaagaataaagaatggaaggaaagaggttctaaaagtgttcatcttaattaactataacatacttgccccaagtattagcccaattgctgaaattgttgagatcctttgtcagaaatttttgcatatcagggagagtttcttgggggctttgttgcaattaacatgtgatttatgcaaactaaagctagatgcgtttcatttcatatattgttttgcagtcactgaacttgaagaagattcatctagacagatt

SEQ ID NO: 25485 - DNA, 396 bp, Glycine max
  Intron number 2 from transcript Glyma13g07540.1 (locus Gly ma13g07540) derived from phytozome v7.0 (chr-ID Gm13; pos 7721607 to 7722002 reverse strand)
agtatcttggcaaactaaatcgtggtaaagtgtagttactttgattattattatgccttttcattcagagtgtaatttctattcactgtagtatataacattttacacgggtaactaatcagaaattatcattggtatttttttaagaaaaatactatcataaaagtcaaccaacttacgatgcatgacagttttttgattggatgataatgtaaaaatcttttacactgtcagggcatagactatttacactctcttattatccttctcttctagttgactagttcttctcaaatctcaaccacttaaacattgtgtttaactgggaaaagagcaagtttgtttcaaaggtgaatgtgttagtatttttatatgcaggagcaaaccaagaacctc

SEQ ID NO: 25486 - DNA, 843 bp, Glycine max
  Intron number 1 from transcript Glyma13g23410.1 (locus Gly ma13g23410) derived from phytozome v7.0 (chr-ID Gm13; pos 26818385 to 26819227)
cctctgaccagatcagtgttgtaaattcatctcctgtaaggaattccttcccctcatctttctctttcttctgttcctttatggggtgtctttttttttctttttttctttactgtacggtagtttgaatttgtaggccactctttcaattatgcttcggagacttcaatagtactttaattgccattgttcatgaatcttgttcactgttttttattttaaccttttgtgaagtcatggattcttctatttttaattagattttggtttgtgtctgcccatatggctgttaatcgcttgcttggattcttcttgggtatctgtggaagaagagaacttgctaatgaaatatgacctctaaaggttacttgatcttgaaattctctcagatgtgattatcaaaagggtggctaatgttagaattggttgtcggaaattagttcgtctccggggatggagattaactttgtgtacttggtaacatcaatgtggaaactgattgtgctgtcaattgaatcagcctgcattgcttgcatgtaaatcacgattggtgtttctaaatggttcttatttgttagcacaatttgttgattcataaaattgagtttggtgactttgtagatatgaaagtagttacatactgctgaaattgacacctggtacaatttcagaataatattcgtgtttgtgtactcgagaatactcatctgtttcttacttttcatgtttttcttgagtttgcttagcgtcttctgttagttaactttatttctctgcacaaggctcctatcatcttggctcatttgcatttttctgctgtggtacattttagctggaaagcat

SEQ ID NO: 25487 - DNA, 260 bp, Glycine max
  Intron number 2 from transcript Glyma15g18500.1 (locus Gly ma15g18500) derived from phytozome v7.0 (chr-ID Gm15; pos 15286681 to 15286940 reverse strand)
gagctgcttcctcaggttttttcttttttaaaaaacatatatttaatttttctttaatgtgaatggattgaagaggtggaaatttcataaatttcggaattgatatgttagtgttttacattttatttaaatatgttgtttgacattgaaatggtatgaattttctgtgatcattagctggtagtgtgtgtttgtgtaacccttattatgattttgatgttttagcaccgaagcaagaagaggtgaagcgtcttcctggt

SEQ ID NO: 25488 - DNA, 793 bp, Glycine max
  Intron number 1 from transcript Glyma13g42020.1 (locus Gly ma13g42020) derived from phytozome v7.0 (chr-ID Gm13; pos 42134565 to 42135357)
gcaactccgttgccttttcttattataattgttcacttttagacatgtttattttgataaaatggccaattctatagtttgtttttcttcttgcttttgctacaattaggtagcaatagtgagtataaacaagagttctaaggtgagggtcaaatttcattttgcctaaatacgtatacgtgtagcatagtgcatagtcagaaatgtccgtaccaaatcctagttcacaattaaagcacggttgttggtagaagcaattggggctacacatgttgctgttagttcatgaaatcgagataagtaacctgcaaagaacctgtttgcatataacattattcgtcaccgagattcgctcaacagcatcataagttcataatcctgacggttatatgtcattttgtctattcatgagtcagcacaaatgacaattgggaataaaaatacaacaacactttcagcaaagcaaatgttgttttccaatgcgatcatcatggacaacgatagaccaacctactcccaaccttaaaatgctgtcatgaacaacgcatgttttcaactctctcaaatctttcaaatacgaaattccaccgagtgcttctagttctaccaagttagacaatcagcattgcacctaaaccctggctttctccgctttaatttctcgttctctcgccatcaagtccatatacatcgttccagcatggagaagataaaaataaaactactcatgaaggatgaaacatttctccaacacccttttgttcttgctgttgttctggttttaggccttgtt

SEQ ID NO: 25489 - DNA, 338 bp, Glycine max
  Intron number 1 from transcript Glyma15g20200.1 (locus Gly ma15g20200) derived from phytozome v7.0 (chr-ID Gm15; pos 18001335 to 18001672 reverse strand)
accaccactttcccctccccgaacgcccctggcaggttatacgcttttccgtttgttagtttgctttttttaatttttaattattaatttttgttagaatgtgagttgaaaaattcgaatggggagtctctttctctttctgttagttagaatgaatgaataataaagcattttttctctgttagtcttttggggtgatatttggtattaatatcatgataataaaaatatgatataatttttattggagactgattttgttttctctttcttttctttgattaatttatcacaatttacaataattcacgcatattattctttatgtacaggtggcg

SEQ ID NO: 25490 - DNA, 200 bp, Glycine max
  Intron number 2 from transcript Glyma15g42010.1 (locus Gly ma15g42010) derived from phytozome v7.0 (chr-ID Gm15; pos 49323180 to 49323379 reverse strand)
ttgatcaccctgacctcaaaaatcacaagattcaggtgaagaattttacttttcttatctagtgctttttcttttgttcttgtttttatataattcaaaattcttaatctggttagctctcatttttgtttttctctttactttatttggttcaaacattaatttcaaaattcaaacaatcatatgccttggtgatgcag

SEQ ID NO: 25491 - DNA, 284 bp, Glycine max
  Intron number 2 from transcript Glyma13g25590.1 (locus Gly ma13g25590) derived from phytozome v7.0 (chr-ID Gm13; pos 28802312 to 28802595)
gtggtgttgtgtgctggtaatcattaattttattttattttgtgtacttttcacttcaggaaaattgtttttttcttcttctttcagttctgccattttaggacttttggggtatttgtgactgccatgtttgctaattatactgttctaactgctaaccaaatgtttagtttaaattatgttatcaattgccttttttgacaagagtcatctaaattttttgttttctcttatgtgcttttgcatcagacaaacacagttgctacaaggttgctaaactaggt

SEQ ID NO: 25492 - DNA, 857 bp, Glycine max
  Intron number 4 from transcript Glyma13g25590.1 (locus Gly ma13g25590) derived from phytozome v7.0 (chr-ID Gm13; pos 28803046 to 28803902)
ccatatcgtctctcttccccttcctttatttcgtgagtttaactatgtactggggtttactgttgttgcctttgcacttgatgtatagtctaattatgtgacattgttggaagttgtctgaacatattcttaaaagttgaagataagaagtgctcactcctctcaatcttcacatcatctctgttttggcatttcaaaaatgaatttaagtgtcaattcactgtttaatttaatcatcacttatacttgaagaaaatccttccctcaatactcaaattacttgtgtttcttggaatgtccattgccatgattaacttacatgaggaagggatgtttttgagctattttgaatggagagaaattgctattaatggaaagtgtgtcttattgcaaatagcaatttattctttggccaatgtgaatgaacttcactcctccaatgagactactttaataaattgcaattttggaatgcaaacaactaattagtggtctgaagaactgaataaggttcagtctaactaatcttaaagcctctctgagtcattaatcagaagattttctataatataccaattaccactcatcttttttctcaataataatatgccaatttctgttccctttcaaccgtataaatttgcagctgaaattgatagttacatgttagatgagccgaagagaatttttaattgcttgttgctctttgttctgctttttcatttgttatgaaatgctcaagaaatcaaatctttgttgatgtttaactttatgccaatgcacataatatgcatccttaataaatgcaacatttattttcaggtaagggattttaatattgcaaaaacagaagctga

SEQ ID NO: 25493 - DNA, 877 bp, Glycine max
  Intron number 1 from transcript Glyma13g10340.1 (locus Gly ma13g10340) derived from phytozome v7.0 (chr-ID Gm13; pos 12096085 to 12096961 reverse strand)
tctttttctcctctcttcgcatagttcaacttgaggtaaggtttttttttttttttttttttttttttttttttttttttttaaagagctaaagaaaataactttattaagcactagtttaaaagcacaagacgtgctataaactgtttcatcacaggagcacaaaacatatgtttcaattgcgaaacaggtacccggaaactcactcaacatataatactgaaatgccttcccacaatggcgctattccaacttcacagatcaacagataatgctaactacacactctgaatccatacttctcgagccaaattgattgttttccttctaaacatgaagttacctccactactttataattaataaatcataatacatgataaacaattataatctctgcacttagcacacgtgtacttttgccactgatttctgctaatcatgttgaggtaagttgggtgggggtttgattcttagttattaatttgatcttaaagtgggtcaaaagtagagagaaactgctttatctctctttaatttgctgagatagtttgtgtttaaaagcctattccatagaaatttagcattcatggtgctgtgaattaatgccctttatcaatgctttgattaacaaatttcttagtctaggtacatgcatcatgtgcattatataaatatatgtacacttatgagatttttagtatgtgattattagtatggggattgattattgagtattactacaagtggttgagcatcttcctattgagcagttaattatgcgtaaggctctttagttatatataaaaggaagggactgggattttttataagttgttgtgtgttggttaattcagaaattcggcggtgggaactg

SEQ ID NO: 25494 - DNA, 789 bp, Glycine max
  Intron number 2 from transcript Glyma14g15080.1 (locus Gly ma14g15080) derived from phytozome v7.0 (chr-ID Gm14; pos 15782960 to 15783748 reverse strand)
cccctgagttgcagaaagatttgaagttattaaaggtgcttttgaattttaacatatctaccttcctttctacaatgttttctgaatatggtcaaatatgatgttttgtgaaagtagcttggattaagctaataacataacgtacacatacattatattcaaaatgaaaagaattaatgaaagtgaaaacatcaaagtggatgattctgctttctcaaagtgatacggtaatagaggaacatttaggattttaatttttattattgttgtggaatgaaaatattaggtcctttttatgttctacttttgctttataagaaaccttctcattgtctgggacttggattatgtaggatgtaaatttagattcttgcttcttgctaattactgtatgtttcaatgattagtagtatttgctgcttcctttgtgcttttaccccatttaaaaccaattaaaattatcagccctgatctgtaaatgttgaagtgttaccttagaactcttctggaaacttccttgatgtggtgaaataagatgcatattattgtataaaatatcaagttaaactcacacaatggctatgtacatttgaggatgcaatgacaaatgttgagtcttattaaaagcatcagaaaaacaaagtcatgcagagatttgaatgtatctctaaatttgtgttgagctgtctagttttgttttgtgcaccagttcttatccttagacattaacaagcatgtatgttgatggttacagttgagggctgccctcgatccaaagcggcactacaa

SEQ ID NO: 25495 - DNA, 644 bp, Glycine max
  Intron number 1 from transcript Glyma14g39180.1 (locus Gly ma14g39180) derived from phytozome v7.0 (chr-ID Gm14; pos 48296354 to 48296997 reverse strand)
gagaggccttgacttgagcaaagaatttgtctgcagttgaacgcattcatacgcaaagtcacacttcctttatagcttactaccacctttcttaaacataagttttatctcaatcattaaacataattaaatatgcacttaaattcatcatatggttcctaaccagaaagcagtaaaaaaaaacaccacctccattattataaatcatgattcatgaccaaagcccctaatcttgaagtggaataattgtataatgatgcaaaaaaatatttatatccaagtcgtagcacagcatgccactgaatagaggcaatttggccttatacaaaaatttatgaagaaattcaaaaatagattgattgatatagattaaattataggagagaagtggtggaacattaacatatttaggaaataaaatcttaaaatatattataattttttcatctataaaactgaaatatagaagctaaattctgctgctaacaaaatgctggtagcacaaggttccgtgtgtgagttaaatacatatgaatctcttgaaaaaaacaagagcacaaaagaacttaatgcacatgagtctaagaaaatggatatattattgcgaagaaacaaaggaaataaccgttgtgagagagtgggca

SEQ ID NO: 25496 - DNA, 911 bp, Glycine max
  Intron number 2 from transcript Glyma13g34500.2 (locus Gly ma13g34500) derived from phytozome v7.0 (chr-ID Gm13; pos 36051872 to 36052782)
ttctctctattgctctgccgcctcctcttcttctggtaccttccatttctccctccccttttactttctcaactcttttcaggaactgggtatctttttttttttttttgtcaatttagctcaattttgacttgggttcatttggggcagttgttttgaagtggaaatgtagttgctttatctatatgcaatgcactgcagaattccatttatttagatgctgcttgttagcactgttcatttatgatgctagaaaagggtaattcggatatctaatgaagtatctatagggcttgttgaatgcttgaatttgattgaaattgaaggaaagaaggggaaaagaaaataatgttttttgaagagtaaatttagctgccatttgtgcccgaggttttaaattgcggttggccagtcgcggttgtggttttattgcgatccttgatattatagaaaactatggataaatgcagctaatgcggcttcaattgaagttgcggagaccccccaaaaccttgacattgtgatcataatcaagtttgcaaaccattttttataacctagaacccatttaacttagtttcacacatttgcaaattcttcaaaagggaggaagaatttctctgctgacattttttataacctagaaaccatttaacctagaagccatttaacctagtttcacaaattttttataacctagaagccatgtaacctagaaaccttgacattgttcagtgttcaaacaatcccattgaagagtattatgagcatttctctgctgccttcgttttttatctcttagttgcagacatgtccctgcaaatatatagaaattgacttggttgctgtgtttggtttttattttaattttattagatccactgttggttaaggctgctaggggagatcct

SEQ ID NO: 25497 - DNA, 615 bp, Glycine max
  Intron number 5 from transcript Glyma13g34500.2 (locus Gly ma13g34500) derived from phytozome v7.0 (chr-ID Gm13; pos 36053471 to 36054085)
ctggtcaaagtcatatatcaaagaggtaacagaaaaaaaaaatcctcatttctttcttgcctgatgaaattgtattttaatttttaaactttgcaatttggaattcttattattaagcctttgcttatgttataacagctttgactttaaccaagttctttatttaaaaagtaaaaaaaaatatgtagcttgctgagttttgcaacaattaacaagttttatatcaagctaatgttatactcttgcaaacttccaatcttcgatgatttttcttggttggttaactaggtaaaaatatgatcagatgatcagtttaaaggatttcatttgtaatttttctgggcaaatagaaaaaaaacttgtgacatgtgtgcattgattaagaaataagctcactagatgttggtattgtgctcttgactttgggggagaaaaatccaaatcagaggctactttattttttttatattttattgagattagtattgctggcagtatctttttacaatacataaactcaaggttggatactatattgccttactccttattttttccccttttagtcatgtattgctttctgaattttcagattgtaaatttggtcaagaaaaa

SEQ ID NO: 25498 - DNA, 897 bp, Glycine max
  Intron number 3 from transcript Glyma15g15900.1 (locus Gly ma15g15900) derived from phytozome v7.0 (chr-ID Gm15; pos 12235828 to 12236724 reverse strand)
atacagagcttttgtctgaggtatggatatgattcgtaatagttactatatcatagtggcctgttcattcaagtaagcccatagactggttcatttactagagtatatagggaaaatatgttcaacatgtaattttgacattatgtcatttatgtatcaggtaaaattgaccatgtaatttaccagtttgtcatgaaaagttatgcaactgtttatatcatcttatgcaacaatttgtgttggtgatggagaaaattgtaggctatacaaccagcaattgagacagtaatcttgattcttaatgtctgaaccttcctttagaacttttgttgaagttatttcttgtaattgtgcatgtttattctctgtgatcccgtgtagtcttgcatttagcttaactttcttttagtatgagtgcaaggtagtgtttgatcgagcttattctggccactcttctccttaaaaggacaagttaagccaaatggaattttataaaaaataagttttttaaaaaggttagggagcatttaggttgagaaaatgttttttgttttcacttttaattacaagaatgtcatgtatcaaaattttgtataaacacccaatgaaaacaacataacaaaaatattttctcaaactaaatgaccccttagttttaggagctttttggcttctacttttctttctccttcttcattcctaatcccaagatctaaggatacactactcaagaaattttaacttaataagtatttctaagcttaaaaatttataaaattaccaaaaagcttaacttttaatttaaaccctgtatttttaacttcagctttaaaatagctttcaagcacatttttgcttgcatgtgtttgtttttaatttttttcccctcttgtcagc

SEQ ID NO: 25499 - DNA, 762 bp, Glycine max
  Intron number 1 from transcript Glyma15g12850.1 (locus Gly ma15g12850) derived from phytozome v7.0 (chr-ID Gm15; pos 9511754 to 9512515 reverse strand)
tggggagagggggtgctgatatcaggttcctcctatcttctcctttcctgtttcaaaatctcagcttgttttgtttgttagttagttacttacttaatgtcggagaatgattgtagtttgaacaggaattacccaatattttattttgatatacaaatactaataaggaatgttttctatatggtattatattatatgttgcaacttgctacgaaatagtgtctgtattaagtatcaacttctactcctttataatatatgttcacccttgaattttttttacttttttagttagtcttattaagagagagaatttaattggaacacaggcacagtgtatagatttttatactgtaatctaatcttggatttatcatgtgtagggagattgttgatttttgttagaattattttaaaagtaattttttgagtgatttttgattggttgacagtgtcattgtatcaaaattaaactcttaaagaaaaaacttttttgagggtggtaacatacaccccattttggagtgagtggggtgataggaagatagagaatgaaagaaaaaaaaagaaaaggtagaaaatgaaagtaatagatgcgatgtaataggaaaggaagagagactaagaaggaaatagtgtgaaaaaagagttagaagacaaagtgagtgtgtttattattactactctttggtcattgcattgcctccatgccaatgcatagatttctactagcttctaaaccttttaccttgtattacaggt

SEQ ID NO: 25500 - DNA, 367 bp, Glycine max
  Intron number 3 from transcript Glyma17g03310.1 (locus Gly ma17g03310) derived from phytozome v7.0 (chr-ID Gm17; pos 2200395 to 2200761)
caattgacttggagacttactgactgtcatcctgggttagttagatataaacttagctgcactaccttttctctttttaaggctggcattaactgtgcgaattgtgaagacgaaactctaattttgattggagaacaaacactaaaaagcactgcatctaagtttggtttaatttattactgtattttaatggataatttaggacctaatgctctgtagattttaaaatctgtaactccatgatgattggacatggtgactccaatcaatgttactttgtggattttatgggttttagttcctgatttctctttcttgtttgttcaactcgactgcagaggtgtgagagccattgcatcttcagcaa

SEQ ID NO: 25501 - DNA, 809 bp, Glycine max
  Intron number 1 from transcript Glyma13g07210.1 (locus Gly ma13g07210) derived from phytozome v7.0 (chr-ID Gm13; pos 7377864 to 7378672)
actcttccctttctctttcttatccatctagacaagtcagttatgatgttgattctcaataaagggttggcaaaactaccataaactattttttaagcttatcattggtctcaaaatttggactaatcttattttgatgtggattcaattatatagagtttggcatgatgtcttacatatttgttttaagggataaaaaaattgtagacactataattgcattggcatttttactggtacactagtataactatttggtttagtttagaattagacatgttcttctcaaattttaatttttattcatttgtaatgattttttaaattattttaaaaaagaaatgcattctaagacgattatttgaaaaatcgtcttagaatacttaatgttttttttttaaaaaaaatacattctaagacggttctgtaacagaatcgtcttagaatttccatattctaagacggtattatcaaaaacccgtcttagaatcaacaatatattttatttttattttttaaaaatacattctaagacaatcatcctcgtcttagaatcctcgatatattttattgatttttataaaaaaaatacattttgagacggtcctctaaaaaactgttttaaaaagtcttagaatgatacctttttctaagacaattttttaggaaactgtcgtagaaagtaaaaattttctacgacattgataacaacggttaataacggacatatagaatgtccgaaataaccatcataaaaaagcatttttctagtagtgtgtcatttaccaaccattcaagtctgatattac

SEQ ID NO: 25502 - DNA, 644 bp, Glycine max
  Intron number 1 from transcript Glyma15g24070.1 (locus Gly ma15g24070) derived from phytozome v7.0 (chr-ID Gm15; pos 24625315 to 24625958 reverse strand)
cctgtactggttgcccttctacataaggcacacaggtaatcattattattatattacatgaaaaattatgatatatatagagttgcattgccttttatctaacatcagcatgttattcatatgcgaagaatttattactagtgtcttcatattcctgatatattgtctcaaggttttgtcactaggaatttggagtgcttgtttggtaggactgttatgtgatgtgtctttaggcagatatgaatttgtgtgacaggtattgcatggtgttttattagcatgtatggtgcaatttgaatctggagaaataattgtttatttttcaaaagctctctcagctagctgccaaaaaataagtgattatttctccaaaataaactgaacaagtcaagtaatatttatgtcatggcagtttctgtagtgtgtaatttttgttttgttctttgagagagaggctgtgttaaggcttaggcctgtgtattgtgctttctgttctacaattctggtttggtccagactttttttctataaaaatattcagtttttttgtgcaaacttaagtccaacattgtccatatatctctttacatgatctttactcaactgcaaatttggttttcattgcagctgttgcaggtgtgcat

SEQ ID NO: 25503 - DNA, 799 bp, Glycine max
  Intron number 1 from transcript Glyma15g17080.1 (locus Gly ma15g17080) derived from phytozome v7.0 (chr-ID Gm15; pos 13371341 to 13372139)
tttggtgtcaagtaccagattttgtgacagttggggtgagctgaggattggttttcaccttgtgcaattcttgaatttgcaattctagttttcaattttgaatttgatattattatgagttgaacatttttccaatcttatctgattttgcattcaaaaaatggattctgctaaaagtctttgccttgaccattttgaaccattgttttgtatgagttaggctgaaaagcaatagagtacaaaacttaggcgtggtatcatgattaggtgctttttggtgctgttctccaatgagaattcgagtttcaccttggtaatgcaaaccttaactatctggatcacctgatagtccaattctgattggagaacacattaaaagtactcatggaactgcatctaagttttgtccttgaaggtttttggtgatgttagttatattcttcttatcttctgtagtcggttttaataagctttgctttagtttgttaaggctaggccagagtagccttgtagattatattttgattctagaaattgggtttgtcaaatttttttctttcttcgaagatggcacggttggtgatggaaccactcattgaaatattcaactttgcttgcctttccagattttatatgttagtttggatccttggtttgagtaggcatggatttcgaaagagtttactttcaacttttgtgtgtgttttggtaactagtaactacagaatttcacattttgttaccgtgtttcttttttttaagggtagagtaactgcagaagtattgaactgtgcactaa

SEQ ID NO: 25504 - DNA, 982 bp, Glycine max
  Intron number 3 from transcript Glyma14g08760.1 (locus Gly ma14g08760) derived from phytozome v7.0 (chr-ID Gm14; pos 6764850 to 6765831 reverse strand)
ggtaattgaaccttatacacgacaattttgtacttactgttaccatttgcaacacagcttagtgaacttgggtataatttatgtaagagaatggaaatcactgtaattaattggcgctattctctaggcaaaacatatcagctgtgagaaagcttagctcacttgataattactcagtagctgaaaagaatgaaagggttaaagttgatgacttgaattcttggtctaacctgaaaagcttgtggtgtgaccaatttagtgaagaaataattttaaactatttttggagtatgtggtggtagtggagatgttgggctgataggcccgagacaagagcccacaactgatccgggtgggggatttgtgggctccgtcctgtggtatggaactttatgtttttgagttaggattttatgtacactataataatagttctataataataggaaagaagggtacttgctaggattctctgtagtagatacaccacagctgtaatcctggccttgggttcagctggtatctaatactaacctctaggatagtattggtaccagctgtgtatatctctatggtttgtattttcagtacccctggtactttgcatatattataattacctatttttgctgagcaaaaaaataaaataatagttctataataactgctctttttttttgttttccttgtaccaattttgatagtgaattattttttctttgaccgtagtttttttccttctgtcaatggttttctagttttaatgtgtgttcatttttaataataataatatttaaataattattttgtgtgttgcacactgtccatttcaaaccaagtacaggttaatttatcctgtgattttctcgttgtcatgtacctcagtgtgtgttgtccgtaacttacatgtgtctgcacaaatgtggtatgagtttaccatacctataataaattacagagatttctttttgacagaaataat

SEQ ID NO: 25505 - DNA, 721 bp, Glycine max
  Intron number 2 from transcript Glyma13g18540.1 (locus Gly ma13g18540) derived from phytozome v7.0 (chr-ID Gm13; pos 22182479 to 22183199)
cattgccttcaatcgccgtggcacccttcttgctggtaacccctttctctctgcctctcttattttcatattcaactgctgctctgtcctttctgggtattctcctttgatgcattttcgtgcaaagtttttatcttttgatttttggtagcctgtgtttatggtaataatttggttttggaaaatgggttgtgggtaaaaaactgagttttatgttttttaatgtcgatttcaaggttgaagtagcgaactttagtgagtaattccctttttccctgatgacccagataagaaaaggacgttatttttactcagattgtatgtatagggtgtttttttggacactttttcttgtggggtttatgtggaattttgggattctagcatcaaggccggagtcctgtttttaattttttcatgccttggcttggcgatgaagaaatattaaagggtatgcatacatgtttccctaacgtagtaatgatgcaattgatgctcaatgcattggataaacgtgtgtatgatgtagttgatgtttactttaccattatactggaataagtttgtgaggcaataatgggtttgtgtgctatttgttcgaatgtgggtggcgtaaatattatagcaagtgttgaactactattaaatatttattggagttattttcaatatcaattttctcacttttgatcttgatttgctcaattgaaccaccagctgg

SEQ ID NO: 25506 - DNA, 721 bp, Glycine max
  Intron number 1 from transcript Glyma16g29750.1 (locus Gly ma16g29750) derived from phytozome v7.0 (chr-ID Gm16; pos 33455799 to 33456519 reverse strand)
ttttcttgcgtgaactcatcagcaacgcttctgatgtaagcctcttttattatccctcactcactcttcctagtctctgttttttttttatgattcgaattaaaaagaaatcaccagttttatagcacatgaaatcattcaatcaatcacgtgtttttttaatgaatgtgacactggttgtactgtgttgtttttgttcgagcattattgctttggtctattagattctcgaaccatgaattgatttgattgatggagtacacgattaacaaaaattgaagtttctttctcatattatatgtgaccattagaataagcttttatcaggtgatagttgaattttgattagagaacaacacaaaaaaactaattctttaaaattgtgcctttcaaggtttaatactagatagtacattatttaatatcgtctcttgaaataattgtaccaatattgcttaaaataagggtcttcttaactagaattcttaagacgttagttaaaggaattacattgatagaatttactatataaattataggagagcataaaaaatttctgcatttttatttctaagtttcttaaccaatgtcttttgggcatgtttaacatttgtctttcaaataattcaacgtgttctttatttttctaacagtgtttggaattgtttttatttggcttcatgtaggctttggataagattcgatttgagagtttaaccga

SEQ ID NO: 25507 - DNA, 487 bp, Glycine max
  Intron number 1 from transcript Glyma17g03950.1 (locus Gly ma17g03950) derived from phytozome v7.0 (chr-ID Gm17; pos 2604585 to 2605071)
gaagatcatcaagaccaagacaagactaagaaacagtaagtaatgataataccaataataataacttaattattttcttaattttttttatttgttttcttgaaaaaaaaggaatgaattctgtatgtcattcaatgtgtttgtgtcaaataataataataataaaaataataatgaaattaaacgaggatagagtcggttacagttgctaacaaacagggttgctgagtggtgacaattgatggaagatatattaggaggccgtttttgtgtatgttcattgaacttaaaaataatgggttttcgttataatgtcatttctctccgatttcatcttcttttacttaattttgatttcttatgtttgttgttattataatgaaacccaacaaaaacaaaaacaaaaaaacatgccaataattattggttttttgctcaaattccatgcttaggctcaagccaaaaaagaagaaccaaaaaaagcaaa

SEQ ID NO: 25508 - DNA, 329 bp, Glycine max
  Intron number 3 from transcript Glyma16g33380.1 (locus Gly ma16g33380) derived from phytozome v7.0 (chr-ID Gm16; pos 36316496 to 36316824 reverse strand)
ctattattcaggcggcggaggtattgcagatttccaactgattctttttggataattttttctataagcatttataggagaagaaaataagaagataaaatgaattgaacctctttcatgaactaaaatcaacttatgcacttaacttttataaaatttcttttgtccaacttttccagaagctgaaatgcgtaagttttgattttagcagctttatgggagaagtccaattcaatttagagaaatttacccaaacaagactttaccagttgctattattgttcacttgtttctaatctaatattgttgatgatgccaggctgttgctg

SEQ ID NO: 25509 - DNA, 565 bp, Glycine max
  Intron number 1 from transcript Glyma16g24570.1 (locus Gly ma16g24570) derived from phytozome v7.0 (chr-ID Gm16; pos 28547978 to 28548542)
tcataggtttccttgatcattttggtcaacatcaggtaacacaattgttctctagttcattttgtgtggccaagtctcagaatttgattgagcaacaataaacctacaccaatttttatgacacttcttataattcattttgcttgacattttttttcttttcttcgtgtctcttttctaatgggataaactatgtttttcggttcctataattttggtgaaacttgattgtagtctccgaacttcaactttaatcaatttagtaagtgaactttataaaagcagtgatttttgttccttctcaaagtgaaaaccgtatgtgaggagggaggaaaataacttcttttaaaaagatcaggaaccaaattgttcaaagttagagcatagggagtttttactgaaaatacagagaataaaaaaatattttactctatattttgttgtattttttttttgtttgagtatgattgtgctttctttcttttttattttttttctttctttttctttaaccacattgaataatataggcatttattgttggatctgattggggagcagtcat

SEQ ID NO: 25510 - DNA, 383 bp, Glycine max
  Intron number 2 from transcript Glyma15g00690.1 (locus Gly ma15g00690) derived from phytozome v7.0 (chr-ID Gm15; pos 401434 to 401816)
tggcaacacaacctccccaactcagacagaagaaggtacaacacaattgcttttgccttgtctggttgttttctctttcaagtatgcttcttctatctttgtgttgatgtgaagctctttttggtcacataaataaatttcctatcttttggactttttaacaattgttcttcattgttattattcattagtcattactatgtgctagatcttcaagttgttgttggtggagaacctttttgttttttagttcattagaaagttcttttttgtttttgacttaggtttgtctcttttggaggatatcttatcctcctctatagttctaattttttccaaaaatgcttcttttatcaaaattataacccctttgatttttaggt

SEQ ID NO: 25511 - DNA, 395 bp, Glycine max
  Intron number 3 from transcript Glyma14g20110.1 (locus Gly ma14g20110) derived from phytozome v7.0 (chr-ID Gm14; pos 23218775 to 23219169 reverse strand)
tacaggactctcttcctcctcgacccttggaagaggtttttcttcaattttttttattttaaaaatattttagtttatgttatggaagaaaaaatgcttttaggaaacaatttacattatgtggctttaataaaaagagccccacatattttttgagcattgtagatgatttttgttcattaacctagtacaagaattcaaagttttttctttttgtgcttctgttggctgtgaaattctgactttgctgctgaaaatggaactgttagtttggactccacagtccatgaacaagaataagggccctcattttctaacccgcttgagaatttcaatttatttctcaagtcactatgctactagacttctgaatttagtttatatatgcaaggtct

SEQ ID NO: 25512 - DNA, 594 bp, Glycine max
  Intron number 1 from transcript Glyma13g28800.1 (locus Gly ma13g28800) derived from phytozome v7.0 (chr-ID Gm13; pos 31770505 to 31771098)
gggaagagggtcctgaaatgtgagtcctttttaccctacaatacatagctaggatcttttagtttttggatatagagtatagacaacagatatcctctacgaaagacaatagtgtttgagtagggtagaattgttatggtccactaaagtttccatctgattatttaacacagctacataccaggtctcgaacttgagcccactagttgaactagaataattatttgccgattgattcacgtgcttggttgtggttgtttggtttgagaaaaatattttctgtattcattttatgcttttaccatacaaagttttgagaggaagaaatgaaatgaaaataaggtgttatactggtatctttgtgcttaaaaatgaaaacagaagccattttttcaaactgaagggttccttagttgtctacatgtgaaggatgcaatttgttttggtaacataagaactaccatttgtgtattgcattctgaaagaaagaaaaaaaaaacaagtttgttttgagtttgttggaatcatttgagttcatagaatggtggtttcttttgatcaggtggttggagttagaactcaagctggttgcgg

SEQ ID NO: 25513 - DNA, 846 bp, Glycine max
  Intron number 1 from transcript Glyma13g33440.1 (locus Gly ma13g33440) derived from phytozome v7.0 (chr-ID Gm13; pos 35283767 to 35284612 reverse strand)
agagaaacagaaacgagtttcagcatcattgtccagtcaaattcaacatcagttactttccataatgtcatcactggctgctgatttggtttccttgttgtatccataagaaacaaaattccccaataataagaataatatagagtcattgaaatgttactttttggtttctacgtccctcatttcacctccacagtgtaaagtatatgctttctgcagaaaacagcatgaatctgattagtttggagctctgaagcagtcttctctatgctgtgcttcctttcatgcactccttgagcctttgaccattgcatgcaactctggtcacttgatcagagacacaacctttttacatgagattgagatcaaaatggtatgtgagttcaccttggtatctgtaattcagtgtctcacgcaggttttgcaatttctttatttatcattttttcacttcagaattttcattttttttaccactttaatgcaggacttatgttgggtttgaatgctttaaggctcttgacacaagtaagggagatggttgttgtaagattttgggtttctctagatactcgaaaactttgatctttccttgtttatttagattttttttacgtttttttggttccggcttaaaatgtcaagttttagcacccaatcttactcggcttgaccaggattgtgtcttgtggaagatacctgcaatctcatacaaaaaaatgttagactttcctaggaaaactcagaaacaaggaatgaaatgtaagagaggaaaagagaaagctccagtcaaagaagaaaacataaacacattgaggaaaattataactgtgtacactgaccctg

SEQ ID NO: 25514 - DNA, 763 bp, Glycine max
  Intron number 2 from transcript Glyma16g07970.1 (locus Gly ma16g07970) derived from phytozome v7.0 (chr-ID Gm16; pos 7218896 to 7219658)
gcctgcattgagcaaaggatttttgcttccagaaggtatagactctcctcgcgacatgttattaactggttattttgagttgagtttcgatcagaagtatcttgtgcaatgccggttggtgtaaataaaaaatggccctcttggacatatttgaactcttctttgtgtcaattaatttttttcctttgcaacatgttttgtttcctttacattaaacaatctgattacttcctccctctttgattattatatgactgaaacttttacatttgaaaaagtcttaacttagggggatgaattctcagttagtcagctagtaggaagggatatttcccgtttgaggatccttatagggaggtagagatgggagtatgtgagggagattttggcactctgttattttcttaaataagacgcttagaagttctttgcattctctagaggagccaggctctgggattactagggaatacttttccttgtaatatttctgtttacaatatataatatatatactctttccattttgaaatctcagtccctaacagattgaactgggtacacagtataatacttgcattaggagtatttcatttccttgtggttcaaatattgtagatagatgggtctacttatttttatgtttcctttcttccatattttagctttttccttgtttgcaaagtttatttaatgagttgttgctgaaacaaattttcaacatgcagctgctgcccggcttccatcctttcatacctgtgtt

SEQ ID NO: 25515 - DNA, 914 bp, Glycine max
  Intron number 1 from transcript Glyma13g05120.1 (locus Gly ma13g05120) derived from phytozome v7.0 (chr-ID Gm13; pos 5385865 to 5386778)
gaaagcgaactactttttgtcctttgattttttttgtacgtaattgtcgtgttatgatcttgaattatgttctttcaatcttttttgtcgatggggttgcgttcatttttgtgttttactttctgggatcagctcaaaattgcatttttcttcttttttttgtgtggggggattgatttttctttgcagtttttacacatgtaatttgggtaacttttacgtttcttggattcgaagttttggttgataattcgggtttcactgtttctgacttttagggttctgttttactttgtctggaatctcgatgttttttttttctgcataattcttagggaaataaaaggagtatgtggatttctaatccaaatgagtatttgtgaaaagttgaaaactgagtttttgttcttggattggcaaattgatttttattttgccttctgtttcgttagtcttttgttttggtttttattcccctcaaaaagtcatttatgttggataaactcaattattttactgtagtattgtaataaattcaatattttatttggtatgaatttttttttcttgagtatttctttatcttatacttaggtttttggctgagtctttggttcatgttgacttttttcccactgttttgttgcaattacatttatgaagttttggaacttgtaagtccattcctggtggcgctgtttcatttttctcgtctaataatatatgcagtatagctaactatatatctttctatagtaactggtgttttcagattttactatatcactttcttgataaactggtaatgtgaattctgaaagttaaaacagattcaggggagcaaaatactaattttcaccaagcttaatctagtttgatgagtagtgagtggtattctattgcaggattgaaag

SEQ ID NO: 25516 - DNA, 570 bp, Glycine max
  Intron number 2 from transcript Glyma13g05120.1 (locus Gly ma13g05120) derived from phytozome v7.0 (chr-ID Gm13; pos 5386952 to 5387521)
tgagacgaaaaccaaggtatcatactggtttcttttttctacctactttgtttcatggaatcatggtgctattatttagtttgtctttctctcacctgaaatcatattgttttgttaataatttcatatgatttctagttactttgtttactatcatgaacgttctgttcggtgcttaacattaggcattgacacaaataacaattttccaacaagatttatctgtgtttttcactatttctaatttgacattttttttacttaacagagatttttattgtaatatatcattactggttatcattggtctatgtaatggttaaagttttctgtaaattgagattgaattttgaatgctcttcttatttcagtcgttcctatttcccctggtcaatttatttctttggatttatggttcaggaattcctctttgcttcgaatatttcatttttactaagatttagaaaagatattctaaaatcctttcattctacttatggatgatatttcatatgtaatttattatgatctgttattagagtttgactctgtcattaacttgttaggaca

SEQ ID NO: 25517 - DNA, 765 bp, Glycine max
  Intron number 1 from transcript Glyma13g24920.1 (locus Gly ma13g24920) derived from phytozome v7.0 (chr-ID Gm13; pos 28209935 to 28210699 reverse strand)
aaaacggattcatctgtgaagctattctcaggtcattgtccaagttcgactatttatgtttgttcaagtttccttgtgtttgcaaacttattcaatttgcctcagtataacatattcttacccattcaccctccccttcatatggtgttaagttttaatagtttttggcctttttggaagaggagtgctagcaataaattctctaacacactttttatgttggttaaattataatttattagaaactacaaaaatcatgaatgtgactcattaaataagaagtgagacccataaatttctgtgatttcttataaatttcagcctatgatagattatgtgttcaaaagggcatgttactagcaattctgtttttttggaattcaaaagattctcaacttgataacttgatggtgccattatagtggaattactattattgattatcttttcacctaagttcagagttaagtaacccaaagggttggtgcaatggtataaggctccattgcgtttacatgagtgagaaggatccttttagcgggagaacccgtgtccgattcccatcacgtgtaaaattcccatggccagcggcagccatacacagtgggtgggggattagtcttgacctaggaccaaaaaaaagttcagagataagtggggtagagaaatggtatttagtttttgagtatttacttagtagttttaacagacatatatcttaaaatattaggtctcttctgcctcttgcgaagaaatacgtcatac

SEQ ID NO: 25518 - DNA, 380 bp, Glycine max
  Intron number 2 from transcript Glyma13g39920.1 (locus Gly ma13g39920) derived from phytozome v7.0 (chr-ID Gm13; pos 40464347 to 40464726 reverse strand)
ccactattaagaataggggccacgacatcaaggtgaataaataaattaactaattaaatttagttaggacttgtatatatttattgaaatcaccaaggtataacaaagaaccttccaatgaaatgttcttatactactgagtgctttgattaattgaggtaaaattgtttgaacttaataaaaggttttgattatgttaaatatttggaagaaatttttttggtatgtataataattttatttgatttaagtctaatattctcgtggttgataaaaaaaatgatatgtgtttatgtctccctaattaattagaaattaatttccatccaactaattaaccaactattgggtgatttaatttgtgtgtgaatgcagctaga

SEQ ID NO: 25519 - DNA, 435 bp, Glycine max
  Intron number 1 from transcript Glyma15g30110.1 (locus Gly ma15g30110) derived from phytozome v7.0 (chr-ID Gm15; pos 33274507 to 33274941 reverse strand)
caacgaatcgatcaaacactggacttgtaccataggtaattaatcttcttactatatttattggtgtacgaactttttactatattaatacacaaacgaaaattgctagctgtatcaaaaaagaaaaaaaaaaacgaaaatcgctagattatattttttcctaatttcaaatatatttttagaatttataattctctttgtttaaattttgaatttcttgctacaatttattttggttaaagaatattgtttcttgatacatgaactaaaaccacaaaatagcaggacactgtggtaagattaatttcgtaatgagtttttaaattatagataataacattcaaatataggaaaacaattattaaagtattttattgtttgtataattctgatacaatgtttttgttattggttttgttgcttgtaaaacaacag

SEQ ID NO: 25520 - DNA, 378 bp, Glycine max
  Intron number 3 from transcript Glyma15g19170.1 (locus Gly ma15g19170) derived from phytozome v7.0 (chr-ID Gm15; pos 16292157 to 16292534)
tttccacagtaacgaaacttcaagaacataagaaggtacttgactcttgaacctccatttagtatttaacacaccaaaattatatttaaagttctttcatagttcatttttagcataatgattaaatcaaaattgatatctgacttaataattgactaatgttttaacaattattgattacagtcatagagttttataatgtaactatatgctagaatagcggcataagtgttttttgaaaaagcattctcttccctagtttcctaggaaatgctagaatttgtgagcctccgcatcatgttaatattttttgtagtagttaaattaaagcttttgaaaacaggttatcactggcatcgcacttcctgttggatccga

SEQ ID NO: 25521 - DNA, 805 bp, Glycine max
  Intron number 2 from transcript Glyma13g07490.1 (locus Gly ma13g07490) derived from phytozome v7.0 (chr-ID Gm13; pos 7656001 to 7656805)
attcccttggtgatctagtccccttcagcaacaaggtatgttactttttggtctttgtttaatactacctgcaaattttatgagcctttgttcattttacatatgaacttttattagtagtgaaagcataactttttgtattttcttttttcatttcaccttattatatttaatttaaaattccagtcttgggtttaagctaaaaagtcacctttttttgtcgtttgctttaactaaagtaaaagggtgttcatgcctgaatttggattccctcttttcatttttccacatattcacacatttagtaacttgaaccataggataaaaaattaggtgattcatatttgtaatttagtaaatcagacttaaaataaacattcagaatctgagttgtccgattttacatctaactgttactaatattctaattgtgtgaatgtgtggaagtatccactgcacttagtaaatcagatttaaaacaacagcattcaaaatctgagtcgtttgatcttcattcaaccgttacaaatgtactaattgcttgaatgtgtgaattatttttttatgggcaaatgcttgttagtttgttagtttttgttagtgagatgattggaaccatggcctcttcctcccccgttctccctttaaccaccaagtcgatcttataactgcacaaatgtgtgaaaaattgactaaactaaatcttgttcagttcaggttttgtttgtttaattcttcaattttgtgtatctttttggtattggttttttttatatttattttggatcatgcagttgtattctgg

SEQ ID NO: 25522 - DNA, 470 bp, Glycine max
  Intron number 1 from transcript Glyma15g20500.1 (locus Gly ma15g20500) derived from phytozome v7.0 (chr-ID Gm15; pos 18356771 to 18357240 reverse strand)
gctggaccactttcagatctgcaactctaggtgaagcctttgcacccttttcaaattttgtgcaattaataatttagcatgcattggttaccccttggcacagggctgagaagtaacagaacaaaaaagttaacggatctttgtctgtctaagtagctcttttttagaagaaattactacataatctaagacgcgtgatcttcgtcaatctcattcgttacatgtatgccaacatcacgtaatcctagactatataataatataacaagaagatctagtttaattcattgaccaaagtacacgagtaattataaattttcttatacatgttttgataaaaaaaaaactgtaaaataatatcttcttgtttagtgatttgattattgcttgtttatgtcaatttttctctaaagtggccaaaatggaaattacatgattatgttctctatgtttttcagctgtctttggtg

SEQ ID NO: 25523 - DNA, 700 bp, Glycine max
  Intron number 2 from transcript Glyma16g05240.1 (locus Gly ma16g05240) derived from phytozome v7.0 (chr-ID Gm16; pos 4544598 to 4545297)
ttgaggtacgttaacttttttcttttaacccccttatctgttgctctctcgagtttcctttattggattgaagtggttctgcttgtgcctaaaggaggtataaaagttggtcgttttggttcaatgtagtgatgctccaatatacaatttgaagttcatcatttccttctgtactgtagccaatgccttccttggcattttatcttccaaatgtgatgttttatatttaacatccctcttctgccaacagattaatgttacttccacagtagcttgatagaccttagactgttaatactcgtgacattggcaaataggaatattttagaaaatcagaaaaaaacttttgaaaatatgggttacttttaaagcttttttataatgttaactattaatggctctctctttagatcaactcgatactgctgtgtgatagggtttactagcttatgaaattggttggtggataagaatatcaagaaagtttgagagtttgtcaaacactaaggcatgaactccatggatatttgaatttcttctttatactgtaaatttatatttatctcacattttctgttttgtattcctaccctgtcactgttatatgcttgaacatagcaggtaactatatgttcattttatgtgtagactgtttcttattaattctttcactttgatcattgcaggcctttttcaagcg

SEQ ID NO: 25524 - DNA, 630 bp, Glycine max
  Intron number 1 from transcript Glyma13g07400.2 (locus Gly ma13g07400) derived from phytozome v7.0 (chr-ID Gm13; pos 7512827 to 7513456)
cccacttcaagcgcaagttctaccagcgctacgttgtgcgtttctttcttttcttttctctccaaaccccgtctcttaatttcccctctcgcgtttcaattgtgtaattaagtttcgattttttcgccgtttggccaattgggtcatcctcctttcttgcaatggggttttggggctcctgccaaaaaaaaaaaaattactttattttttatcattaataatagtgctgtggagtgtgtttgtcatgggaatttgttttaagttcactgaatttgttaattgattgtgtgtaactatcggattgttcgtgaacttcagtaaattaaggaatattcatgtgaattcattgttttgtgtttatttgtgaattctttttgggggtaacatctatagtttatcctagtaattgttgctgcaaatgtctaagaggagtgttcgagatgccatattggttagtgctattcccaaaatagtgtatattagtgggagctaccaatatacaagatttcatattttgatgctgcatagtgtgtaagttgtatcaggagaatttgtgttattttcattgacttggtaaattggttgtaactgtcggattctgaacaggatcctgattttgtggtggagcca

SEQ ID NO: 25525 - DNA, 668 bp, Glycine max
  Intron number 2 from transcript Glyma16g27020.2 (locus Gly ma16g27020) derived from phytozome v7.0 (chr-ID Gm16; pos 31079700 to 31080367 reverse strand)
gctgcaactccactggttctctcttctcttctcttcatgaatgattatcatcatcaaacttttacaatttcctcttacacctatcttttgtaggaaaatgaaaaagggagggtttaaaattgtaaaataggaagattgacaatagttgaaaagaaagcctggctggattcagttttggattgacttgctttgtgtgtgtgcataatggtttataattcaattatagaacttatgaaaaaggaatttgattgaaatacactttctgtgcaagggcttttttatattatcatccaatcatggattgtcatatagttaaaaattattgacttttgtaataattacttttaagttcatatgtctagagtagggattataaggttgtcttggtgctgaaggaagaagggaggggggagaggtcgtgagtttgaatccccaactaacaaaaactaacaaactatcaactaacatttgctgatgaaaaaaagttcatatatctagagtgatttctactaattgattgaaatgtaatatcaaaattatacatataaaatttttttttttccttctgaaaggtaatctaagttaaacatgcaactgtttcaattaaatttttttagttttaacctcctctaccccaggtcctcacttcaatccgttcaagaaggatc

SEQ ID NO: 25526 - DNA, 663 bp, Glycine max
  Intron number 1 from transcript Glyma15g40590.2 (locus Gly ma15g40590) derived from phytozome v7.0 (chr-ID Gm15; pos 47582811 to 47583473)
gacccacaacttttccggcgaccaaccgtgcgcaggttttttttctcgttttttcttgtttctttttttcttcgtcaactgtttttctttgctttttcttctcttctcaaatgttcttcatctggtattctgtttatgctggtgctctgtttttctgaaatttcagtttttcatctcaattctgtttttttttattaatttcagattttcaattatgtgctttaataaattcagaatgtattattcgtttgctgtcctgaggtttgtccaaattgttttttttttcagttatagccttataaaatcttggtgtttttattaattatgtttatgactttgtgatgactgaaattatgaattttatgaattgtgtcattgaggaccaagtggccatgcgtatccctgccccaaccaaggataacacaactctttagagattgaataaattgtgttggacttaattatgcaacaccccttcatggctcattttgtcaacactagtgttttgaaaatgtttgactgatatgtgagttgtggcatcatatttttgctctacctgattttagctgtttctcaatgtgtacatttgcattgtttaattgatattttgacactgaagcttctacaggtgcaaggataagtgtgtgatctatctataaacgc

SEQ ID NO: 25527 - DNA, 921 bp, Glycine max
  Intron number 1 from transcript Glyma13g38590.1 (locus Gly ma13g38590) derived from phytozome v7.0 (chr-ID Gm13; pos 39362710 to 39363630)
ggtaaatctagtttctctctcgtttatctgttacttcgggggatattcgatgctctcaaactatgcactaagcaatgatttcgaattccaagtgtatatctgaagaatgaattgatggtgactgtgataccctagggctagagctttgtgatatcatatttcagatatttattatttacttgtgtattacctacttattaatagtaaaaaaaatctcttaaaaaaattatataataaaaaatcgtctaagctataagtttagtttatttttgaaatagtcgtcttttatattattagtaaacaactaaacatgaaaaagaaaaatagagataagtgtatgcgtgtaaagagtttctaaatccagtaataaaccattatttacaaatgtttgtttgactttttctcataactaactattttgaaattcataccaatagatagatttctgactgcttgattgtgtaaaatttattacagtgtacgaaaattaaattcaaagaataatttttttactcaaatcaaactaccattaaacatatattcactttttagtttgactgtcatttttttatctgcaaaataatatcatttttttagtttaattatcatacactatcaatgtatataaaaaattatttttggaatataaaagccaataatttttctttagcaaatatatgattagatggcagggtaaaaagtaaaaactgttactctgtcaatgcattttaattaaattcttcatttttaaggagaaaataatttttatctacgataaaattgaaccaaatgctgaaatgcacgctaaatatatggaccaatttgtttgatttgaagggtttctttcttgtataatagttgtggcatttgatttgttgacatatgaagatgtgagcagggtttgtgctgttcttgtctctg

SEQ ID NO: 25528 - DNA, 935 bp, Glycine max
  Intron number 3 from transcript Glyma13g04360.1 (locus Gly ma13g04360) derived from phytozome v7.0 (chr-ID Gm13; pos 4702599 to 4703533)
cttgctgtcatttgcaggttcgctaccctatcttgaattatactatttgacattctatttttgttttttttttttgcttttatgtttagttttcatttttctatttgactagttgacttgaggacaatatatgcatcatacataagagttttttttttattttttttatagtatcaactatcaacaaatcggaattcatattaggcattacttttaaggtaaatactctaaaagtcaactaatttactgattggatgacactctaaactttagtaaaatagacaatttacacttaaaataatgtatcaagcttacttcatatctttaaagaaaaggaaaaaataaaatttttatattagtatatggcagaagtacaactcctggccgagctgtttcattattgagaatgtgaaccccacattgactttacccttttggtgattggtatataatttcaaaaaaacagaggaaagtatatagtgtttgatatactttttctatcatacttcgttattgagtaaagtggttttcattagagagtggaaccagtatttctttctaaatgaaactgacactaagttcatccaataatagtgtactaaagaaaagggatttgatttcagtagaaagtgcgtaaaggaagaaagtaacaaagtgcacctaatcaatttaaactagaatacctcatagatttaactcaagtcaaggatgaatgcacttttattttccttactttaaagaatgcatggagtatgtataagaatatgagttcaattagaaagcactgacagtctacaaatttttacttttgacattcaatcatagattgtaaactgttgattataataactacttattagtaatcaattttaattttactaacaggcacattcttattttgttttttctttccctattaccaccacaaattaagg

SEQ ID NO: 25529 - DNA, 624 bp, Glycine max
  Intron number 1 from transcript Glyma16g05620.1 (locus Gly ma16g05620) derived from phytozome v7.0 (chr-ID Gm16; pos 4968757 to 4969380 reverse strand)
tgtttaccaaacagtgccttgggagctgccaggaggttggtctagaacacaaacacaaatcctttctttccatttgctttaaaaaaagttatgcttttttttaaccatctgactctctagtgggactcgtataaatactttttggtcttttggatcgattataaaattaataactgaagtttagctatatttaaaattttgttgataatacacttgaatttgtgtgaaatgacttatagtcgattttcataaaatatatccttaaaaagaaatggtgagtctcaagtgtcactaagtcatccgagtaattatgatgattgttaataaaagacaattattcttctttaaagatctgttttgccggaatcaaccaagcccttcctacaaattcaaaattcaaagtgttttgttaacctagtcatttattggttttttatggttcttttgtcagtaaacaatgtgtcttgccttaaaaaaaatccaatttttccatgccccatgaatgaacaaacggttggatataaaaaaatggtgtgtttttggtcgagtttaatctgtgtttgttttcctaactgtgttttcttcataggtggtagtaagaatttgaattggcagaggtttttc

SEQ ID NO: 25530 - DNA, 778 bp, Glycine max
  Intron number 1 from transcript Glyma14g02320.1 (locus Gly ma14g02320) derived from phytozome v7.0 (chr-ID Gm14; pos 1399722 to 1400499 reverse strand)
ccgccgttgctctttctctcttccttggccttaaggttcttcatttttgttccttcacttctgggcttctcttacttttcataaaaatatcttttttttttccttctttgttatagatgtaatgtaacacttactgttttactataagacccacgtgcatttatgtatttagttatctatgctttcggaaatgtgttctttttagtcatagtgtgggtccaattttgctaattattcgcgtttattaaatagtgtctcttggtcttaagattgatgttacttctgcctagtgcccttcctctcagctgcttcaattttgtttttggaaatttgcaaacattcaccccattttggtgtggaacaagagagataggaagaataaacaaaagcagaggcacaaagggatagaagtaacaagtaatgtgatggaaagtatagagaaagatagagagagataggatgaaaaatgatgtggaataagagaaatttagtgaatgtttataattattctttgattttttttgttggttttgataaaataaaaaacaatttttatgagaggggtggtggtggactagtggtgaatgcaacaacccgtttacctcattcagaaatttgctataggattcacacgcataattgcatccacttttgcttacggaagtgtgtatgctactttctgacatgacattgtggttcaaagttgatgcttgtgattgctaatgagtgattggattttgcagggtgatccggtgccttgtgagcgttgtgctggcaa

SEQ ID NO: 25531 - DNA, 602 bp, Glycine max
  Intron number 1 from transcript Glyma15g01750.1 (locus Gly ma15g01750) derived from phytozome v7.0 (chr-ID Gm15; pos 1158354 to 1158955 reverse strand)
aaaaccctcttatctctcttctatcgcttggcctggtaaaccctatttcttcttcccttagatttttgtcccttttgcttcctctcatcatagatctgcgtgttctccgtgcattttgctctacaattaagagttttttttactttcttgtcattattggaaagccttttgttttgtattcagattttttagctttattttgtgcctaccatttatgttgtatttagcctagttaaaatacaatttcgatgaaaaggattggatgatttgatccgatggactataactttatagtgcttctttttagatcgagagaaaatattcagatttagttttcaaggctgcttgtgcttttaatgctgagtgttatgccattacgttttaatttatttgaataactgttttatttgattgctgcatgcttttatagctcaattataatgcatgagctggtaccctaggcattgcctagatgtcgtttctacagtcattttctattccactgctaccaaattagaatcgatgcatcatatgtaaatgtgacatgtgattttttttattttcattttagatattctttttggctgagagatcaagcaaaa

SEQ ID NO: 25532 - DNA, 769 bp, Glycine max
  Intron number 1 from transcript Glyma14g37520.2 (locus Gly ma14g37520) derived from phytozome v7.0 (chr-ID Gm14; pos 46812800 to 46813568)
gaaagaaaggtaaccatcacaatggagctaggctgacccaatgacactccaattccacatgttacacttgtacatgacagatttgtaaagattaaagagagttccatataggtaggtattaggaatttgtaaccagttcggtatactaactagtttttttgccacgtgtattgtaaatagaaaatctgaattgaattaagagttgacatgattaaaaaatagaaattaatgagacaagacaaacatatactcactaatgccaaataacctcacttggcaaaattttgtggtaaaggtgtaccgctaaaccctcaaagatatgacaccataacaaattagaaagcaagaaatctcagcccgcaaaagattaatctaaaatcaaaagcattaaagtagagtaaatttgaccaaagaatttaaggttgtacctaacatgacactctaagtgcagctatcacatactagcgctgccatcaagcccaagtaatctcctatcccccataaaatttgtcacaaagaaatcataatgagtctttatagcaaagtgcattaaagtagtgtgaaatgtccaaagcatccttatcaagactattgttcctctcatgtccataaagccattgcaagcatcttcaggggcattcttgaagatttaactcctacataccaaccttacttcaaaagcaagaccaaatttagaagaaaaacaagcaagaccatctaatagctatctttctgatgagggaaggggagacaatgctacaggaagaga

SEQ ID NO: 25533 - DNA, 438 bp, Glycine max
  Intron number 1 from transcript Glyma15g03930.1 (locus Gly ma15g03930) derived from phytozome v7.0 (chr-ID Gm15; pos 2766168 to 2766605)
ccaggtatgatatgcatatatcatgttatagcctttctgtaggacatatctttctgaaaaatgcaagttctaacttgaaaggctgaacgggtagtgccattcattaaacagaaactgcatagtttaaatctgttttttttttttcctgaaaaatttcatctgttgtacgtattttgatgatattaatttcacggcatggttgatgattccaatttcactcccacctaaatagaaactcaagaggtggagctattatgaattatgatgaacgcatgtctgtatagcttaaggaggctttaccttgtttattttaagttcaatttttgttttcttccagcagttattgatcacgttcttctgatgatgtacctagatttaactcttgattttcctctcactgcagactagtttttaaagcagacagtcttggtcgggaaa

SEQ ID NO: 25534 - DNA, 944 bp, Glycine max
  Intron number 1 from transcript Glyma14g07160.1 (locus Gly ma14g07160) derived from phytozome v7.0 (chr-ID Gm14; pos 5312963 to 5313906 reverse strand)
cggcggtggctgtggattcgctattgctatatctggtgtgtcactgttcctttgctcttttttttttaaaaaaaaaaaaaagaattggaggctttgttttccatgtggtctggttggtcccttttgtttcttcaaaaatggtttggatttgaaaattaagcaggtttagggcaagttgttgagctctgttgatggaagggtgaagcagaaaatcaactcagttcagcagcttcagcttcattctctgattttattctcattggagtttttattttttttctgtatcagttttcggtcaaaattggtcttacttcctatattttaaaagtaataattttggtgttcgtattattgataattagtgaatttcatctctcatccaactattctaagttataaagaaagatgaagtttatatattgggattaaaaccaattttgaccgaaattgaagtatctaaataacattttacccaagtttttgtagggggctctttctcttaagttgtgtctgactgaacagtgatttttgtatttttttttataatttgaatttgattaaataaagtattgcttttgaactttgatggggtcgtattttgttaggttggttaaatactcaaatccaagtagataagtttgacaggttgtttggaattttgtaaggttttcactactgtctcactttgagactactttttgccaatctcttgctcctcattcttatggaatgcattgtaatacttccttgtgttgatgttgttctaaataatttaattgggtgtatttggggttaaggccatgttttttctttcaatgctcgtgtgtacgtatttggttcctttatctctctattcgcttgttttcttttaccattttatttgtataaagcattcaccattgctcacgtgcacgtccttaatcagaatcggggaagctcatcac

SEQ ID NO: 25535 - DNA, 751 bp, Glycine max
  Intron number 1 from transcript Glyma13g17200.3 (locus Gly ma13g17200) derived from phytozome v7.0 (chr-ID Gm13; pos 20992640 to 20993390)
tctaccaccaccccgctctccttactcctcctcaggttcctcttttccattccttcctattattttctcatttatagctttttttttcaaggtactcattattgttattttcagcttaattattcccattatattcttgattactgttttacttcaatttcctgctaattgatcaactatcagtttttaatttctgttagatatgtgtgattttagtggtgcgaattcgtcttttttattttttattttacttgttgagactttaggtatttctatggttttgtaaatgcgatttgtttgattagatttagttgagaggagagtggattattttgcttttagaaactctttttttcctttttttttgtttgtctttttacatctttattttgcagatagagcctatcttgagtggaaatctgccacctggctttgattcgagttcatgccgcagtgtgtgagtgttaatagacattttattttcatttttttaaattagtaacttcaactgttctttgtttattttgatttagtcttctttttttttccagtttagctgccttaggtgacttgttgacttcattgtctctaagataatccttagcttgaaatatttttaattttatctgttggtctctgtgttttatagtaagtgtattcaattctttttgtcccggggttgttaacttacccttttgctttgtatgtttcattttaaatatctaatcactattacggcgtatatgcagtt

SEQ ID NO: 25536 - DNA, 819 bp, Glycine max
  Intron number 2 from transcript Glyma17g00630.1 (locus Gly ma17g00630) derived from phytozome v7.0 (chr-ID Gm17; pos 306345 to 307163 reverse strand)
ttgaaaagttttaccagcagtgcgatcctggtgggttttctcaataataataataattcctttcttcattctgctttcaatcatttatcacgtgctttgtcactcactcctgtaattactctgctcccaatttgtcaatatatcattgctcgtcgcaccttcattatttgctaccaaaacatacatgttgggctctctcatttaatatttctgaattcatctgcactccttgcttggaaggagctagggaaataaacccttcttggagttgggagggaggccaatgacaaacataatacttaaattaaactaatataacgggccattcaagtgtcataaatgttgtaagcacttaaatgtgagaatctactgcagatgatgaacagttagtaaccaccattttgttttcttccactttcacaaatgggtggagtttgatgtgtttaatgtcaattaggctatcactttgcacaaatctcactactacaatgtcaaacttcatggcttgtcgttttctctttgacttcgttatgtttggaaattctcagggaaggaattaacagttactatatatgggggatagtaagaaagaatcaaagaattggggcaaattatcaatttagcatctttctttatcctttattaataaagtactatgccagaatgcaatatcaacaattaggaaatatctaaaaatctgtccttcataatctcccaaataggaagaacccaaaagaatgattttttgaagtgttatttgcaatgtgttttgttaacattatgttattctcgttgtagagaaggagaatttgtgtctat

SEQ ID NO: 25537 - DNA, 573 bp, Glycine max
  Intron number 2 from transcript Glyma15g22410.1 (locus Gly ma15g22410) derived from phytozome v7.0 (chr-ID Gm15; pos 21024289 to 21024861 reverse strand)
atttggtaagttttgagattatggtggcacttttagttttctgtttaggatgttattagtgagttactgttgagtttcatgtgaaagtggaatgattggggaaggaataggaagaaggaattatagctgcataggtgtggaacaatggaggtgaaataattgctgaaaaaagaaggaattatgcatactagttgaatgatttttttggaatgtgagtagggcaaaggctccattttggagttaatatagtagcgtgcacaatcatgcttgttgaagttagtttgattgaccgggttgtatattttattcctgttgagtaactattactagtcggtgttaagtgtatttgagtggtttaggtagcatgaaatgggctcaccctaccttgttgcctccttccattttggggggtgggggtgcagttgtgggtatctcatgttttatttgaagctaaacttctattatattgtgagcaactatgatgtagttttcagatgcagtcattatctaattctcattcatcttgatattatattagagactggatcttagaggacacagagttcgtagtct

SEQ ID NO: 25538 - DNA, 772 bp, Glycine max
  Intron number 3 from transcript Glyma14g01610.1 (locus Gly ma14g01610) derived from phytozome v7.0 (chr-ID Gm14; pos 933955 to 934726 reverse strand)
cgacaatcagcacgactcaaaacttggcatacctggtactactgttactacaccccttcatttttgccaacatatttcctacgttgtcttgtctgtcttatatactcagttaacattcattatagtttattttgattatcatgctgtaacatatatgctatttggtgttactatcgtgcgtatgagaatgaattaattggtatgaaattattgaaccttaaataaaaaactgcattaaatgttcggaaaaaacattatggtccatgataattctattccgcttgcgtgaaattgtctattaccaacaaataattctgtctcctcggtttttttgtgttgttgttgttgaaagggatcaccaaccaagtgaaagggagtggttttttaagtttgttcaagaaatttgcaataaagaatttttcaagttcatccacagaaaacttgtaattttatcgaagttggtgaatatttattaagatattctctctcttgatcatagacaagagtgcagagccacgttgaatttgtatttgtggtgttgtttgtatatgcctgtatcctttttagcgtgtacgtacgtgtgtgtttttcttcttcaacattgctatacggtgaaggttgtattgtatgtgttgttgttgtaattttcttttatcgatagatattattttgttttttgttaacagaaaaagataaaatttggaatctttttccttttctccttatttcataataatctaaataatcttatatgttggttttgttgttgcag

SEQ ID NO: 25539 - DNA, 607 bp, Glycine max
  Intron number 1 from transcript Glyma15g03750.1 (locus Gly ma15g03750) derived from phytozome v7.0 (chr-ID Gm15; pos 2628449 to 2629055)
ctcccatcgaaggcaaagcagaaagaacggaaagggttcgtttcaattttgtttaatctttgcattttttgtagcttcattttgcttttattcttcccatccgtacaccgcttcaatttctataaatgataaattatttaatttgaagttctgcttaagctatgattctctttgagttcctatctgttgctgctggcttatgtaaaaaaaaaaaaaaatgctctacaccaggtaagatgcatgttcagacttcagatagttaaattttatcgagtccgcattaacttgttccaatttagagtatgaatgtgtcaagtgtcatcccgcttattagattaatgaacaatatgtttgaaacgtagagtggatggaaaagtgaatagttgtttctattttatttgtaatatcataaggtcagattctgctaaagtatactggtaaaagagaattatgcataaatatagagttaattagctgtatggaaatgctcagttttttaatactgtctgttttgactagctttttgagtccgtcatttccttacaaaagattgtataattatatctataatatcattttttttaatccaggctttctcaatttctca

SEQ ID NO: 25540 - DNA, 868 bp, Glycine max
  Intron number 1 from transcript Glyma15g40950.1 (locus Gly ma15g40950) derived from phytozome v7.0 (chr-ID Gm15; pos 47944181 to 47945048 reverse strand)
tgatatttacaaatacgatccttgggatcttccgagtatgtttgttgtttgcactctaaattaattatagcttggctacccttttaattaatttcttgatcttcttctatttctcttcagtataacttcaaaattctagatggttttcttacaaataaaggaaatattaagagtagggtcttcatctgagatatttagctagaaaaaatggtacccatgattaagttacttgcctctttggctagattctataagtatgtatgatcatcacacttatatgcatactataaagtttgattaagatgggtaaacataaacatatctactttttggcctcactatagagaggatcaactttgattcatttggggtaaatgaaatcacacttgcatgagtccttaattgtatggaaatatatcatctctttctagcactcatgtattctgtttaatattcagcttacaaactgtgaggctttcctttcaaaccaagacacatcagaagagtttctcctgaactctctctttctctctctcatgagcaactacaagaagaacaaaaaacaagcttatatataacccagatttagtcattatcattatttttgtaagaaaaatcatacatataaatattcttcaaatttcagacctaacatcttgatacacaatagtcaatcacaatagaacttcaagtattctaatgaattaacctacttttcagcttagtgaaactttgtttcttttattttttttcctctacccttattcttctttttcgttaagccaactatataattaatcatcttctgattgcaaccatttgtgcatatgcagaaaccagtgccactggaggagagaaagaagggtac

SEQ ID NO: 25541 - DNA, 543 bp, Glycine max
  Intron number 2 from transcript Glyma16g26940.1 (locus Gly ma16g26940) derived from phytozome v7.0 (chr-ID Gm16; pos 31028176 to 31028718 reverse strand)
aaaggagggatcagataccatcctgaggttagttatattctgactttcaaaaacctcagttactgatcaacaactctaaactgaaaacacaaactagctatagattttttttcttccccttagatggttacacctttggccagaaatacaatgaagtcccttaatttttggtcaaaatttatcttagttcctagactttaaaaatgttttggttcttgtatttttttataattgatgaatttcgtccctcactctgatatcttaagttcaataaaaaggaacaaaattcaccaattataaaaaatacagtaatcaaaatcaagaactaagattaattttgaccgaaacttaagcgacctaaaacatattttacactataatgaatagaaggatgattccactgaataaccaaccacatatgtaacaaaagcagcaaattgaattttagctcataactgtttagtatgcttttagtgatttttctgtttataaggtttaagttccctcacacaattatgtattggcttgagtaggttgaaccag

SEQ ID NO: 25542 - DNA, 710 bp, Glycine max
  Intron number 1 from transcript Glyma13g09210.1 (locus Gly ma13g09210) derived from phytozome v7.0 (chr-ID Gm13; pos 10244094 to 10244803)
gacccgaagtatattttcgtatctttatttccctattcaatgcctgcgttattcatttttatttttattttttatttttgtaaactcttttttcagaagaagattttgttttctatgtttctgttccgcttttgcacgttaagtttggacttttgtttttgattaaaatttggtcttaaagatgaggaggtgcctgtggctttgggatgggatactttgattttgaagttgtggtttcagttaaagcaaagccattgatttgattaactttttaacattataaaatgtagtattcttagccgattagggattgtttgtggaatccaattggggtgatatggtttgagagttcccaatttctagtttccccctttcgtgtgtttaggaattgactatttcatattcattaaatgcttgttatgttgttcgttatgaacggatagattatattgtccgatgaaactctgaagtaatacattgttatttgttaatacacacacataaatgcacactagtgtggattgccgccaattgctcacttggtattgtaaatgctgtcctaaactaccattgacaataagtttttgttgttatgcttgtgtttgtttgttcatggggttttcttttgttggggtataagaatccgaagttgattaatctgttgtggttttgcagggcaaggcagacattgtttttaactcaccagaaga

SEQ ID NO: 25543 - DNA, 939 bp, Glycine max
  Intron number 1 from transcript Glyma13g34470.1 (locus Gly ma13g34470) derived from phytozome v7.0 (chr-ID Gm13; pos 36032189 to 36033127)
ccgggaaaataaccttccctgcgtgccttaagcaggttcgaggtttcccccttcaaaaaatcggttcttttttatgtttgagtttctgggtaggaagcatttttttaaaaaaaatttgattgatatgtaacccagaagaagaaaaaaaagattaatgcttttttttgtgtgtgtcttttttatataatcggttttattttgatggggagtttttactggtttgtctcttgaatttgattccccccgcccaatatttgtgggattggaattttggttgtttgtgagatcattgggtggttcaattgctttattggtgagtggtgaatttacaagttataagaatcagcagtgatttgggatctttgtgtaacatatggaagcaattgggtagtgcatgaaatttggattggtgtcctactgctgcaagagaaattgcagtgatttgatagaaaataatgttaaagtgggcttattattagtttgtggcagtttttagtggaaaagatggaagaatagggaatagggatccatttgtgggggggatttttcagatgcgcaatagtggtcatgtttgctgtgcagaaatggggtggatggagtttcacctaccttttggtagataaggattatgcctttgcatgatgatgtgtttcagcactctcgtcactgcccagcacttgcggaattgtgtgatgttttctctctgttttgctttggtcaataaaggatagtaatttattgggaattttgtgatgatttttttttattcttgtaattcttatgatgatttcattgtaattttgatgagcactttgtttttttttttttactattagttgtttatttcgtattgaataagagaatttgggagggttagaatttgacaatttggttgtgttttgatgatctgcagccaggaccacgtgacgttccccacca

SEQ ID NO: 25544 - DNA, 881 bp, Glycine max
  Intron number 1 from transcript Glyma13g27570.2 (locus Gly ma13g27570) derived from phytozome v7.0 (chr-ID Gm13; pos 30774091 to 30774971 reverse strand)
actatctctatacctgctttgctcacaccggcgaggtataataataattagtatcccttctctttcctttatttcaagttgatttgttttcattagcctattgaatagaccttttgttttctacgtgaattttgatcacttttaggttttttttttaaatgtttgtgcttttagtttgaatagggatttctgctgtgttaatcgtggtttgaatttggtattgatttagacgtgcggctgttctgtcgttgtgatactgaagtgtcagtttttggtggattgaaggtttaatttttgtattgaattttggtggtttgtattgttagctgtttttggctaaattggttagggttttctgcagcatgaaattagaacctttctagattttgttttaaatgcccgtacttgttgatttatgcttaggtgtaagagtgttctgttatgatactgaggtgtgggttttgtagcattttaggttggattttgtattcattctttatttgtgttcgacaaagtcgaagatggttctttgtccgttctagttttgtattgagttagatgttctgttgtgataataaatgtgttcgacaaagttgaatctggttttcggtatgtctgttttaggttttttaaacacgtgcaattgttagtttgaattgtgtattgagttagacgcatgaatgctcggttgtggtaataaatgtgttctacaaaggtgaatatggttttctgtttgtctgttctatgtttttttaaacatatgtacttgttagtttaaaacttgtattgagctagacatgcaaatgttctgtcgtgatactaaatgtttgttctgttttattgtaggttacatcggttaaagtaattcgaaacaagcaaac

SEQ ID NO: 25545 - DNA, 924 bp, Glycine max
  Intron number 2 from transcript Glyma14g05130.1 (locus Gly ma14g05130) derived from phytozome v7.0 (chr-ID Gm14; pos 3551461 to 3552384)
ttcctatttatcctgaagatcggtttaaaggtttgttctaagggtttaagtgatgttctattttaaagtggggaactgctacgcgcaaaagtagttttgatgttctacgagtttatttgttaagcttcataattttaataagtagggttattcatcagtttagtttggtcttaatttaggaacctgacaatttaattgaccacattggttacaacaaaattgaaaactaacatatttgtttatagcgacatgactcaaccaaaccaaacctattggaagctagtttgatttattaatttaatatgattggcatggattttttctaagctagttttacaagaacaacatcatccttgagggtatgattatatgagagattatgaagaaaaaagaaggcagagaaaaggcctatggtagtctttcaacattttctccttttgacagtcttctaaaaagaagagaattgaaataaataaaaaattcgttattcctcatttcttgttcttaaccttcattctttcgtgatttctttcttccattttccttcttaacttccaaacacatcctaaatgattaaatatatccaatgtaatagaaactcactagtcaacacattttgtatcagagtaaagttcatagaaataacaattccggcaaaagttaaaccaaataaaacaacccaatttggtcaagttagatccttagcctcaaatatttcaactgaaataaagactttagcaaaaagtagctagcatgagctcgtaaaaaaacaagtttttgaattaggccacagaagcctaagacgcattcaaatatgcaatgcattattttccaaaggttgtctcttataaatgtgatttcaataatctttatgtttatggtggttcagtttcccggcttgaaggttttgtttccaaaagggag

SEQ ID NO: 25546 - DNA, 494 bp, Glycine max
  Intron number 1 from transcript Glyma16g21580.1 (locus Gly ma16g21580) derived from phytozome v7.0 (chr-ID Gm16; pos 24668373 to 24668866 reverse strand)
acttgactcctcgataatacccgcgtccacttcaggtatctgattttcctgtagtttctattttggacaaaacatatatatatatatatatatatatatatatatatatatatatatatataatatttgtattgtttatttgaattgaagtttttttctcggtgatttgtataataaatgtttgcattaaaaatcagcataagttactaggtatccgatcaatataagattatcataatttttttagaggtttttgatgtattgttttcgatcagaattaaagtttcatctcagtaatttgcataaaaaaatgtttgcattaaatatcaatgtatgttattaaggtaaaatttcaattcggattgaagataaacacttaagatactgcatgtaagttttgttttgttccatttggataactacaatagcttattctaaaattgggttttaattttgtaggtgaagataagttgagtttgataaaactggctagc

SEQ ID NO: 25547 - DNA, 788 bp, Glycine max
  Intron number 1 from transcript Glyma14g39070.1 (locus Gly ma14g39070) derived from phytozome v7.0 (chr-ID Gm14; pos 48197936 to 48198723)
agggcattcttggcttcatacttagctccacacaggttctttgttttcactcttcaccttatatatacacgacaataaataaataattaggtgtttttttaagcaaaagaacatgggtctaggtgaataaaaagattgacatcccaactatgttggcacctctatctctacaacatcaaaccaagtcatctcaaaatatacagattagaaacaagaaatacaaaacacttgggagggttagatcatacccaaggcgagaagctagtggtcacatcattatcaactatgaatttttaattttgattatctaagtatgattatttgcgttagatataccagtggtaggaatatattgttgaaaagttatatcgcgtacctcaatagtcaatttctagaattatctattggacaactttacttagcactaaatttaagacgaaagctaacatgaatcaaagtttataaccatattgtttattcctattttaacagcattgatagagggagtgttggttttaagatgagtgttgtttcattatatatgtcccaattaggatattgggtaaggaaactaaagtagaaatgtttttattggaaaatgaaaaattacgtttttcgcgctctcctgttatttctataataaatgtttcttttttttttagtttcttaaaagtgtcttagaggaactggttaacaagacccatatatataatattgccacataattagcttgtggattttaatgttgtgcacctgaaacttgcaggaagctgttgttgatccaccat

SEQ ID NO: 25548 - DNA, 901 bp, Glycine max
  Intron number 1 from transcript Glyma16g05520.1 (locus Gly ma16g05520) derived from phytozome v7.0 (chr-ID Gm16; pos 4835173 to 4836073)
agctgaagccaccgcacacaacgtctggcacaaccgtgagtcttcctagctactactctattaatttcttcctaattaatccaaacttgaaacttggaacaatcaatagaagatagcaaatttagtctaatgcttttatgctttttttattagtaaatattaataattaatttgttaagggaatgattggaacttattacttcttcaacctctttcattctcccatcaccagtataccaactttatattttcagtctcgatgttattagatgtcaacatcaaattgttaaaagtgagaaattaatttggttttccatataatatcatgaattagaatgatatatgtactgaaaaaatattcatcttttggagaaagaccaaatttagatgcatttcgttttaagtaattttggtgttgtgtaccagttagagttgaagttttattttagcagcccaattttttaaaaccataaccccataccatttgacttaaatatatttttaattcttcaaattaaatcacttttgtttttgtttctcaaattaaatctaaatttgttatatagtccctcaactttgaaaaaaaatctttttaatcttttatacgggcaaaaatcgctacaaattatctatctaaaccgctaaaaataaaaatcagtttgaaagaattaaaaagagtatttttcgccaaatttgagagaatataataatccactaacctttaagacaaacttttatcattcaaattaagtgaaattctgatgggataaatgtcatgtggctaagaaaatgggaaaggtagctaaatgtacctctcttttttatttcacatgatgtgattgttggtttgttaccgttatttgcagttaaaacaggtccatcagtgtcttcagctgcactg

SEQ ID NO: 25549 - DNA, 1003 bp, Glycine max
  Intron number 1 from transcript Glyma15g41370.1 (locus Gly ma15g41370) derived from phytozome v7.0 (chr-ID Gm15; pos 48486947 to 48487949)
ctcaccagccacagattctctcttctctattcagtgtaagcttcaccttttctgtgcgaaatttcttctgggtatcccttttcaccctacaatttgtgtgtgtgtgtgtgtgtgtgttttttttttttttttaaatcctgtgttgatttcccccttatgagactggacatgtggtgcctgtgaaagtttggtctttgtatgattcttcggttgtttcgatttgtgggtatctgggttatgcttttttctaattaaagttttgacttttgagtgtgggaattggggtatgtgttggttcaaatttttttgtttttccgttttgttggtcttttttgttgatccagtagggtgatatacttgcatgatttgctttagtggtaaattcccatggcatatgtttcatacttcaatttttcaatgtttggtgttgaagtaagtgtatcaactgaagtaccatccacatgttcataacacattggtatggatggctgggtgtatgcatgctccttttgaagtgaacactatctggtggggattaattttaatttctgttcttactaaatggactaaaagatagtatcaatttgtcatcaattggaatggaagtattaattttggaaggtgcattttttgagttagtaatattatgaatatgagtgaatcatttaaaatttgatataaatggcagctagtctttgaaatacagatttgtgcaattatatataaatgcttaaaacaggatctggtgctactgttatgtataaaagatgatagaagcaattgaaattttttttattaatatataaacgacagtaggaagacttgttcttctatttcacttaaaaaaccaatcttgatcaatattacccattgatttatttgtgcattgtcttattgacctcaagattccccttgatctatgttatttttgccaagatattattgtataattcctcttttaccttcagaaacggctgttttgtatacgagctgtcccggtctc

SEQ ID NO: 25550 - DNA, 572 bp, Glycine max
  Intron number 1 from transcript Glyma14g03590.1 (locus Gly ma14g03590) derived from phytozome v7.0 (chr-ID Gm14; pos 2333549 to 2334120 reverse strand)
acgatctgtttctacctctgatttcttctcttcaggtaattaaaacacttttctttctccgctgtaaggggttgaagttttagaaacggttctggaaactccgtttgatatatgttagcatttactctatagtatagtgttggaatttgcaatttttcacttcggaaacatctacatggataggaaatagaatgccaagatattcactggtaaatttagtcgagaacaatatctaaactgtttttcacgttctgaattggaacttaattgttattattattgccggtaaaaaaagtatgttgtaggtcctcaattttcgattaaaattggccatgattctggtatggtattttttgtaattgctgaattctggtaattttttcaactttaaactggttgaaatagtttgattgatatttagggtgtttgattgtgtttataatccggggtagtttgatcggataagcttttctgattattattttttcagtttgatacacaaatacgtctatttctttgcttgatgaagtttgatttatagataatttgtataattactgaacagtgtaggt

SEQ ID NO: 25551 - DNA, 851 bp, Glycine max
  Intron number 1 from transcript Glyma13g24550.1 (locus Gly ma13g24550) derived from phytozome v7.0 (chr-ID Gm13; pos 27907522 to 27908372 reverse strand)
ctgctttgcttgtgtttcctctgctgcacggctaggtgagcttcaactcgctcgttttttttttcttacgtgcatttgagtggatttaacaatttttctcaatcaaatttggattgaatactttgatcttgagaaacctcagagttgtaagcttttccaaacgttaaaactcgaaacaagttacgacctcaattctatactgttgttttagcttctttttttttttcattttgtttcaaaactatgctttacaaatttaaatattcattaattatttttccacttgtactcttatagtcttatttagtaattgctacaataggaatttactacaaatgataaatttagagtattttagtctaaatataatactattttacattcatgaatgtttgttaatttgtgtgtattaatcttaaacagatatgaaacagaggtagtaattttaacacaattttttctgaaaaatttccagttagtgaaagtttgttaaacagtaaaccccgttattctgatgaatactagtaataactgttaccaaattggaatttgttgggtttggtttctttgttaagctttaaatgagcacatttaagagaagtgatcaaatttcattttcgcaatttattggcaatgaacggaatttatatttgaaatttgcaagtgaagaagtagtttctacgtgattgtagctgttttcttggtgaatctgagttttaagcttgcacatactatagaggattatgattttcaaaagttgtgtttgaatattttgtgttttttcccctctttttgatttggttcaaatcactacagacccatttgctctgcgcttaagctgcggggctcgt

SEQ ID NO: 25552 - DNA, 748 bp, Glycine max
  Intron number 2 from transcript Glyma13g37280.1 (locus Gly ma13g37280) derived from phytozome v7.0 (chr-ID Gm13; pos 38414953 to 38415700 reverse strand)
aggtaagagttcagtgcttcagacaccattactttttattgggtaaattattgacgaaccttttagttgttgttgtcactttgaaaatggtgattacctttggtaatatttgtcaatcacaaggtgaaattaagttacttatttggctacattttgaaattaaagtgaaacagctaatactacctgtctatgccattatcttatttacttcaatgtctcattatggatattttggtatgtttaattgttaagtaaggattctggggtgataaagcaagtgtaggctccaaattatccttccactgtgtacatgaaacatactacatcattttgttactttgatgtttttcttttgttatttatgcatatctgctgggactttcttttttctttggtgctttggtacttggtagtagttgtttcaatgggatttgttatttatgcacatctgcaaaaactttttctcattttttagccaatttggtttgacgtgtcattttttcccttccttttaaggagggcttcttatcctctcatcaggtgtacattctatctttcctttctaagaagtttttcttcttttattaagaaaaaatgggaaatggtatgggaatattggtgtgatctgtgtggggttgttgaattgtccttgtattcatttctcagctatctgtatagtttattgccttacgtgagctttttctgtgtaacagggaataactcttgttttgctaatcatacatacatt

SEQ ID NO: 25553 - DNA, 353 bp, Glycine max
  Intron number 1 from transcript Glyma15g19140.1 (locus Gly ma15g19140) derived from phytozome v7.0 (chr-ID Gm15; pos 16209180 to 16209532)
aacataagaaggtacttgactcttgaacctccatttagtatttaacacaccgaaattatatttaaagttctttcatagttcatttttagcataatgattaaatcaaaattgatatctgacttaataatcgactaatgttttaacaattattgattacagtcagagttttataatctaactatatgctagaataacggaataagtttttttttgaaaaagcattctcttcccttgcttcctaggaaatgctagaatttgtgagcctctgcatcatgttaatatttttgttagtagttaaattaaagcttttgacatcaggttatcactggcatcgcacttcctgttggatccga

SEQ ID NO: 25554 - DNA, 1055 bp, Glycine max
  Intron number 1 from transcript Glyma13g38860.1 (locus Gly ma13g38860) derived from phytozome v7.0 (chr-ID Gm13; pos 39582143 to 39583197 reverse strand)
gttagcgaagttgaaagggataacgaagtgcttaggtacttttctatctttgaatatgtatatgtgtatatatgtatttgtgcgtgtgttttgctatgagattatgtgcttctgaatcgtaattttctgtcgcgttctctttatttcgtctagtttttttttttttttttttttttttttttttttttttatgtatgcgtgtgttggtgctataagtttaggttaggtggtgactagggtttctggacggttatttctgtgtaattattgcatatgttggtgaatttatgctttggttttggagtggttttttttttcatatgtttcttaattaggatcaccgaagcttcgcgaactgagatctttgcgtgatccaaaaattgtgtcgattggtttattggaatgcggatgatgctgcctctgctctccatgtatacatgcgagtctacgtgaggatggagacatatgattggcattttaattttgctctcgatgttgaatttgagtttttcgtatgtgccgtgtttttgtcagagttttcataaaactagtgaatcttactatcaacaacgaactgagcaacatcggcctactatagtagtgttaatcaaattctttcacataagtgtataattggcattttgattgtaacttcaaagaatcatttgaattgtagataatgtattgtattatattgggctcttcattggttggaatacattgagtttttctgagcaaaggtgtaacaagaatgtcatgaggctgaaggatggaggggaaatcagtaattgatggtttattaacaataacattggttgaaagatcccaaaatgaaagtttagaaaccaaaacccagtgtagtggatgaattttaaacaaatatgttattcaatttgtaattttaaaatatgcttggttcttataccaaatatttatgtggaaaatgagaaattttgttattgttttaagttctatgcactctgctgatcaacattctctgggttttggttttctccacaggattctctcttgttttaagttgaatccttttgagt

SEQ ID NO: 25555 - DNA, 896 bp, Glycine max
  Intron number 1 from transcript Glyma16g02460.1 (locus Gly ma16g02460) derived from phytozome v7.0 (chr-ID Gm16; pos 2040018 to 2040913 reverse strand)
aaagctcagatctgggacactgctggccaggaaaggttcattgcattctttctctctctttctatctctaattcatgcttgtgttttgattctttgtctataattttcttgccattcctttgaactcaagggtggacagacattgagtttcaatgatggtatggtacggattcaaaggttattatattattgtttgactattcaatgtgataccaatttgacttaggaaacatacatggccaagaagcacatgttcttgacttttgtttttataggtatttcattttccttgattaggctccaaaagtcacattaatgttataaggggttgtattgagacactataacagttttggtagaatgcaatgcttcttaacatctaagtccattcacattgtcatattctatataccattccaagctctgaaaaagtttgctagaatcctatgaattcaaaattgcaaactgtgtgcaataatgatgaaggatttttttttttttttagttgttagtattattagtttttattaacggaaaaattcgaatccgaggcctctctcttcttccctttcccattcaccactagaccaacttatatctcccatgaaggaaaatgttaatatgttatgcaatatgatggaagaggggataaaccaacaaaagtaaacttgggagctaataagtctcaaacaaaccacaattaaatttgacataacatccaaaagattaaatttgtgtcactctcaattatatgttactgaacttgtttattcttatccaatgtgggacttctttgtctgtacttgtaatacttataattttggtgcagataaattctcacaaatttaacacattacataggtacagggctgtaacaagtgcatactacagaggtg

SEQ ID NO: 25556 - DNA, 908 bp, Glycine max
  Intron number 1 from transcript Glyma15g06460.1 (locus Gly ma15g06460) derived from phytozome v7.0 (chr-ID Gm15; pos 4563756 to 4564663 reverse strand)
gaaaggttagtgattattgaccttaggtgtgctcgtccaaattaaagattcaggccttctgtaatgcaagtgattcaaatacttaaatttgaagctgaattctccattttgccagagtggatccctgtgacaaactactatcctgatccaaacagtgtatggtgctgaccattttacattggaaaaaaacattagatgcagttttttaggtgtttttgttgtattctaattaaaattaaacttttgtctccataatctatatataaaataagaatgtatgttaaagataaataattaaatataagatattaaggtgaaactctaattttaatagtagaacgacataaaaaacacttgcaaagcagtctcatcttcctaaatttaatttaacaaaagaagaagaagaacgttatagcatcatggtgagcacggagcagttcttttgacatacaaatgaagttaacaacgtatcgtgtgacacgttcactaaaaaaaaaatccttttgttgacttgacattttattcatcacacacttcttttatatatatatatatatatttggagttaaattaaatatacggataatgttatgaattttattttattataaattattaaatcattaaatcttataatacctgcatgatgatttttttttaatcaaaactacatgatgattttcaatagttagtattaacttattttcaattttatcaaatgaaaccattttaatagtgtgcgcgtggctcctaagtcctaaaaatgagtggagaggttggccaaatacgaggtaggaggaaaacgtggtgttgggatagagaagcgaaagaaaccaaaccacaatgaaataaaaagccccttttgtagaacagtgatacattcgctttctatttcttcctcatctcgt

SEQ ID NO: 25557 - DNA, 911 bp, Glycine max
  Intron number 2 from transcript Glyma14g00860.1 (locus Gly ma14g00860) derived from phytozome v7.0 (chr-ID Gm14; pos 448347 to 449257)
gtagagcagtgccgggtgagatcaattaccgagattactagtctcgcgtttccagaaagttaacttcttctgaatgtattaattaccgagattgtgcatgcatgatcaagtgtaaactgctatcgtatacaaaatcttgaaataaaagctactgaatatttgtttaccacaggcagtataataatgttgttgtcgtctttcacatgccacaaatacatacagccttatacccttaaaacatataaacatggacacacaacctcacaagaagcattcatgcttttattggttgttgctcttcagaataggtgacacatacttgctccaacttacatttgactttgatataatgttatatgtcttctcgtttcatgctaaatgctaatacaaaaacatggtttatatgtttacacactgtatggaaatagcaattatgccattgcctgtcaatgatgttatacaagattgtgattgcagatggacataaactatatcacaaatcgcaatgtgaatgtctttatgttctctgtggatgttgcaataatttgcttcatcatatgagcttttttgttatttgtgtagtttccttctaggcctctgttatcatcagtggaagtatgtgatgcagtctgttctcatgatatggaagaagaaaaaaatttctgtgctgcaatattggatgagtgggagcttcagcatcatgaatttgattcttggggcatttagttcttctgacatgacattataaagtcaaccttttgagacaacaagtttgaccattttggactgatttatttgtgcagcttttgaattttccgattgaattttctttccataaatgtttttacttttaccttaatcaaatcacgacctctgtttatattcctagggactgttctgccaagaaacaa

SEQ ID NO: 25558 - DNA, 875 bp, Glycine max
  Intron number 2 from transcript Glyma13g17070.1 (locus Gly ma13g17070) derived from phytozome v7.0 (chr-ID Gm13; pos 20896975 to 20897849 reverse strand)
tgacagtaacatgccttttgtaatgatccgagatgacgaagtggagtggcattttcgtgatcgctacttagctttcggaatgaaacagagtaattaatgagattatctctgccagggttcctgagtagttagttaggttatctatgactgcgactttttttttctttttgaatttggaaagaagtgtttcaaactttcaactaattcatggcctcttccagtgatcttctgcctttggaggcttcctaacggtttgatcaataatttgctcagttactgtggttaatgtaaggtggttggtagctacacgcactgctaaaaatgttatttttatttgcagaatctcttgtctgtgaataatgaaggatgccatgggtgttatttttttttttttactcacatatacaaaacatttctgtgtaattatttgttcccctcccctctcagtaagtaaattagatgtgttgttagaaaagtagcaaccagtaacatgatggcaccatgattatgcagtcaaacttgccaattttgaacaagtttgtgcagtttctttctggcatcttttggtgttaaaatcaagtttactgacaattttgcatctagcaggaagaattaaaatctgttgaaggccttcaagcagcttcaagatgctgcaaagagtatgtttttatatgccatttagattgtgaaactaagaaatgaaactagagaaattcctttggatgtttcaattattgctagccaaatgtactttgctgattgaatggcacaatattgcaggattgctgattatgtgatggcaaacgcagatcctctgttaccttcgtaagaactgttgtcatcattcatcatttgttagtgtttaaaaagagatc

SEQ ID NO: 25559 - DNA, 989 bp, Glycine max
  Intron number 1 from transcript Glyma14g35960.1 (locus Gly ma14g35960) derived from phytozome v7.0 (chr-ID Gm14; pos 45113723 to 45114711)
acgcgctgcgccaggtgcaaagcggttcattactggtacgcttttgatttcaatttcttctatgcagttgggttttcttttttctttttttctttgctatatagtgttgcatgatttttttctttctgagtgaacttggcgctagttaagcctttaggaattatgaggtgatgtgttcaaattgaggtgcttttattgtagaaaaataaaatagaaaagaaaaattgaacatttctatccttttgtttttaaaggctttcgttattgctgtgtgccggataaagatattttagttttgggggtttgggttttgtgctgtgattttttttatctgtatggtgtttgctattgatttcttggtcttaagtgtttgtttttgtggagtgggttttgtgttgtgtttttagcctacgatatgttaccttttctagtaagccgcagatgaagaacacgcaaaaatttggtttgaggttgggatcattcagttggttcattcttgagtagaatcaacgtttgcgagattagttggttgttcctttctacaaaatgatggggtatcgtgtgaggaaataaaaattacgtatagcacgtcacatcccagtccaaaggagaagctactctttctttatagcttttagagatcacatatgaaacgcaagttccccttggcaaatgcgaaatcaaatatgcgctttataattttcttcttaaagtttggaggatgaaatatgatcgctggaaatattgcgttcatggtctctcttttttaaagactctctttaggtgtttggattttgtgttcttgcagtttgttgagtgatttagctgacttgatggtccaatccatattactgagtttttaattcattgttttttttctgcatatttatgtctttgtattttttaagaagttatcatgttaatattgcttatctttgttttcatgtgtttcagttctggaaagtgccaaattgttcattggcgccaag

SEQ ID NO: 25560 - DNA, 663 bp, Glycine max
  Intron number 1 from transcript Glyma16g32240.1 (locus Gly ma16g32240) derived from phytozome v7.0 (chr-ID Gm16; pos 35401034 to 35401696)
cttcagatccatcactctctttgcagaaaaaaaaggttaccccttttccatattttacctttcaaactctctctctctgtatgtatatataaagtctctttctcatgtttccttacttgggtgtagctttatttggtcatcaatttaattgcctgaccaaagtaaccatctcgttcccttttctgctttgttgaaatgccatgacagttcagatttgtaggaagcttattggaagaaaaatagtaagttagaaatagacatgtttagatattttccttttttttaaaaaaaaaatcttttttggctcataatttagtcaattttcaagtgacacaatttttgtatagttgaataatttttgggtagccaattcgttaagtcaatttctctgcttgccaaactttggggtagtcaaaattttcaagtttttgatgtccagtgctttaattgcgatagggtctatgatttttaatgaaggaaataatttcaactcgttatgtggaattttccttaaattccaccaaacttaattgatttttggtgaaatgctagttgcttgaagaaattttcttccaaatcaccaagtgttttggcatcagtatgggtggcattgatgattgatctttggctgttctgtttgttatcaggctttgatatttggaa

SEQ ID NO: 25561 - DNA, 662 bp, Glycine max
  Intron number 1 from transcript Glyma16g32490.1 (locus Gly ma16g32490) derived from phytozome v7.0 (chr-ID Gm16; pos 35634814 to 35635475)
actgtttcattagggtaagaaaatactaccatcatttcatatctatcgatgtttaaagttaatatacataaattaaggagtatttgatggttgtgtaacacataatatatttggactaaaatacccctattttgactatgtttatttactgtttcaaaaacagttttttgttttctaaaatttgtttaagcacatttgacagtgtgtcctttgaacatatctttattttctaaaagtttgttatttgaacacttgaacaaagcatttgaagaaaaagaagagaataagaaaacatcttctagttatttatgtttttttatttatttttaaaacacttattttataaacaattttcaaaacttcatagattttggatgaaaaattaattgttgaatagtgtgaaatcgtttttaaaatcagtttttaaaacaaaacaaaaaggagaagaaatatacccttactatttcatttacttgtgataaattactattaagcaactgttgaaaaggagtatataaaaaaaaaagactaggttgtaaaatatcaataattttgaaaaagaacaaggacatggaatggaacctgattaatgttttattgattcatgtgaaagtattgaaatggatgtatttgtaagttttggtcaattgtgaatgataggg

SEQ ID NO: 25562 - DNA, 690 bp, Glycine max
  Intron number 1 from transcript Glyma13g03320.1 (locus Gly ma13g03320) derived from phytozome v7.0 (chr-ID Gm13; pos 3268833 to 3269522 reverse strand)
gccgactcattattgatttcttaggtaatattaatttattttttctttcatgatttttttttctgtgaataaggtatttattaggtgaaagtgaatgattaattgctcaagatactgaaatttatttaaagagtttacttctttgaagatatatttttttatatgtcgaatcaaaaatcaaactcatgatcacatgaaataatttacatgtctaattaatgtctcgtatttttttcactagcacgtcctaatatactgtgagtacggaggaacgtagatgtgttgctatcatggtatcatatatcattttgctttctttctttctttgtcttccacctttttcaccaacaataattttttttggtggaaagatgataaaaggggttggtcaacgctcagggttctagatccatcaatataactttcaactttcaagctccttttagccaaaaacgactttgggaaaggagctaccataaattatatatacaaatcgaggactaagatatgaagggtagatattaatcattgtacagtatgatacatgataatatattcattcacctttccaataaacttgtcacgtgaagaaattttataaagcatatatactattgcctagtgaaggatttgtttcataatcttgtaatttcagctgagaagtttggactcccttatctgagtccatat

SEQ ID NO: 25563 - DNA, 332 bp, Glycine max
  Intron number 4 from transcript Glyma15g05360.1 (locus Gly ma15g05360) derived from phytozome v7.0 (chr-ID Gm15; pos 3795958 to 3796289)
actttgcaagaacaggaagcattgccactgaaaaggtaattggagttagttcttatgattatgattttttcatacaacatgggatggttttgggcctctggggggagctgcaaaacagccatagaaacttctaatctctaattttgattattttcatttatattgatgcctggtttgtttataaaaccatatttctcttctacatcaataggaatcatttgccagtcatatccattagatcctcaattcaattttaatctataaatgaaactcacactttcataatgagtgttataggtggatctcaaagagggtcctttagagcaattcac

SEQ ID NO: 25564 - DNA, 958 bp, Glycine max
  Intron number 1 from transcript Glyma14g05190.1 (locus Gly ma14g05190) derived from phytozome v7.0 (chr-ID Gm14; pos 3599656 to 3600613 reverse strand)
ctccaaccagagcgctcctcaggttccaaaattttttctattttgttatgttttatttttctattttaatttttctactttttattctagttctgttttgttttgtcttgtctttgttttattttttttcacccatgttgcagtgtcgtgtaatggaacttgtatgctaatgattctgtttctttgtttcaaccatgatgtcccaattcttgtactagcacgctgttgcagtgccaatgttacgtcagctttaagcaaactgcagttctgttgtactcaacttaaaaagaaaacaaacaacaataatgctgtaaaaaaagtgtcttgtggataaatggtataattttctgtaaacaaaataaatttgattaattttatggaacaagtaacaaccaaccgtttctatttataattttccgtggattctggaaaatgttccctgtttgtaagaattgttggtgaggatgattatgcattatataatttttattcaagagtgagatgcatatgaaattccgttttatcccccagtttttagaagaaatcaaaattgattatggagtagtgtgtttcacacttttaccactaaaatcattcatgttttactgaaactagacaactttataatttacattgtacgttactgtatggtcttttgtagtatttcttaatcaagccgtctaaattgtattgcatctacaactaaattcaagaaatcacagagctagatgagagttaagccttggtattttttttggttatagtttgggtttgcaatcttacatggtttcttgtttgactgctttaggctacaaacctcttccccagcacaagttcaataattgttattatttaggcttttgattgctatgcttgcaggatattgttaactttttcatttcagctcatttatatatgtgcatgctgagtgttttgtttctttgccagcccatctggg

SEQ ID NO: 25565 - DNA, 710 bp, Glycine max
  Intron number 1 from transcript Glyma13g43990.2 (locus Gly ma13g43990) derived from phytozome v7.0 (chr-ID Gm13; pos 43567308 to 43568017)
tagtggcaagcaagcaagacaacaaaaaaagaaaggttagaatgaaaagcttacatgcttttttcttgtcaattctaatttgaaatccaggttatgttacttatagcttaaggagaggaaaataccaagaagctccggttcctttttcaagttcaattcttggtgatttccaatttttttcttgagtaggcaaaaattggagaaaaaaaaaactatagtttgtttgaggttaatgggtatccatcaatcatgcagaaattcataaacaaatgattgtgaaaaagatattttgttttacaaacttgggttattctttcttgttttcagtaatattcttctgtggttgctttatttcctggccacttcccacaagcatagattctctctatgtgagagtcctctctcctagctgtgcagcttaggaatggatgattaattgtgctctgctctgctttgctttgattctctctgctcataaaggtttcctgcttttgtctttgtctttacctctctccttttcatggatacccttctaagcggttgcagctgcactctatagtcactaactaaacataacatggcaatgcatattcacacgttttattccaagtccaccatacccttcttcttctgggtataaaggggcatcactatcctgcattttcttcattgcagaacctcttcatactcattgcagttgcagtacgtgc

SEQ ID NO: 25566 - DNA, 1040 bp, Glycine max
  Intron number 1 from transcript Glyma15g18560.1 (locus Gly ma15g18560) derived from phytozome v7.0 (chr-ID Gm15; pos 15386743 to 15387782)
gacgtaatcaccggtaagaaaactttccattcaaccagttaacttacatgtttttagttttttagcttccaatatccaatagtttataacttgtaagcttcaattttatgttaatttataagctagttttaccctacttttgaaaattcaaggattttggtactacaataactcccttgtcaaactcgttcaattgttggcttagtatcaagtagactcttggatttttaggtgtactttaacaaccatgttaatttaattgatcagggttttaatattatggaaattggccattggacaacttggaatggaaggaaagcgggagatggaaagggaaaagaaattaattagaataattgttaatattagttgcgtgaaaaaaattaaatttgctgaattaaattatggttcatcacgactctatttgtggcaacaccaacgtgccgttttcagaacttcattgcaacagcggttatagtggcgtttattcaattcatattttaatgcatcagactgtgattgcgattgaaattttatgaaatcttgttttataaacttgttcttttgattaggaaacttgattctattttatatatatttaatgtaacgccgaattaatggttgataaacgagtctttgtctaaaattttggcgaatgttagcaagcgttttccacgtggtcccgtacgtgtttgaaaaattcttaatcatggaatcagttcacacgggcagtcatagactcatagactccaattcttgattaattgttttcttattaatattggtccatggtcttattttggtcaattctttttattaaaaataaacgggctgctgaattttaatttactcaagtgtttgttaatgaatatgtgtgcatgcatgcaattatatatatatatatatatatatatatatatatatatatatatatatatatatatatatatatatatatattactattatttatttgtgttttaatcaaattttggtttggttcaggaaagggagaatttgtgacttgctctcagcagacg

SEQ ID NO: 25567 - DNA, 881 bp, Glycine max
  Intron number 3 from transcript Glyma13g44300.1 (locus Gly ma13g44300) derived from phytozome v7.0 (chr-ID Gm13; pos 43778641 to 43779521)
cgagttctggggtgacaacggctcttcaaagggtatttgtttgtgctacaattgcttttattaactgtacatggtaaataccgttagaatttcatcttgggaaggctgtcttgttgattagacaaaaaacgtgagttgcgatatatggtatgggcaagggattgttgaagcagcagttgtatgatatgatattaataaccaaggtttaaatatggttccgttacacaaaaaagggcacaccaaaatggtttcatctttcaacgatacctttacaggatgatattgtggagtgaaaagaaatcaagtattttggccgcaacacactaccgttcgcatcttcccaatctatgctcagcagctattaatgcgacttttgtgcgtcgagggagaagagttgatagtttgtgtgtgtgacttgggtgggcaaactgatgagttggatggttgtggttgtgtgtgggaaggggattatgggggttggaattttgaagcagggttttttgactctgtgcgcgtgagagttggatgtaagtatggggtcatgggttggggggatttgggctgaatgggttgatctcaacatgtgtgtagtgagattgagacgtgtggctttggggagtggggattgggaaaataggatgggattattatataataatacatgaaattttaatataatttgtgtcaagatgtgcgcaattcacaccgcaacgaccacaatccgcattgcaaaatctataatatccataagcacgaaaaccttaacatgactgcaactgcaactgcaatttaaaacattgttaacaactgaagtgtaagtttttagcttgtaatagtagttttcctaactcataagaggttttcactttcaggaaaatttg

SEQ ID NO: 25568 - DNA, 899 bp, Glycine max
  Intron number 1 from transcript Glyma14g07480.1 (locus Gly ma14g07480) derived from phytozome v7.0 (chr-ID Gm14; pos 5664585 to 5665483)
ttctcctccgatcacattttctctctcttcgtttggtaatctctctctctactctccactgtaattgtagtgatccgttagcgcaattcagattactgtatcgttttgtttctccgttttcgaatcgaatgttgtggtgttagggtttaggattgaaatgcgagtgtctgtgaatggatattcggggagtgtagtgcgggtgataaccagatcttgctgttttgttttgtttttccttttttgcttggattttttttggggtgatttggctgcccggcttcaatttcgcattgaatctgttggtttatggattttatctgcgctgtttgttcttattttggttctgctttgatctccttagtattgcaatgtttatctgtcttgacgctcgtgaatcatgtataatgcttcgaattgtgctttctcgtttcgtgtctagagagttgtgtgtggtgatttttagtgtatttggatgtcatgtttgaagtggaaattcagttctaagattggaattggttttggaaattcgatttattattattatttttcgaatgaatgagattgagaacaagaaagaagagaatgttgaatttccaaaattaggggagggctggaaaattaggagggaatcagaatgagaactaatcatgtttgttctatggactaatagagtgtatgcttgtttagggggaaggggatgttatggcactgcaccatattttcatgactgtgtctttgttgttaagttcagatcttgacttaagagtgtgctttggatcttaaatttattctttacattgaacttgttttcagaagaaattggatggtgttttgagcagctcttattgttgagtttcattggatgttttcattttgatctcagactatagctgacaagg

SEQ ID NO: 25569 - DNA, 397 bp, Glycine max
  Intron number 1 from transcript Glyma14g20430.1 (locus Gly ma14g20430) derived from phytozome v7.0 (chr-ID Gm14; pos 23490942 to 23491338)
gaaagaaaggaatctcaagactttacagttggcaggtacacattttatatgaagatgcttctcatgtcatcacttctttgtagtgctttaccatctaaataaatgaattccttgtgttaatcatggctgctactttgtttttttttcttctactactagttgttttatcttaatttcttttcaaaagttgtggctttgtggttgagttgtaactgagtttgattatcccttttggtctggaatttttctcattgctccttagccccggagtttaacgtatctactgagaaggttctttaaaatggtttattttaaaatcttattgtttctggcatatgtaagtttaataaggctttttatttattttcctttttttaggttgattgccttcgagtgg

SEQ ID NO: 25570 - DNA, 806 bp, Glycine max
  Intron number 1 from transcript Glyma15g10750.1 (locus Gly ma15g10750) derived from phytozome v7.0 (chr-ID Gm15; pos 7813215 to 7814020 reverse strand)
gagcagtttcggatccttcgccagaaaggaactgagtaggttcccaatctcttcttaattttttcaattattcgctttctctgccctatcatctgattatattatattgtgaaatgttattttctacttcaaatagtctctcttttttccctctgtatgaagtgcgagattttttcgaaggtagaaattgaagtttgcgttcatagagaaggaagcgtctctgggtgatgggtgatgatcttttagtggcaaatgaatttgattgctctcccgtagattcgtttctgttttgtgcagcttttagttagttccattccaagcactctcttgttggtagtgttttattgtgaaaaaatagaagtgctatttatttgattgttaaaatattgacttgctccatttattagaagtttcagtcctataggaaatttggaaaaaaaaaaaggtaagttttagttttttgtgacattttatcactgaaattttctgtagctgcatcaaaaagttttttagtgttagcgactaggtccaaaatttaacttttattatgtatgtacagatactaaaactaaacagtttttacaatagaaataattataagggccaaataattcaaccttattttatcttggataagatgtctatagatgtgtgactgtatgccgttttggcttgtccaattttttaagtgtaatacacttagcctttaagccatgaaattgatttacatgagttgaattgtaactttgcatgcaccgggaacatgtgcagattgaagggtacaggagaatataacaagttttttg

SEQ ID NO: 25571 - DNA, 357 bp, Glycine max
  Intron number 1 from transcript Glyma17g01250.1 (locus Gly ma17g01250) derived from phytozome v7.0 (chr-ID Gm17; pos 732581 to 732937)
agtgcaccttgaaagaacagcttgaaaaggataaggtttcatcttttattctcaaagatctatatatatatatatatatatatatatatatatatatatatatatatatatattatgctttgttctccagataaaacttagatgcaattctatagatatttttccatcaaaatttcagttttatgttgataatttgattaataaagatttgcattaaaagtcaacatacgttaactctaattctagtttgaaaaacaatgtcaaaagaacctaattaaggaactgttcttaagttttttccttattcttctgtgtatcatttatgcctgtgttgtgttttctgcttgagttcttagg

SEQ ID NO: 25572 - DNA, 489 bp, Glycine max
  Intron number 2 from transcript Glyma17g01250.1 (locus Gly ma17g01250) derived from phytozome v7.0 (chr-ID Gm17; pos 732991 to 733479)
acttctgttggtggtaattgtacttgttcaattgctatcctttaaagttaaattggtgattcggtttcttctgatttctgtttgtccagatcatcttgatctcaaacaggagtctagtcgtaagctttttaacagtcaaatatgatgtaaaacagaatgttgttcaattatactgtgaattgataatagatttaagaaaaaatctgtaacatcttttgagacatgaataaaaaaaatcgaaacatttctttatagttttctgcccctaatattgctgctggcttatcctattgattatactagtgttttgatggtttactgcatgttaagtgatgattttttttaatttgtggttgcatgttttgttgcttcccctaatgacagtaattttgccatagaattgtatttatcagttctcgacttaacttttgacatgtttttgtgaatacttaagaatctctggagccagaagtgaagatactgagcctt

SEQ ID NO: 25573 - DNA, 729 bp, Glycine max
  Intron number 1 from transcript Glyma13g40310.1 (locus Gly ma13g40310) derived from phytozome v7.0 (chr-ID Gm13; pos 40818956 to 40819684)
ggtgttggtggagggcctcacccacaacaacacaagtgatggaaattattaataataaagaaaaaaagataaagttaagtgcaaagcaaaggagaagaaagagggtgggggagtgcgggttctgtactgtcttggcttgtcccccccacccaacacacacgcacacacactctctctctaacataacactcccaacccaacccaagtccaaaaggcactaccacattggcttttgttaccttttatttctgtgccccctatgcaattggctatgtctgatgtttctgctccctctttcaagtaccttcaaatgggagtggaataatactttgaatttcttgttattatttgattgacactcttctcttcttcagttcttcttcttcccaccgtgtcctctgttccactcctcccctgtttttattcttcttttctcccttgtggtgtccctccaaacataaactcctttttcatgatttgacctcatttccattttgttacagttctcactttctgcctttcctttttttaaaaacccacttgattggttgcactcttggcctcctttattctctcttttctctgttttttttttctctttggtttcccacttgagtcctacttcagaagagaaccaacaaacaacaaccacactggggtgtgttcatggaaattgatctgaatgatgatgcagtgacgagtgaggctgaaaagagtgcgtcttgcaat

SEQ ID NO: 25574 - DNA, 530 bp, Glycine max
  Intron number 3 from transcript Glyma13g20120.1 (locus Gly ma13g20120) derived from phytozome v7.0 (chr-ID Gm13; pos 23575715 to 23576244)
cagatagttgtgtgttgtcaattctgtgcaattttttcctcttttctctctttcttttgatcaccccggactttggtgacttttttcttctgctctggactttctttttgagtaatctgtttattaaccattcgaattgtatatttgctctcatttctcttgtttccaacataggcagtcaacttcttagcaacatagtttagtagagaaaacagtctaaactcaaattgtatgtcaatgtttcttttctaaagataatttaatctatttgtgttgtcatccgatgtgtgtgtgtgttgatgcagcagaatttgggtgaatcttctatgacgactgtgatgaaatttattttgaataggagaaacatgtctttagactgtctatgtgaataagtgtttgatcaataaaatgctgtgcagcttgaagctcccaatgaaggctatcatggaacagatgactggaatttaaattattctaattcccatggagtatcagcatctgaactgcatcagaaactaagccacttgctg

SEQ ID NO: 25575 - DNA, 1067 bp, Glycine max
  Intron number 3 from transcript Glyma16g03730.1 (locus Gly ma16g03730) derived from phytozome v7.0 (chr-ID Gm16; pos 3121849 to 3122915 reverse strand)
cgtgcaatctattgtgactgttggtggtataggaggtgagtattaaatttaattgaatttagtttaattttagattcttaatttttttagcatctctctttttcctatatctttggttttctttaatgttgttggaggcaggaaaactcttgtttagatttaggtttaaggaaagaaaagttccttataggtatattaatttggttgaaagttgacaccatcagcactatagggatcaaatttgacaaaataagttaaattggtttataatactttggttcatactgtttttgcagattttattggtatatgtaagccaactgaaaggattggttggggttgtgttaatggtgctttgtgtttgcaaaatggttcaaaagtgagaggaagcactgcataagttggttttataaaaataaattgtataactaggaagtacaaatgccttgatctctaaagagactgcaagttctaaggattcggctcctccaaagtgagaggagtgcattttagcaaaataacagttgagattctaactaattttaaagtttcttatacatgtacttgattttatcacaatcctcaaccaatagttatacagttgagattctaactgattttcttttttctatctatagttgtaacttgtaagtgcactttatcttttaaaatttagagtacacccattcacttagaggagttggatacttggatcctacttctagttgtaaaagcaaagtataagatcaatagtaagaaaaagaaaggaatagaatacacacatgcacatatagtattttcttgtcttccatttagtggaaacatctgctatccttaatccctacctgtcaatcctgcttattgcttaagagtcttatactaaaacatgtcaagatctctatattaatttctttattcatttgataaatgttttattatgttgtttttccattccttaataagttccactcttttttttctaccactaaaataaggaatgcaagatttcatgtttctatctttcttatgcaggtgtggctactgcttttgctaccaaggacattctt

SEQ ID NO: 25576 - DNA, 399 bp, Glycine max
  Intron number 1 from transcript Glyma17g01640.1 (locus Gly ma17g01640) derived from phytozome v7.0 (chr-ID Gm17; pos 996772 to 997170)
tgcatcaaaatccagttcagtccttggatttggaggtactactaatgtctttttaagcttttctgtttcaactttacaacgtatacacttggcaaatatttctatatttgaaagctttccatagttttattttatgagttgtgtcttggaataatttatacgaattgatgatcacgtgcccgattgatgttgtaatatattttcaaaacaagtacttaaatttcttccaatatgtgtgcctaagatcaaaatgactacaaacttatccctagatttgttctgtggcaatgatttattgataatttgtctcctcatatctaaaatgaaaaaagattgagatctgatctaacaaagttgaattaataatattattttatgctgcaaaaggcatcaggaaac

SEQ ID NO: 25577 - DNA, 736 bp, Glycine max
  Intron number 3 from transcript Glyma15g25100.1 (locus Gly ma15g25100) derived from phytozome v7.0 (chr-ID Gm15; pos 26394945 to 26395680)
ctaagtttaagttccctagtcgtcagaagatcatagttagctggtgtcagaccctaatttcatatgggggcaatcatttgcaaacatttggattctttctagccgaattgagctgcttaacacttgattttgcaatcatttcaccattgaagtcatgattttgcacacttgattaaaggctgttgtcccttgtgacagatgcagggggtgctaataccttccccacacataaaccactcccgaacctttattctttaaatttgctgaccttttttttgtttttctaacgtttttctcaaataaacattgatggtgactcccacgtgttttcctttattggaagacacacccttgaatctcgcgtcgccctcccaccgatagtaggttgcgacaactgaaaatggtatgtattaatttttaattgttttgacagtaagctttgacatctgaacatgaatacttctatatcatttaaacaaatattagacttgagttgagttttagccattataccttgatttgaattatgagcaatattttttatatttcttgaagaaaaaaaaacttgtattgttattgggttgtgattaccacctgttttatcaagtatttgattttagtttctgtactttggtcctttttcctatgataccgtttttcatatttggcttgaatgtagttgttttaaatacttgttcaagggtttcaccaagtttagtcgtgctgattatcttaa

SEQ ID NO: 25578 - DNA, 527 bp, Glycine max
  Intron number 1 from transcript Glyma17g01850.1 (locus Gly ma17g01850) derived from phytozome v7.0 (chr-ID Gm17; pos 1150263 to 1150789 reverse strand)
ttgctgcgctcagtctctgcggctgtggcttgtcagtgagtgctgcttactcttttgatggaactctcactcttgtggtacctttgcaatttgcattccgtggtttataattataaaactgcttccaagtagttttcgaaattgaaggagttagtgattttgtttgttctctgctatattctacagtaatataccaaaagattttggatataagttaggaacgaacttttgaaaattccaatgcatgttcctgaatttcaaggttcccattgaagtaggaagaatttgttgctttgagaataaaagtacttttgaactattccaattggtatccaaatatacacttaaactgtattattatgcttgcttgccttgttttttttcctcccttgtgctcgggaagtgccttggattttgtaattttggtggagtggaaatcaaatattattgagttggagtgaaatgttttaaacacattatgactatgtacaggtattaccagtagagcttacacaattgccacgcct

SEQ ID NO: 25579 - DNA, 583 bp, Glycine max
  Intron number 2 from transcript Glyma13g24630.1 (locus Gly ma13g24630) derived from phytozome v7.0 (chr-ID Gm13; pos 27980833 to 27981415 reverse strand)
acgacctgaagctgtaatcatttcactttctctgcaattttcatttgtattactcttctgattgtgtgtcgtgtgttgtgcttagaggaaaaaccgttgctttttaagtggggatgctcagaaacgaagctttacttcagtgttgctttgtgctctgtgtttgggactccttattgattacgatttcgaatttgccaaagggattttgagtttaatcgttgctatcttagggttgccttttttttctattaaaatttgttagctttatgattaacctgacacataaagctgtagtacaatcatgttagttgcttcttcatagatttgctgatatgcgtgcataatgaacattatgtcttagttgacttgatattcttgggaatttgaattttactattactctgtgtagttactatggggagttagtttcttttggtggaattttatgtgacatgttattcttttttttttattaattggaaaattttagttgttagtattgttagtttgttaatctgttattgtattctattgttctatatttgcagtcgggcattttgggacaagaggatctcccaggagg

SEQ ID NO: 25580 - DNA, 641 bp, Glycine max
  Intron number 1 from transcript Glyma14g12370.1 (locus Gly ma14g12370) derived from phytozome v7.0 (chr-ID Gm14; pos 11118028 to 11118668)
acagcagctgctgctgcttcagtttctattttcaggtacttttctaacctttgattggttttgttcttgtgttgtgattattgtggtgtattctggttacttatgagtttattgaaatgaaagtatgaaaccccttcttccagtgagtgtgtctttacccttattgttatcccttttgtttcatttatcctggtgcgagggtttcttctaaaaggtttagtaagggagagggaaaaaaggaagaggatattgctttgcattttgaagtctcaagtttcatgctttcttctaaaggatagcttttgaagctacgagggttttttattttggtgggggagggagttttgcaactttaattggttatcaaaattcaagaatgagccttgcaattttggttgtaaatcttgatggggttgaggaaagaaagggaaagttttaatctttttgggtgcagctaaataaccttttgggttattacttattagttcagggccacccatttaatttgaaagtcttcattcacatcaatttggtttttttcttatgatggtataggctttgaaagtggcaaaattgatttcttgttaacgtctaagcccctttgtttgtttctgcagttgtttgctccaagtttctgatca

SEQ ID NO: 25581 - DNA, 932 bp, Glycine max
  Intron number 1 from transcript Glyma14g06450.1 (locus Gly ma14g06450) derived from phytozome v7.0 (chr-ID Gm14; pos 4709920 to 4710851 reverse strand)
gggtaagcaaaaaaaaacactcagctttttgtgttttcctatttgggttttgtcagagacagtttgggtctacgagatctggatttggcattgtttactttccaattgggtgctcttcttttctccctagattggattttactcgattcattcccttattctatttttttactgtatttgcttgctgtactttttcaattgcggtgtttggttttattttacttcagtttttgcaaaagcttggtctactcatgctagttctcgtttattgttatgcacaaagggttaatcgtaactgaatctgtagtgatttagcttcttcttggttttctagtttgtacttttggactcaccccccaaagaaaagtctgagttttattgcattttggttgaccgtgaagatttgtgactcaagttcctaatacaaaatgataacacgattgaggattagcatttttctcccctcaattttcagaatggattcatcatttatgcagttgagcctttctcttataagttgcttcttttgggaaggacagggcattgcaaggcatatgaagccttttgatttatattccattcatggaaataccctttattgttggatacactatatagtgtcacggtgtctttgggatatggcattgctttttagtttttacattggttttgattgtgtttttgggaatcagtcatcatttagattaggatcttcttctctagtgccttaatttggtaaaaatcaggccccgagatattacacagagggtttcaggggcaaaactttgatttacatattgaatttcatccaaatttttgacaagtcattgttacttccatcaatattgatattgtatcatgcttaattatatgcatttgcttattctgatcattgtgtgttgtatgattatttcttccatctcaggtgcacc

SEQ ID NO: 25582 - DNA, 488 bp, Glycine max
  Intron number 1 from transcript Glyma13g44420.2 (locus Gly ma13g44420) derived from phytozome v7.0 (chr-ID Gm13; pos 43858129 to 43858616 reverse strand)
acctttctttccgtgtgtgtgagagagctttgaaggtgagagtttctccaaaccaaaccctttctctctctttcaagtttccgaatctgttgctttaaagtctgtaacttttatgtgtattttaatttcgacttttccttgtttgtttccttttatgaacactttttgatttttttctcttgcgtcttggattccctcatgggattaaagctgctttcttttgttgccctttgatcttatgggatacactcaatttcttttgccctttcgtttcgtttttgcccctattaaccttgatttttcggacatggaaggttttcttccctaaatgctttgctggggctagtcaaatgattcactctcggtgtggattttcttttctgcatttttcgttactggtcgacgtgcaatttctctaaccgctcattttttaaaataattgttttcccgcagatctagtttatagttgctcattttggtgctggtct

SEQ ID NO: 25583 - DNA, 440 bp, Glycine max
  Intron number 1 from transcript Glyma13g08880.1 (locus Gly ma13g08880) derived from phytozome v7.0 (chr-ID Gm13; pos 9627966 to 9628405 reverse strand)
gcttttgtgactcaagttgcttatgtgagtgatgatgtttctttccctatacaatcagcaacaataaatatatactgaaaactccagctgcctgctatagacagtgattagtgatcatataattttattatcatttgatactttttgcttttctactttttttctacattttcttattatttagattaattacgtttttttatccgtacaatatacgaaatatattcgtacttaagaatttgttgtcttctctcacccttgttcacagtttttgaaagaaagcttaagatatgttattagaatgagaccaattaaatataattatagttcaaatgtgtaagcaacatatatattatttactctcccctttgacttccgattttttattttctttgacatctacagggtggcggcgaaggatcacttacgccccaaggtac

SEQ ID NO: 25584 - DNA, 718 bp, Glycine max
  Intron number 1 from transcript Glyma13g26730.1 (locus Gly ma13g26730) derived from phytozome v7.0 (chr-ID Gm13; pos 29929044 to 29929761)
aacaaagagctttgataccagttcttgtcaacaaggtgatttcatttttctcttttaattcaaagatgtttactacaatttcacaaatagtttaattaagtacttgtttaattaaggtttttaattgcactggtattgtcgtgttcttggatattgtgagaaattgcaacaaatacaactcatgcagtcacaattgtaaacactcggataggccaaaatcgcagctgcagaccatttttcaaaaccttgatttccaggttttaaattatggtcgcagtcgcaaattcattgtaattcttgacattatgaaaaattgtagataaatgtgactaatgtgatcctaattataatttgcagacttggttttaatattttatttataaatttgttataaagttggataaaatatgtttttaatctatgtactttcagttcacttgattttagtatctgtacttcaactttgatctatgaatgtagtgattcttgtccctccgtaaggcgataatcttacgtgaagaaggactaaaaaaaatttatcctataaagtttaataaaaacaggttagaaaagtgttttgaattttgattaatttttcctagtagttgctaaaataagttaacaaaaggttacagattttttctttctttggaaaaactctagcgtgtggtaaaattttaggagcttggatgtataagtgatttttgttgaatcgcag

SEQ ID NO: 25585 - DNA, 819 bp, Glycine max
  Intron number 2 from transcript Glyma15g41280.1 (locus Gly ma15g41280) derived from phytozome v7.0 (chr-ID Gm15; pos 48407427 to 48408245 reverse strand)
tacttgctcttgcagcaagagattccattgttttggtacatatttctttgtttccaattaacttgggtctataccgtatcttgagtttcagtttatgttgatagtttaggatttgttattctgattgtagtatgatagcagatagagtttttggatgttaaattgaagatctgaattctgatgcattttgactttaattgcaagtttggaacacttgtaatgcattgcttggtcctgcttctctatcctgaaacttattagccatcaaaataatataccaaaatgtaaaacaatagtgatgttttcataatatttctggaatagtttatacttaattacttttgtttttcttttctgaaataccatcttttactagccagagagtgatggtaagttgttccttttcatgatatctttctcacccgtttgttgtattagtaaagccagttataaacaagtttactaaattgtttgaattcaactttgtttatattctctttcctacaactgcttgttggtttgttgcaagtttgtcttgacttgtttgctttctctctcttaatgtcacttttgtgcttgttcaatcatgtgtctagatagatattatccatgtcctggataagataagcaagtgcataatttttccttgaattcaggcatattgatattatgatttggggcagccaagtcttcaagaatattcacttttgctgtatgtatatcacacttcatagaagttcagcatcattgtacttatgatattttttgtggatctccattgtaggctggtggacctttctatccagttttaacaggcag

SEQ ID NO: 25586 - DNA, 981 bp, Glycine max
  Intron number 1 from transcript Glyma13g25450.2 (locus Gly ma13g25450) derived from phytozome v7.0 (chr-ID Gm13; pos 28695329 to 28696309)
tccacttttcttgcacacccttttgtttttcccaggttcttgtccacccccattgcccctttccttcctctgtttcgtacattttctctgctgggtccagtgatttgattcaggggaagatcttgaaatgttagaaattttttcactttgtcttgtctcgggaaaatgatgtttcgatttgtgacgccaatgaaatgaaggtttttgcggtcttttttattttattttattttggggtggaagtaaaactttactcttctttatgtggcgatgctgaatgaaagtttagatgggttagatctaattgaaaagcttaaggggttgttttctctgttattttatatgaagatgttaaagaatgagtcaatttcttcttttcaccgaaaaagtatttatcttgttttaatatagcaattggactttgcttgagaagaatggagttttggttgttttggctagctatggatttccccctgttttttcattgtctttttcatgcgatcctcgtgtcggttaaacccaatgcatgcagctctgttttcgtgttccatgaggtgcttatgtgttgtatcatgtaatgccagttttggaatttctttgatatgtgtcttttgtttctgttttatgaggaggtttgggtggtgctgaaaagtgtgtgtggattaagcaacttgtgatcattgccaatactctaagcatgtttctcaaattcacatgtattagctctttcttgtcacactgctgcatgtgcatcaatatctcactaccccttttgttagtcctcaatctcctacacaaaagtgactgtaattatgtatatggcatttagttctgtgcattttttctctgttttggaccttcggggttgagttggccagtgattaagctcaagagtcaaaagcaatccttttccctttactcccgtgtgttttgtacgatgaaatgatttctgatactttctattgcagcaagcagtttgtg

SEQ ID NO: 25587 - DNA, 541 bp, Glycine max
  Intron number 2 from transcript Glyma13g19030.1 (locus Gly ma13g19030) derived from phytozome v7.0 (chr-ID Gm13; pos 22621619 to 22622159)
tacggtactatgttaaacttggtaaggtattataaatatgcataatgtcaaaaataggattatttggaagaatcttttgaatctaattagtctgatgcttcagattaaaagagtttcttgtgaaaattaatatatttactatatttgatgcctgctttactatgatagggtaaaagtgtttaatgtggtatgaaaattatttggactatatttgtttctcgatgttatttcaagatgcccttgagctcttatttcttaaatattttctgcatccttaaggtattttagggcctaatgggtttagttaatatttaatacactgagtgggactaaataaatattctttataattgaaaattcaaagtttcagctggcatgagttcaatccttttcctgattaaattacacggaattatgcgaaatagcatttccccccgccttgttatctaatgtagttatactatattataataccatacactcattacgtaaaaaatttctggcagcttgtagccaaatctgtacagatccattaactgca

SEQ ID NO: 25588 - DNA, 1012 bp, Glycine max
  Intron number 5 from transcript Glyma17g03260.1 (locus Gly ma17g03260) derived from phytozome v7.0 (chr-ID Gm17; pos 2167998 to 2169009)
caacagcatccaagcttatattctgttagaaaatatagtagattatgcaaaaacactgaactgccgtacgcttagggttttaagaggaagaaatgaaaagaatctcttctttttttaattttacttggtaactcatacaacacacagtactttttttttttttttgtgttaaaaatacgacatactacttcttttgcaactaatttgtaacatttcctatgttactcgtattgcttccaatatagttatccgatcagtttattatttagtgataaaaagagtgctaacaatatatttttttaacaccctagataaaaaaatatattctccgacaccgccttaaagcaacatatgtgatattttgatcaacgtgcccccctttctatttaactgtgtgttctccttctaattgtcttaaaagttaaaaactgattttggtacttgttaactgaaaattttgttttaatgtaaatgtatagttaaagggttataaggttgactttgtgtggagcaagaagggagggaatgagagattataagttcgaatcattttgttaataaaaattaacaactaatattgatcgataaaaaaaatataatttcaattaatttaaacacacatcttaatcaattaaaattaaactaactagaaaaagttataagggcatgtcaattatatcttccacatgagaatgtaaatttggaattaccaaagtgaggccaacataattacctcctactagcattggttccttgttaaggtttcttaatattttattattacttttagcctaagaagccaacattttttattttctttggtgagataagaagccaacattgtattgagtttgcatcacatcaaactagattaattgagatgttacagggtgaaacttactctgcctcgtgttagcgtgagtttttatcttttcccctcctatattttacataccatatgtccgtgacctttttagaacagagggccgagaaaaatattttcaacaattcg

SEQ ID NO: 25589 - DNA, 464 bp, Glycine max
  Intron number 1 from transcript Glyma14g00900.2 (locus Gly ma14g00900) derived from phytozome v7.0 (chr-ID Gm14; pos 476410 to 476873 reverse strand)
agaatacgccttggatcttattcagctcaactcaggtatgtatgtttcctcccttcaccttctctttctgcctccttccatttcttatacttatcattcttccttccttaatccgttaagtcaagcaatttgcctttcaactgtttgatcaaagttgccaatgaaacaaatagctttttttcatctttgcccaataattctaacttaactcatctttcactttttgggttttttaatatacaattagatactcggtcattttgcatttttacatcattttgaatgttgaaatttatatttagttgatattttgaattttgcatttactaaacatgaaatgaacttacattttgtagattcattgaaatgcttcgctgagagttgataatttcttgagttttatgtgatatgccaaaactgacacaaaaaaagtgttctttttttaattatattgtaaaacagat

SEQ ID NO: 25590 - DNA, 453 bp, Glycine max
  Intron number 2 from transcript Glyma16g30690.1 (locus Gly ma16g30690) derived from phytozome v7.0 (chr-ID Gm16; pos 34225896 to 34226348)
tgtttttaatactaacctagagtctacagatcaaagttaattaattgctgaaaattatgttcattctcattcttggcgctgttagtccagtgtgaaaacggacaaattcagtttcatgttatatatggctctgtatatgaaaaggaaattaaagaaaaagtagaatttgattatggctaatttcacccattatatttattacaagaaaacctttagataaaaattattttttggtacttttagcttggtcgtaaacattaacattacatcacgcacacaaacataaaaggcaaaccaaattattttacatccctaaattttatgaggaaggatgctataaatattaacaatacatctcacacatacaaagacaactaaaattatatcactaaattgaggtggggatagttttgaaaaaaaaaatagtaggtgtggttgtgtaggtgtgttttt

SEQ ID NO: 25591 - DNA, 882 bp, Glycine max
  Intron number 1 from transcript Glyma13g21080.1 (locus Gly ma13g21080) derived from phytozome v7.0 (chr-ID Gm13; pos 24576268 to 24577149 reverse strand)
ttgagttcagaatttctcatctcaaggcgcttcaggttcatttcttcttcactctttatcatcttccgtttctcgtgttgttcacttacgttgatcaatgtgactagtgtagttgtatctgtatgtgtttccgtgtttgcttaatctgcttcgtcttcggaattggtgatccgcaatgataattcgtttgtgcaatgcagctgaaaatgttagatcctaatttggaaatgaattaacaaacattgatatagtgaggttgttttattttaaattagaaatttattataccaagtgcttcgtattttggaaagagaaacgttgagcggactcagagaacatgtttgtgatgctttgttacgagaggagtgatagctaaatactcctagcatattctctacattggttaaaatttgttacatactaaaaaattatgagtaaaactcattaaataaaaaatgagattcatatcattttgtgattttcaattaattttagctaatgacaaagagtatagtagagattctcttactagcatttgtcttgttatgaatagcttagctgcaatagctctgtggcttctgttctcgtggaatgcagaacaactatacgtgtatgttttaataaagagccaaatcataaaattatttgcgtttaagagttaaagaccatagggtactgttataacttataacattccaataattcgtgaatcgtggaaaaaatttcttttcagaattccatatgaaaatgctttgaattttctaatgttgtttcagtataaggccataaaagaaactcaggttctgtcaaaaatgaatgctgattcaaatgtttgtaggtacccaaggggtgggacaagctgtttgtttctgttgtctcggt

SEQ ID NO: 25592 - DNA, 719 bp, Glycine max
  Intron number 1 from transcript Glyma15g04980.1 (locus Gly ma15g04980) derived from phytozome v7.0 (chr-ID Gm15; pos 3569203 to 3569921)
gacaaccccaggtaggagaattaagatgtaccatgctagatatatgactttattaaaattttaaaatcacaatcctctttccttttctctctttgcttgtttcgtgtggttttacttttgagatcgagtgtggttgatattggtttttaattcttccacaagatcaatttaaagtacgaataatgaaatgatccatattgattcacagtttacacagaacaaatggtctttcataattactaattactatagtttcttggcaacaagtattggaaagttctaaccttgttttcttattatatatacgctatccatggcctttgtctatctgactggatataaatgcatgtgtgtgtataatatctgtgtttccaattgaattctcgaagccgagaatttgatattaaggcaaattattttataactttttcccatcttcatctttgtgaattaccctttaatcgtattattgaaaatttaggtgtcataatatatactttttgcgagtgcttatgaatttattttttattcaattgtttctacctattttccaccataaactctccttttctgatgttatatgtgcgcatacatgcatcattcatgatacacacttggaattaggtggggaaattttatttgtcactttggagtttggcctcaactcaactacttaatccatccacactcatagaattttatatattatgttgcagcaa

SEQ ID NO: 25593 - DNA, 774 bp, Glycine max
  Intron number 1 from transcript Glyma15g17880.3 (locus Gly ma15g17880) derived from phytozome v7.0 (chr-ID Gm15; pos 14364727 to 14365500 reverse strand)
agtacgtgtcatacggtgattggtttctactacgcaatatgtccttaaaaaaacactaaaattggcacaactagcgtgagtttttattttcattcattttcaggtttagagagaccctaacacacttagcgtgatcaagatcaacaatggcggaaaacccttccgaaacggtgttgtccagttcccaacctcctcctcctcctccttcttcttcttcttcttcttctcagaaatcgccccaagattcgccgcaggttccataatccgcttcaattccacttccctttttgtattttgtgtctctcattcctccatcttgcaaaaaaaacccttttttccctataattggaactccaactagggttattatcattattgttcattttatttttcatttcaagtccgtaattgtctgatttggtagctgatagtccaggatcattctcggtacaatctaatcgatacatggtggtctccgggcatcaaatccttgttacttttttgttcctgttcttttttttttaacaattagttgctcacgagacagaattttgagtgaaatcgatattcataagatgggattcgatcggcattttatgtgttaacaacctaatttagctcaattctatgctttaatttgtacatgtgttttgagtttgctgacgtgtgaatgaaattgtgccctgaattgttatttttaaacgcatgtatctgaatcggggtcatggttttgtgtgaatgttgttgtctcaggtccctgcattgtcgaatttt

SEQ ID NO: 25594 - DNA, 555 bp, Glycine max
  Intron number 1 from transcript Glyma13g29350.4 (locus Gly ma13g29350) derived from phytozome v7.0 (chr-ID Gm13; pos 32266058 to 32266612 reverse strand)
gaagcttcgggtatgcgtgtcttatggtttgtttttcatatttgatgactctcacacacaaaaacaaacattaataatttagtagttcgtagtgaaggctaagaatatacaaacacaacagatggcatgttctgtgccttttaacaacaagaatttggatataagtttctttgttttcaagccaactattgtaatcatagatgaccttgttcatggactcaaacacttctccttaaccactgagagccttggttgtgttcaaagctctatatttaggagcatccatggaaatatggtaagtttttttgctttctcagctttccaattttgagttcattttaaataatttctcagctttccaattctgaagtatatgatctttgtttgcctagtgtagtcaatttgttctgaaactttgctgattatagtttatgaaacccattttttatccttcaatagtaccaaccattgatgggaagaccataagtgaaagattgcaccttaaattgattatacagtgtcattcttattttcagatttgttttccacgagttc

SEQ ID NO: 25595 - DNA, 693 bp, Glycine max
  Intron number 2 from transcript Glyma13g38910.1 (locus Gly ma13g38910) derived from phytozome v7.0 (chr-ID Gm13; pos 39627040 to 39627732 reverse strand)
aggtaataataataattacttattatatgcatagtgaattttggatgtgtcatgcaatattgtgttgtgtgtgggtgtgtgtgtgtatatatatgtttgattgatcttgtgatagtactatacttaagtaatcggttaagagtggtgccattttgtttggtttggtcagttattcagtctgtgctggtgatgatatgattcagtaattggaaaattatgtacgatattcagcttttggagggggcaatatcaagaatgtgacactggcaagtgtcagtgaaattgaaagtgtgatgctgctgtctctcgttttcagttatatcttgtgtcctgaaattatgtgtagaggaaaagaaagtaaacttggcaggaaaagtaatttggtctgttgagtactgtcagagaataatgtgagttcggacccagttgggtcagtttcagcattcattcagattgatgaagtgggagagttaaaagtataaactctaataataatggtccaattttcttactaagtttgtctcttttcatgattcatcttaaagtccagtctaacttttaattagcttagatacaatttaattacatttattatctacatatgatcatatatatgtgtgtgtatgtgagattctaattaattttcttttaattgcaggtagaacaaaggtacagacaatatcaccaccaaat

SEQ ID NO: 25596 - DNA, 415 bp, Glycine max
  Intron number 1 from transcript Glyma15g41740.1 (locus Gly ma15g41740) derived from phytozome v7.0 (chr-ID Gm15; pos 48942484 to 48942898 reverse strand)
ctgttactcagcttggagggcctgatagtactcttctctccccttattccctctcacccttcttcttttcttcattttttttagtaccaagtaatttatatatatacatatcatagtattcctatctggttccaccgggattgcctcacatagacgatacctatggtttcttactagaaagaaaatgaaaaaaaaaattctcaacttcgccaataatatataaaaccgttgtatattgttatctgatacaacgattttttatttttttttgctatattgccagtacaagtattgttgtagaccaaaaatgtagtagtacatgtttatgtttggattatattatggtctcaatgatcttttgattaatcatctttttctcttttttggatttgcagaggccactcctaaaaccatc

SEQ ID NO: 25597 - DNA, 856 bp, Glycine max
  Intron number 1 from transcript Glyma13g43760.1 (locus Gly ma13g43760) derived from phytozome v7.0 (chr-ID Gm13; pos 43358775 to 43359630)
ctccaaaagaggccaacctcttcaagcttattgttgtaagctctctctctctctctctaattttatgctcgatccattttcaatcactttctcctgcttccgcgattgcttcttctccatctcgaaaccctagattctcttcttattcctttgtttctttgctgacaatccggtcaagactttatagaaattaaatgtaaaaaaatcggagcattcaggattgactacagtgatttgtgaggaggttcaccgttgtgttgtatttcagctcttctgcaagttagagcgggattggaagttcctaaacttgcgcgttttgaatttatttgcattctctctgtgttcttttttttttcctttttcctcgcggctatgggaagtaggaatgaagtttgaactgctctcacttggactatggatgagattgattttatcaatgtgacacacagaaaacctgacatagtcagtaatggataaatgaatataatgaacatttgaagtagaagggaatagtaaattctttgccttgaatattttgggcattgttcttgttcctacttgttgccattgaagacttgaaggaaggttctgtagaaaaatagctatgttatatgatctagcttcgttggaattccttccagttccagtagcagggttttggagtttggttttctcaatgtgtaaaagcaaatgtgtgcttactactttatgtaattaaattttaatcatcttggttactgggaaatttataagcaactgaatcggtgtggttggggtctacttatatgtgggacttaattttcttgtttgcattgctgcagaaatcctacgaaaccaaacaatacaaaaagggcct

SEQ ID NO: 25598 - DNA, 691 bp, Glycine max
  Intron number 1 from transcript Glyma13g02370.1 (locus Gly ma13g02370) derived from phytozome v7.0 (chr-ID Gm13; pos 2250758 to 2251448)
ccctcgactcatcccacccccacctctccccccaggtcactcaacccatctctctccatacacatacattactactcaattatcattcttttttattcatcttctcttcaatacaagaagctaactagcacttatcaatagcttctgataccttgatttcggcttgcaacgtccaaaatttttagtatttcgtgactttaacatgacgagtaacaattgtgaccgcatctgtcgtatttgtctgcaattctctgctatatcgaaaattgggacggaattgcaactgtaatctaaaaccttcttaaacatattagtaaaggttttaaattgtggtgtcgtgattactggagaacaaatgcgctcgatgcagcagtaattgtggtcgcaaaaacaggggtggcagactgattttttgtttctttttttttttttttttgaaattttgatttttttatgttcatatgaataggaaatagtatcaaaatatttacaacaaactcacctgctcaaccaactaagctaaactcccttaaaattttttggaattttgatggcaatataattgtgtaaactaaggtgcttgaatgggatttgtggttgttgtgtccggtgttaaatttctgaaggttaattgttttatgtggtgatgtttacagatagtgagggcgatatcagggtgtagaagagaggc

SEQ ID NO: 25599 - DNA, 490 bp, Glycine max
  Intron number 3 from transcript Glyma13g23690.1 (locus Gly ma13g23690) derived from phytozome v7.0 (chr-ID Gm13; pos 27044167 to 27044656 reverse strand)
ttcttctccatcttcctctactcgccgaggataaggtatctttattttctcatcacgtgcattcttatgagatgttgtttcatttctggttatttgctctaatttgccattatttgtatacataatgttatgttatttgtgttgtagctttgccaagtttcttcgtaacaataacagaatataatataatattctacccacttgcatatttatatcctagtgtagtcacacctaatgccacgtttggtctctcaagtgagattcagtgctcgtgctcacacataacttattttccccgtgatctctcactaggtctcaattctcacgatatctattgtaaatttgttacccacaaacaaaccaaaaactaatgtaatgaaaatcttaaccattcctgctgatctgttttaactcgatgttacccagattttttttttcttttttgtattggcctattaatcatatgaattattcatttgaattttttaga

SEQ ID NO: 25600 - DNA, 917 bp, Glycine max
  Intron number 2 from transcript Glyma16g05660.1 (locus Gly ma16g05660) derived from phytozome v7.0 (chr-ID Gm16; pos 5002088 to 5003004)
gctttgggatctttagaatctcatcttcgtataatactataatgtaaccttaactttcttcaatgttaaattgcaatcagttacttactagttactccccatgaattgaagaaattctgtaaaaaggctaagtttaccactaccaatgtcacttctacattaagatttggtttttttttttttttgggggggggggggggggggggaaaaagggtgctactaattagttcaataaagccatgtttagtatcacatgttaatgctttataacttaatgtaactactactgtgacttctctatgcttggcgtgcttctctttattcaccaaaagtacatttagaccatatccctatcataagccaacctctttggtccaaagtagctgtgaccttagttgttagttttgtacaattttgaaattcaaaatgcatgattcaatatgatttttcaatccagaaatttgtatcatgtgatgaattacaaatgactttaaatcatgtgatacatgaatgaattggtgcaattccttatcattgatacacaaatcatatgaatttagcatttcttttattttatttttttgcttttctttgatctattctcaccaaactaaaaagaaagcttaaattgttaaatataaaaggaactggagtagcacttctgaatgcaccctattgattatttcactgttctgtgcactctatttggttgttcctttgctctgctattgacctatcattattctgaaagcttcacacactcagttatagcttacatttttgttttgtaacttacagtcaagactgtcaatttatagtttaagattattatattaggcacaatacatcatttgcatgatatgtttcaagaagttacgttcattgtaccgttaatatttgtttatgattatttgcag

SEQ ID NO: 25601 - DNA, 714 bp, Glycine max
  Intron number 2 from transcript Glyma14g36840.1 (locus Gly ma14g36840) derived from phytozome v7.0 (chr-ID Gm14; pos 46129940 to 46130653)
ccttgaaggagcttgaaggaaccaatcctggacaggtctagtctcatctcctacttttattgtttggtatttttacttttgatctttgttgtcatggtgttttggcactgaattgctgtgaactgtaatagccgtatcctttttttcctagctgaagtgtataagatgttaagctggtttttatccctccatgtttgatttgatgaatgatgatttacgtttcttcttcttgctatttggttagagactttgaggtttggttgatagatggatcaatttacatatttcagctaatagatttttgctttaaagatttgtttcttgtcttgtttttttaagtccaagggttgctcttttactacttttctcatggttttaatgtccgtaagaagctcttgtttgctgactttgagtcaaaccatattgactattgtatctaatatctgtttgaattacttctacacctagttattttgattctaaatgtttttggctttcttatgttgcctttttctagttcaatgtactattatgcatttccattacctctggttcaagtgcttgtaacccttaatgcagtagtacctacaagtctatatatattatttatcataaagctactgcaatttatgtttatcttagattagagtgtatgtgatgatgatgatgtgttgctgacttttaatttggttgatttgacatcacagaatccat

SEQ ID NO: 25602 - DNA, 714 bp, Glycine max
  Intron number 2 from transcript Glyma16g01150.1 (locus Gly ma16g01150) derived from phytozome v7.0 (chr-ID Gm16; pos 844763 to 845476)
tgcacatactacaacaactactactactactacatgtaagtctttaatactattcagtcaattagtttttccttgtggcaatgcatgatgtttctagcaccaataagatgcaagaattcactctttgtctgatacacttaaaagcacacttgcttctctctgaaggaagggtgacttaagtcgaaacatatagagaaagacagggagaagacgtgtttatatgttcagcctatttacatatttgtttgggagaaacactttttctctctctcaaacttcattttcttttttcatagtttccaatcaaacaaaagactacataaaaaaaataaacttatttatatcaaaggtgtctcgtatgtggggatattaagaacttgaaaatgttatattggtttgtatatgtatttaataattaacaattatttatatcttttagattgaagaataattttagtagtttttgaaatgctaaaagttgattaatatatacagttttttatttcaaattttgtttgataagcaaaccccactatctgctaacaagttggcgtcctagtagttgtaacttgatccgaggtaaacttagctaagggtattaaaaaattttcagtagagtaacattaatcctttccctgggagttttataataaaagttttcctttggttttctgcacagatcatccaaaacaagagcctagggaagaattcagc

SEQ ID NO: 25603 - DNA, 1019 bp, Glycine max
  Intron number 1 from transcript Glyma16g27830.1 (locus Gly ma16g27830) derived from phytozome v7.0 (chr-ID Gm16; pos 31790170 to 31791188)
agctctccttcaacgccggggaacgacacgccctcgtaatataataaacctgcccctccttttttattttctttctttgtttattctcgtttttccttttcgattttgcttcggttaaaaaaaagggaattttttttgttgtttgaaaagtgggatttggatttttcttttttgatttgggatttttttgtttgcttgtttggtgtttgggaatttagattggtggcttgtgttatgttgtggtggtggtggtggttaaatgtaatgttaattagagaacgttgtattttgttttggtgtttttatttatttatttatttaattgaaatgtgttttcttttgttcaagtgtgtttgtgctcaattttgtattagggtatttggatggatggaaaatatgtgcatcttttttttgtgggtgttttttgtatttttttttcacagattgggtgctgttgtggggaattttaaaatgtgggatgttcttctgttctgacatgcttgagtcagagtttgttcgtaggaagtaatgttcggttacacagtttgagtggtgattacttgaacaagtggtagcttcttcggcatgtttgcatttgtgaaattctgttactttttcttttttgttgactactggttttgttttctatattgtttaaataatgttttcttattgattgtgggatttgttttgacatccttattgacctcatttttagttcatggatattcactgttctgtctctttcttctttcatctagcttgattggttgtgtatagctacaagtggctatcatagtatatatttttgttatcccttttgttacttgctgcgaataaatttttttgcattggcttatggctacgtttttcagagttttagttgtaccatagttatccatgtatcttattggctttgctcttgcattttgggtttcgaccgtgtgtttatatatttgttgtgggatgttcttctggtttcaggaaaaactttatcagtggatttttagacaacaaga

SEQ ID NO: 25604 - DNA, 1004 bp, Glycine max
  Intron number 1 from transcript Glyma14g04410.1 (locus Gly ma14g04410) derived from phytozome v7.0 (chr-ID Gm14; pos 2979152 to 2980155)
ggtttgtttcaatttctctactgcttaagctttacgttatcaaaaacaagtttttactttgggttgtctttgtgaaaatggtagatgaaaatttatgaagtcaatggtaactattatgagtgttttctatgcaacactctattgggattatgggaaagattctgccgggctaggttgaacttgaaaacaacttaaacgtgaggtttttagaactcttgattctttatcgtgtagctattatcaatcagaaaattttatctgtggagaaatcatcatagttatctattgttcggtgctttgaggtttaattgctttgtatctctctctttttttaaaaaaaattattattatttattggttcctaggttttaaattgcattcatggttacggtttcaatggcgatcattgatattgtgggaaattgtagacatatgtggctaatgcagctgcaattgtggttgtgaacttgtgatgtggttgcagagccagagacccctaaaaccttggtgttgtggctgcaattgcagttacaagatgttttttaaaaccttgattggttctttatggtttatttgactgtatgtgcaatttttttttagtcatatgttagttgttagtttgtttgtttttgttagcgggggattcgaatccacaacctccccccccccttcccttctcccttcaccaccaaacataccttatatccccatcttgtgcaatttggtgtcttgtgttcccttgtcctcttgtctgtttctgaagtagtactttttgccacattgctttcttctttggacatagttcccaactccatcacacctttaaaatgtcatctagttttagctttgttcatagcaatgcaatttttcccccctttatgttccttaagctcttgttttaactttacagtcagaaaaaaaaacttgtttccacttcattgctgatactttctcaagtgaactgatgtataccttaatatattcatgcttgcagtcaggtttac

SEQ ID NO: 25605 - DNA, 708 bp, Glycine max
  Intron number 2 from transcript Glyma13g40990.2 (locus Gly ma13g40990) derived from phytozome v7.0 (chr-ID Gm13; pos 41404968 to 41405675 reverse strand)
agtgtgactataattggacctcccgatactctttagtaagttctcttcactaaatatctctttctttcacactaatttatgcgattttgatttgattattgggattttggattccccttgtttgtgcagtgatgatctcgttgcttctttgttctggggttttgggttcccccctaaaaatcacgtttttaattatacttatcggggggttcttcagagttttatgttatttttctttttgaacagatggggtggtttctttttctgccctgataccgtggaatcattaaggtgtttcttttttatattttttgtgagtctttctggttgctttgtttaattctagagacgagattatagttgttgtacggaggcttgacgaaaagaatacagcttatgttttattttattcttttattgcggcttctgcaagacatgatactgatttggttgttcttggtggggttcatttgattgcacttgattgattttcctgagatataggctttgcttttgttcttgttttagaaaatgatctaagtcacaactttcctttccttttatgggattggttttactagtgacagtattattttagtattttgtttcaatgatcttttatagcacttgagtttttagttttactgaccactcggctttcttattttgtcaactttttaatttcgtgtagtgaggggggatttttca

SEQ ID NO: 25606 - DNA, 639 bp, Glycine max
  Intron number 2 from transcript Glyma13g24450.1 (locus Gly ma13g24450) derived from phytozome v7.0 (chr-ID Gm13; pos 27844825 to 27845463 reverse strand)
ccgagcttttgtttcttaagttgccttcttccaatgtaagtttgtctttatgcttatggttttgattatttctttttgaactgaatcccaactactgttgccaactaaatgtaaaaaaatatatcaaaagaattgatatcgttatcatcatcattacaatagtgaaaaaatcaagtgcgatatcaagcaaagttaaaaaaaaatagttcttgtttgggtatcccttttccctgttgatttcagtcacgacatcacagttaaacttctgtttgatcaagtctctactaagcttattttttcttgttttagattctgttttggttgggttaaaactcaccataaacgtttcatgttggtttttgttgtgttagatctcatcaaggaatgtggataactacattcctacataatacctctttcaattttctgatgtttattcccctcttacaattataggataatataaattacttttagatttcgttctatttgaatgtgctggtatctgtattgccgggtttccttccatctaggatatagatggtggaagagcatctgcttgatgttatgttaatcattgtccttattgtcttacttgatatgtgtatgatgttggccaggattttttatctgacatac

SEQ ID NO: 25607 - DNA, 673 bp, Glycine max
  Intron number 1 from transcript Glyma15g37710.1 (locus Gly ma15g37710) derived from phytozome v7.0 (chr-ID Gm15; pos 43602120 to 43602792 reverse strand)
gctacacgccaggaaattgtaagcacaaaacaaattcatttgttcgttttctagttaaattgtatgactaaagctcttccacagagcagttgaggtctttgtgatattcagttagtatctcttttattaattaattcaaatgagataaccttgtatcaagtttggacaatgctgttataatcagacatcagtggcagtgccaaggatgaaggatggcttgcttggactttaggaaatatttgctagatttttttgtagtgttttctgatgggttcctttatggaccttatttggactattatttttgtttgtgacatttctcaaaaagttgaaatttatgcatgttgtttcagatgcatggtcttattttatttttattgtggattgaatatttgaaattaactctctcacacacacacacacacatatcatgactgtttactggtcatagttttatttttctcaattctgatcttgttgcttgtgcatgtctggttttgattaaatttattggattttaatcaaaagttggctttgttagaattaattacattttttaatataaattgatgttatggcctttcaatatttaagtagttttgatcagtttggtaaattttctgctttcaccttgatagtgtacagcatccattagtgactcttcaattagtca

SEQ ID NO: 25608 - DNA, 942 bp, Glycine max
  Intron number 1 from transcript Glyma13g43880.1 (locus Gly ma13g43880) derived from phytozome v7.0 (chr-ID Gm13; pos 43457926 to 43458867 reverse strand)
cctctatcagtatttgattgatcgttttctttcaccatcccatcacagtcacctctatatttgtctttttcatctgttattttttggaaaaaatgttataatttatttgtcattttaaattttcaagatatattttcttaatatttataaaatgttataataataatattagaaagataaatgatatattagtgtttgtatttagtgtttgagtaagtctcaaataagatcattttcaaatgttaataaaaaaagatcattttcaaatgaagatattttttttttgtttaggttgcatatattatccactaaaagtaatcttgttcaagttggatgtaaaagccatactttgggctcagcctagaaaactttagcccagttcacatgatttgttgtttagcccatgaaagcatgtgttgaactatgtcgtattagacattttgtttcattatttcaatgaagctatgtaattgtcgcttgcggcttgctgcaaccgttgttaaacctttgaacatagttaacattacgtatgagataatcatgacaatatcaaacatttcttgttaacgttcattaacatattttcaaattcactacttcgtggttttatgctagccaataaaatgggtgacacactgcacgcaatgttttgcatttcatcaattgccatcttcccaaggcaataaatatcctcgtattcatttctttaaggttttagcttgtccacgtttcaaatttttaagttaccaaccattttttttcttctttttttttttggctttaccaacctttttcattatgctggcaatcatgcataattatatttgaatgatttttcctcgtagacgtacaccgggaggaaaaattcaactagtgctagattatgcaggtaaacggatgatgttagtggaattgtaaaaccttgtaggtgagaatatagaa

SEQ ID NO: 25609 - DNA, 639 bp, Glycine max
  Intron number 1 from transcript Glyma13g21430.1 (locus Gly ma13g21430) derived from phytozome v7.0 (chr-ID Gm13; pos 24924709 to 24925347)
ttcttctgagttctcctcttccaaaagagggcgtggtaaacacaacacaacttttggcaacaacaactaccaacaactctattcttcttttggtgagtagtacggtacaacgttgtctttttttttttttttttttctctcaggtgttgctgctgctgagtgctgatgacctcactcatatgtactaccactgtttccttcccaagttgacctacccgccaaaccaagatccctgttcctagtccaatccttttttttttctctcccttcatttccttaccagcttaccctaatcatggaatctcaaatattcgtacttgttgtcaatagtttcattgtctctggggttgtgtttcagatttgttttttttttttttttaagttttggttttgggttcatggggttgggatcgagatttactctccatttgttaaagcgtgccttgattgatacaaaaggatgagttttttttttttgtttctttctggtaatggccaaacagcaagttggggattgtgatcggttaaaaaaaatgtgaactttacctttttgtggctacttatctaaggttgttgtgtacattcgtttgatttttatgtctagaaaaaaaattgttcttttcgtttggatcgactagc

SEQ ID NO: 25610 - DNA, 864 bp, Glycine max
  Intron number 3 from transcript Glyma15g11510.1 (locus Gly ma15g11510) derived from phytozome v7.0 (chr-ID Gm15; pos 8472193 to 8473056)
gaaagaagtgacattccagacattgataagaaaaagtaattgattttcttactacttctgtcccttttgattagtttccaggcctgataatgttgttttgctgcctgaagttttaatgattttgtgggtggggggggtactgatgttcatataaaataccgatcaagatttaatgattttgtattgttaaagctatgaagcatgtttggtatgaagctttttgtacgccactcataacttctttatcaaatggcatttgtaaaagattaacaagtgaggccagaatgtactaatggtattcttattgcaaaatctactttaccgaagtgagtgtatatggccaagccataagttgttggtcacggtggagtggcctaattggccactgtcactagagccttggatgctactgcttgatcttattaagattagtttgaagaacaattaatagaatacaaaatgtggtttgttaatactataaaacaaagtctctgtttagggatgtctggtaatttgattctggaatagggcatgctgcttatgcatgtgcagaatgactatgaatattgacggttgttttttcctaatctaatgatctcttctgagctatccatctgcgaagctgcctccaagtgagattctagtttgtgttttgagtttgttttgaacattgaagcatataagctagagataagtattgaaagatggaggaccagacttagtttttccccccatattccatctataaatatatttattttgatcaatagttgatctgattctgtgcattagtggtttctcaattggttctcttgttgtgatgatgtagataccttgtccctgctgatttgactgttggccagt

SEQ ID NO: 25611 - DNA, 870 bp, Glycine max
  Intron number 2 from transcript Glyma16g33570.1 (locus Gly ma16g33570) derived from phytozome v7.0 (chr-ID Gm16; pos 36447258 to 36448127)
gttgcaaaggttagcgcattggttcaccatccgttctgtttttatatgtgtggacgttaatattaatataatatgtactttggtacccctttgcaagtgtactttatttttctgttcaaactaatctaatatatgatcctttgtgtaactaatccttataattaagggtttttaatttgtaatgtttgatggtattttggaattagctttcatgcatttgcgatatgcccaaaatacagtttctgtgattatttatgagactattctttgattgttgtatggactttgggatggctactttagaataagctttttagctgtggtgcacgatttggttactagcgttggtatggtacgggtactaggatttgacaaaatttctacattgatggtacggatatgggatggtatatcgtttagagaattctataagtataagaaaaaagtattaaaggctaatgtaaatacaatttgcataatgtcctgactaagataagcagaaaaatcaaacattgaacaaattttgaatgaagtagcagtttgcttcatttctagtaatggacagaacaactcagcatgaaacttggtgttatggatggactgatttgtacctaagtgaggaatctgtattgggtacgtaatagtatagttttgtaggtggtttctttaaacttcaccatccctgattaataagtgttgcaaagcagaattttgtaattcttctgtgttggttttctctcttggttatgtactgcctgtttttgctgttttcaactttcaagcaattttttgtgcaatttgagggattttgctgataacatgccccggcagggatattggcttcctgtattgggtggctgatgcaagcag

SEQ ID NO: 25612 - DNA, 688 bp, Glycine max
  Intron number 1 from transcript Glyma16g05450.1 (locus Gly ma16g05450) derived from phytozome v7.0 (chr-ID Gm16; pos 4760566 to 4761253)
caggttctctctctctctctctctctctctatatatatatatatatatatatatatatatatcgatctgtcttattgtgcttagatttaactctgtttttgttcgattgtcatgtgtttgctactattttgcttcgtgatggtttagatctgcgattaagtcgtggttctcgcgtcttcgtcaattagatctgccacgcttggaagctttgtttacttgaaagatcgttagcctcatatttcgtgatgtttctaggttgatttcatgctttttatttttcatttctagtttcggacatgtgctatcctggtctttcagaagtctcatgactttgcagtttgttttttttctttcccgatcaagtctgttagattatctagtttcatgattccacgagagaatcttcgttaggctcgtcgttagattacaggagatggaaggtttgtttttgtggaagtgctgaatctgtaatgaatagtcgtgatttgtcttgggccggttaggattcggcttctcttaagttgaggtgctggttgtgattctgcgagataatccttagttacttacattggaggacaaggatgtttgtacgtcctggagcgctgaatctgtaacgagagattaagagtcttgtttgttgttgtaacgttaaggatccagttcctcagaagttttactccgttgaggc

SEQ ID NO: 25613 - DNA, 906 bp, Glycine max
  Intron number 2 from transcript Glyma15g01220.1 (locus Gly ma15g01220) derived from phytozome v7.0 (chr-ID Gm15; pos 738960 to 739865)
aaattaatccaaaagataaccatatatcattccaggcaagattttagtatatccgattgtgacttttatttaagtcaaaattgtaaatttcgattttaaatttcatctcctattaatttaatttatgaattaggtccttctattttgtaaaattgtacaatattaatccccagactacaaatagacgttgatcgctacaaagaaatgttgaccgctacgtgttgtgattggtcaatgaaaacaacaatccatttcatctttcatggagttgacatccaatcagaacatgacacgtgacagtcatcatccaataagaacgtgacggtcattaacgtcacttgttatcggtcaacgtctaattgtgacatggtagactaatattgcacaattttacaacataggaggacctagttcgtaaattaaattacaagggatcaaatccgaagagtgactaaaaatacaattttacctttatttaattaaacttcaaattaaatgcttgatacagttttgtacccagataaaaaaaatcaagtgatcatgccattcttaattaattataggagaataattaggagcctagttgctacccttggtcggggaaaatgaaagaaaagtacactccagttcttagaaaaagccaacaataaataaaagcagcggcttaaaatggggttaaattaaagtgccaaaacagacaaaatcacaaacaatgtcttgtagtgcaaaatcgtttgtattagtttcaagttctaattaagctctccccttcctggctgcatgtgcagaaaggacaaaaaacattgttctcattctcgtaatgaagtgtgatttaatgaagtgattgaataaaagaaattaacatggcattatatgttgttgtgatgaattaattagtgtgaaagc

SEQ ID NO: 25614 - DNA, 515 bp, Glycine max
  Intron number 1 from transcript Glyma15g04090.1 (locus Gly ma15g04090) derived from phytozome v7.0 (chr-ID Gm15; pos 2869497 to 2870011)
ttcagtttttgagggcattgcagttggagttgcaggtaagttggttttctctccctcaccttaaaaacaaatcacaagactcttcacaagaaattattacttagtctagtttttagtttataagaaagaatattcataaaatctaactatatgcatgtgtcacgtagagattaattaagacgatgatagtaggaatttatgtaataattggaaccatgatggttcaaaactatgtaaaatttcataatttcatatacaaatctttataattacttttgaacaagttaggaataaaaacaacaatcattttctcaaatcaaataggacttaattagtatttccacgttgttcatttcgtgtggaatatataccaatttgattattacttattgggaactccaatctgtttccctttattctgattatggtttaatttatgatacttcaaattcagattaataataagtaaacttgtttaattaactaatatatcattcaggtactaaggcggacgc

SEQ ID NO: 25615 - DNA, 385 bp, Glycine max
  Intron number 1 from transcript Glyma13g38050.1 (locus Gly ma13g38050) derived from phytozome v7.0 (chr-ID Gm13; pos 38965663 to 38966047 reverse strand)
ttctggtacatttattagccatttaattggacattatattgaattttaattgtctcttattctcttcttccaaatgctacaacggaaaaagaaaattacatgctaaaataattgtagaatgattcaccattatttgtgttgcgcttagtaaacttgtttaagttgtttgtgtttattttaaacaagggagaattcaattctattcaattttttaaacttccatgaatgatgttgtttgaatattaaagatgtattataaaaatattattcactagcctctctccatggattatatttttattttgcctttatatcggtatctatctacctaaatgttgttacccaaacatgctaatttgattatgtatttgttgattgactaaag

SEQ ID NO: 25616 - DNA, 1032 bp, Glycine max
  Intron number 3 from transcript Glyma15g02320.1 (locus Gly ma15g02320) derived from phytozome v7.0 (chr-ID Gm15; pos 1556341 to 1557372)
gccattcaaacagtggtgggtgctttcttaaactggtatggtcttctttatcctgttgatgagattagcatttgtcattacattcctgtggtatgctcttccacacagtctaccagaataacctattaatctcaaaatgattttgcttgatggcttatgaatagtgatctagcttggtccttgacctttctatgtttttgctttcacttcagagttcagatttataggttgaaattcaaagttggttttgttttctgttacatgctgttcttgaagaataaaaaactaaaaattaattattctgtgttttgtttataaactattatttgctcaatataaagtattactaattttaaattaaataaatgatagagaaaggagagggaaagtacaactcgggggagggtaagacatcctaaaaaccataaaagttgaggtgtaacaaagaccatgaaaaagtaaagcatgctgcaaagctacctgcataccagaaattgatagtcccaagaaacagccatgagcagcagcaggactgaacacagaagcttaaacttaatactcatgataagtttaagggaaatgagacacccttagaaatgtaagcattatgatgacccaatcataagcaatttcacatgttttaaaaacagttaaatatttgtcgatgagcatcaaccaagtttcttgtagagttcaaatttaatttgccaaaattagcatgggtatgttatgtgcatatttattattccctaatgtaataaatccgagcaaaacctgatcctgcttcaatcaagagggactctgttatagcaaactgctagagacaataagaattgaagctagatactttatcttgtattattaccattgtttctattttttaataatgtatgctgacatcttgaccatttttatcccatataaagctactatgggatttcgcatttttttatgctgacatcatttttgtgccccatttgttatgtttacttgcttttctttaacacgtgttaagtatgccacagggaaaat

SEQ ID NO: 25617 - DNA, 758 bp, Glycine max
  Intron number 3 from transcript Glyma16g22010.1 (locus Gly ma16g22010) derived from phytozome v7.0 (chr-ID Gm16; pos 25449495 to 25450252)
gagactcttggttactccatcagaaaccaagaaaacatcatcattggtttcattgatactggttagtttgcagccttaccattttgcagaaaagtttcggtcttgatgataagttgattacttcaatgtagcataattgcatttattcgcccacacttgctttattactttaatggcagggtctcagaccctttattcccctccttttagccctagcagacttagggaaagtataatcaataacattggaaattggacttcaaatggcattgctatggtagtcaaattcttactagtgtactttttcagttacttaaatcgtcttcagtagagaaaagcaaaacctaaatatactttttccatctcctgtttgctgttggtataattcctgcaaagagtaatatcaacaaacatcacactattcaaatttgttagtaatcacaaaattatgtgagtcacactccttatttaaaatctcattcataattttataattttttaataggttttgtccgaagaagtgtattgctagccctcttcttcctgcaatatatgaaactcaatcttgaaaacataccttggaaaaactggtataggactttaggcactgcatgctaaaaatactcaattgacatggcagccttaataattggattttgataataaaatgggaatgataatgagtttctttcttcttttttttcacaatcactattcactcaggaatttggccagaatccccaagcttcagtgacacc

SEQ ID NO: 25618 - DNA, 478 bp, Glycine max
  Intron number 1 from transcript Glyma13g28650.1 (locus Gly ma13g28650) derived from phytozome v7.0 (chr-ID Gm13; pos 31652701 to 31653178 reverse strand)
ctcggagggccgacacttttgagaagattgataaggtaaagagcatctagaactcagatgaatagtgcacttaattttgtttccaattttggtttggtgatgttgctgaattctgacatggtcttgatgtctggatttgatttttgacaatgttgagctgttcttatgttctccattgctccttttctcttatggaggatgttgatgttattgtgttgctctttggagttttaacgtaggaagagtttggctctaaaaaattactttttgttgatgttgtttggtttttttaatgcaaacatcgaaaagtagtaatgtggattttagaccttttttttggggttttggattaaaattaaaaagccttccatcaaaatgtctaaaagttatttctcctggctacttgcctggcaaatattaagtctctttttgttgcttttgttatctttctatcagatcgggcaaggtacatacagca

SEQ ID NO: 25619 - DNA, 1032 bp, Glycine max
  Intron number 3 from transcript Glyma15g40380.1 (locus Gly ma15g40380) derived from phytozome v7.0 (chr-ID Gm15; pos 47358380 to 47359411)
agattttgctctgccttcagcttcctcttttgaaggtgaggctattatggaaatgataattgttaaaaaagagtgttttagtgtgttcctagcactccccttgtgtaaacttgtgatggctatttatttggtgttctttttaatgctggggaatggggattgttgattctgctagattacagtccaactcgaagctctgttcagtgtattatattaatgtagattggtgtatgtgttagtcgtggcgaagagtttgtgtaatttttgtaggacaggcgatgtaatgtttgtatgcatgttttgtgtctggggtgaggtgatttcggtaactgcttgcagtgtattgtttatttggtttttagctcaagttttatttttttggttgttaactcaattggttgtaatgggctcttctggcagatagttttccattatagccgaagatgcttgatttgcatgactgcatggatgagctcgctctaatttgtcaatttgagttttttcttgtgagttaccaatagaaattggaatggaataatatcaattcgtataggcacagaagaaagggttctctattgaataaaaccttatacccgagataaggacagagaacaaggaaaggccgaaaattttacttggtacttttgaacaaaaaatcaatgtgatttattttgtacttctcgcttaatgagtgaacgatcatgttctatccagttgatttcattgaagagactttctataagggttatggggaagcttgttaggcattagaatttcaactagataaattttatttgaggttgttattttaccataatgtgtatttagtaatttgaaccctttatagtgtcaattctagttaatattgaattaaaaaaccacacacttccttccttctttttgggtaaactttttttttttaaatcgtctggtacttcatcataagccctctttgtcttgacttttataccacttgatttgatgcttctttctgggccttgattattggttctcatatgtttgatgaagctg

SEQ ID NO: 25620 - DNA, 474 bp, Glycine max
  Intron number 1 from transcript Glyma13g39980.1 (locus Gly ma13g39980) derived from phytozome v7.0 (chr-ID Gm13; pos 40533320 to 40533793)
ataaggacgctgctattgagcttggaagagaattggtaattaatgccccctctcactctcttatttcttcttcttccttttggaccaattctaagtctctaacaaatacataatattgttttctaatgtcatctaacttttctccccataattaaattggatttcttctcatgtgttgctttaagattcttttttcttattttatcttcggggacaattgatgactttgaattacgtcaatttctctctccctctttgtttaatttgtcttacttttgttttctaatttttcagtttttctaagcttacagctttttactactatatactaggatttacaaactggcatagtcaactagttttctttcaacttctctgctttcttagattcacgaaatcagagttatttacatatacatatgctgatgatattgtttggtattgaaaaggtgtcaagaaatattgatctagtat

SEQ ID NO: 25621 - DNA, 722 bp, Glycine max
  Intron number 1 from transcript Glyma13g02890.1 (locus Gly ma13g02890) derived from phytozome v7.0 (chr-ID Gm13; pos 2865623 to 2866344)
ctcaagagggtgggcttcaaacactttctgtcaaggtatgtctcattaatgttcccaaatccacatgaaaagtccctgtttttatttttattttttatccagtttggttggtttagagttgctggctacttctcttgttgtttgattccttatgcattgaaattggtctattagatagtcaatgtgtgtgattggattcacgttgaatcatatagaattatggagaaacatagattaatccgattttgtgtgaatattcttatgttaggatattttggttctcatatttttcaaaaattgctgaattcgtgtctttttatgaaacttaggaaattaggatccagagacgaatttcgccaattataaagcattggtagatcaaaattttcgttttaaaagtatatggcttaagatcaattttgaccaaaaattaaaggacctacaatgcatttaacccaattactaaacttcacaaatgaagaaacctgcatactttttggtacattcgatactaaggttggacacttctgaaattaaacaaatttctcagctgatttgttgctcacattccctgttgcagatttgagaattgagatcttccttctcttgattcctaatgttgtgaaataaagacgttgggttataaggtgtaactgaatatagttttaaagggttcatgttgctaatttgattttgtttattttcccaggtaacatctcctt

SEQ ID NO: 25622 - DNA, 577 bp, Glycine max
  Intron number 2 from transcript Glyma14g40660.1 (locus Gly ma14g40660) derived from phytozome v7.0 (chr-ID Gm14; pos 49664713 to 49665289)
ttctgtggcgtgaagaggtgtgtatcggtaagtgatgaattttcaacaactatatagctatttggagtctattattgctagagaaattaagatacaccgatgagatctcgatcgaggaactattatagtcttctatgatctgatacctaatatctccatactccatatatcagtcatagttcactctctcaaaatgaaattctactccatagtccatagtcacccttcaccttgctttttctgtcatctcttcttttaccttattctattacgtatggttaataagttaaactaaccaaaaattaaatttcatgtgatccgttagagttgaagttttatttttatcaaactaaatattaatttgttagttcttttgttagagttgaagctggttcattcattatttgatttctttccctacttgatggagaaaaaagaaaagaaaaaaaaaaagagagaagagaagctggtttctttgatttacatgaatggtttaattttctcatttttctgattttgatttttgttggttagggttggagctggggcaatttccaccagagctaaactcaccggc

SEQ ID NO: 25623 - DNA, 757 bp, Glycine max
  Intron number 3 from transcript Glyma14g01600.1 (locus Gly ma14g01600) derived from phytozome v7.0 (chr-ID Gm14; pos 928106 to 928862)
caggttagcaatttcagtactggataccgctttcattaagatcaataatcattgtgtttatccactccatgaattgtatttgggcttctttagatgatacatttgatcaaaccatcaaatgtatagaattgaaaccattctgatctatatgaatatagaaatcctcaagggcttttgtcagtggactaaaataaccccttatttttaatagaatcatgaaaacctgtggactcgttagaatatgatttagatgtgaggggtttcattggttgtaacttgtatcatcttggatggctagaattcaaatttcaggcttaatgtcatgcttcaatttctcttgttttcatcatagctcataagtcaaaagagaggaatattctcatagggactcagatattatgaggtacctaagtcccacctcaagtagtatgagatattcggtgaagtacttaagtggcttggttctctccccctgccaaccttttaacagctagctcttaaggcttcatccaacattcgtactaattataaagattccttgtcatttgtttcttaatgttacaaatcttatggttctttcaaaaacactttttttttggtgttataaaagaagaaattcgttatctgcttgttatataagtatggttccaacttcctagggtttatgctatatataatatatggttcccccatatatagagtcattttttagttagttacattaaccaagattgcctttttcttatggtttagcttt

SEQ ID NO: 25624 - DNA, 834 bp, Glycine max
  Intron number 3 from transcript Glyma13g39110.1 (locus Gly ma13g39110) derived from phytozome v7.0 (chr-ID Gm13; pos 39828565 to 39829398 reverse strand)
gcttggaaggaattcaaggacttacgaagctcactgtaagtacctctgggttttattttgttactttttatttttattttaaactgttaataatatattcttttgtgtgtagtttattttctagtggcttagttaatagtaaatttagtggcaacttgaacggtgtatgtgttgttaatagcttttagcttctttggtgctcttattgatgtgttagttgtaagaacagtgatacatatcatttccttttaacagctaaaacatgcggaaaatttcttttttctttctagaaatttgtgttttagatatcttggctctccctaggactaggttgttcaaattgcattggaaaaacaatgttgtagcctgtacagctgtaggaatagcatcatgtagagtcttgagattgatatgattttaacctcaacttccaagtataatggcatccccccgagccatttggttttggcaattactttacttgattgtagttgtgcatcttgtatgtgttatttatatccttgctgaaaagtgaaaatagaggcatgtccaagagttcaaatatctagaatttgagattaaatttgcaacaatgtgataagatcactatcatttaagcttttagaaatagtggtgttttgctgagtttttgaaataatgattcttctgtcttttccttgatgtgctcattttgtttgtgcatgcatatgtttggattaatgaatttatttcttgctaagtaatcttcctaagattagttcttctgataaaattcattgatttgcatgaggatttagaagtcacttttatatgattacatgaatcaggtgctaa

SEQ ID NO: 25625 - DNA, 834 bp, Glycine max
  Intron number 1 from transcript Glyma13g39990.1 (locus Gly ma13g39990) derived from phytozome v7.0 (chr-ID Gm13; pos 40540453 to 40541286)
caagcttcaaccctagcgtttccacaatcgattctgtaagcttaatgaaactctttctttcgctcttcgtgatggacgacttgtaaatctgtgttccgcggtactgtttttatggaagctcttgaattcagtttctgtgttttcgctgtcgttttatgaagacagtagtgtacggcgctaaataatatcaaatatgtttgttactcgtttttttgtttcgtgagattcagtaacgccgatcaacgatgctattttgaaattgcgcatttgtatccttcggtggttatttgacgtcacgtcagtttcgttttgttcttttaggtcgttatgatacggtttgagtccgcgtttgatagtgtgaattcataaatagaaatgcttacttatagtaatcggtgctgtgtgtactgaagtattaacgctaaaatcacatcaggtttctatttgttcttgaaaatgcttgatccatttgtctttgatatgttaacaatgaggtttgaacttgtggcgtcatgcaaagcacctaatcactagcacaatccttgtagcttaataaatgcttgatactggctattggtatcattgtctccaacatgttactaaacacctgcaattatttttgcatctttatcctctctctcacacacatgcactcactcacactcattctgagaatataatttggatttacatgagtgctttcacttggatggaaagacagacggacagatagatgtatagctcataaatacttaaatagtaaatgcacattcaacctgactactactactctgtttgtgtcttatacttgatctcatttttggttgttgaagg

SEQ ID NO: 25626 - DNA, 986 bp, Glycine max
  Intron number 1 from transcript Glyma13g05120.2 (locus Gly ma13g05120) derived from phytozome v7.0 (chr-ID Gm13; pos 5385793 to 5386778)
ataaatattccgttttgcgtttctctgcctaaaaggtgcacttcttctctgcttcttgtttttggatgctgggaaagcgaactactttttgtcctttgattttttttgtacgtaattgtcgtgttatgatcttgaattatgttctttcaatcttttttgtcgatggggttgcgttcatttttgtgttttactttctgggatcagctcaaaattgcatttttcttcttttttttgtgtggggggattgatttttctttgcagtttttacacatgtaatttgggtaacttttacgtttcttggattcgaagttttggttgataattcgggtttcactgtttctgacttttagggttctgttttactttgtctggaatctcgatgttttttttttctgcataattcttagggaaataaaaggagtatgtggatttctaatccaaatgagtatttgtgaaaagttgaaaactgagtttttgttcttggattggcaaattgatttttattttgccttctgtttcgttagtcttttgttttggtttttattcccctcaaaaagtcatttatgttggataaactcaattattttactgtagtattgtaataaattcaatattttatttggtatgaatttttttttcttgagtatttctttatcttatacttaggtttttggctgagtctttggttcatgttgacttttttcccactgttttgttgcaattacatttatgaagttttggaacttgtaagtccattcctggtggcgctgtttcatttttctcgtctaataatatatgcagtatagctaactatatatctttctatagtaactggtgttttcagattttactatatcactttcttgataaactggtaatgtgaattctgaaagttaaaacagattcaggggagcaaaatactaattttcaccaagcttaatctagtttgatgagtagtgagtggtattctattgcaggattgaaag

SEQ ID NO: 25627 - DNA, 670 bp, Glycine max
  Intron number 1 from transcript Glyma16g24660.1 (locus Gly ma16g24660) derived from phytozome v7.0 (chr-ID Gm16; pos 28622208 to 28622877)
gccgtgaaaacagtccatcaaacagcacaagtaaagtgagtactatattttctctacatcttttctcatatgcaatagatacatatgcataaaatataatgaattaaacttttcttatgactttaaaatcaatttatatatatacataactttttttcttaaactctcatctgacatttttatatgttaattttaatttaggcaattttttatagctcatgttattttctttttcttgtgaatgtttggctgtttgtcaatttttttttatattttttttacatatttatgcattcattgtaataattgatctgtgtgagtgtgtatgtatttcataccgtctcaataaggatgtcttatattttgtgtgtattttttatcaataaatattaattattaacatgtgttagttttttatagtgagaaaattcaaatccatgatctcttctcattgttcttcttccttttgaacttggcatttttgtaagcataagggctaaaactagttatatagtaactaaatttgagtaatatttgaaacacgaatttcgtttttacattcttataaagaaaataattaagtctcttcggtccaatttgattggattaattaacctttttccagtaaattatagatttcatcatttgtaagtgaagttgcaacgacgaa

SEQ ID NO: 25628 - DNA, 350 bp, Glycine max
  Intron number 1 from transcript Glyma14g00660.1 (locus Gly ma14g00660) derived from phytozome v7.0 (chr-ID Gm14; pos 321330 to 321679)
gttgctaaacccactgtcgctgagcttgctcaaaggtgctgtattttttagtttgtctgtttgcaattctccttccaattcctaaccagctctagtgtccttccttttaatattaaattcaactctgcagactggacaagacttttacagaagacagagaaagacagacccctcatttacaatattacaacactaggtgctgtctatcttcaactttttctttctatttagcaattatcaaattagctgtcaaccttaacgaaatatttagtatagtttgaatcaacattaatactgtgctaattatagcaaaatttaattaatatagttctcttgaaattcacatttat

SEQ ID NO: 25629 - DNA, 1036 bp, Glycine max
  Intron number 1 from transcript Glyma14g39510.1 (locus Gly ma14g39510) derived from phytozome v7.0 (chr-ID Gm14; pos 48587682 to 48588717 reverse strand)
aaggttagtgactggacacttttaaccctcccccctctttgttttctttgcttactttcctgttttgagatcctgtgtttttccattttttgaagttatgcttgcattctgaatctttcattgccctttagttcattttctctacttagttttgcattgttttgaaattactgcaaagctcacttttgtttaacctgcatggttcttcttgagcctttcttgttcagttctcagttctcctatgattccttgctgttttcttgaggttttttgaagtctgctttgtgggagtagaacttaactatgccttgtcatatgaaggcccaaatacacacttccattttcatacctttcccagcagtagcacactcttgccgtggattagaaacttgagagtgttatttgagatttagttagtgttacaatgttcagaagcaaggtttggtggggcatgcagtggctgagatataattagtgatcggttagtctatttcctagtagagtttgtgtgtttttcttcacatttttattctgtctgggattgaacttctggctaataattaataacatgtgccttttaaaaatagtcagggttatgttggttgttgatcttcttggaagtgtccagctgtaggattcagatttttttatattgaataggacagttctcttgtccttctattcagccatgtattgtgattttccccaacatttggatgtgtgcaagactttgtagtagaggttggggaagttatttttggaaaagcattctatttttgtggagctattctattgttaaatttttttgctggtaatcttcaaagatagcacataatcataaaattaaaattatatttctcctcaaaacttggtttgtttggaacaaacaaaatgtgcattagaatctgcttacatatgcttccaagttccaacttgacttggttagttcagtgaggacttaaatctaatttttgatggatcttaatgtttaaaccttgcagaaccatttataggagtgaatattggaacggatctc

SEQ ID NO: 25630 - DNA, 753 bp, Glycine max
  Intron number 3 from transcript Glyma13g20880.1 (locus Gly ma13g20880) derived from phytozome v7.0 (chr-ID Gm13; pos 24399333 to 24400085)
aactcatttaagaaaaagagctcaagctcaacaaggtgcaatgtgccttctattctttatacaaacgctgcttataaaaaaaaaatctttttataaatgcttacttctctatagacatgtttattgtagaatatcatgactttgatccatgtcgtcctataaaacttgagtctcattttggaaattttttttaataaacatttatatataaaaagaaaatagatggtaaaataaattaaaattttccatttctttcataagttaaaattaatttatttataagttaatttatagaaattctttcgtttaactcttccaaaagttgatttaacttatataagctaattttaatttatagaagcttaattcattttatcatttcacttttactatcttataagtagttattcaggagtttatcaaatgagaccaatgcgtgtttggtataactttctatcaaataaaccattccaaacatgcccttcattcttgttgtacttactacttgtaaatgattgtacttttgattcttatccacttacactggtttcatgctttcattttgagtctcaggagattttaagtacaaattagaaatagcaacacaagaagtcaaccagaaaagtattgacatggattccaagaattgcaaacatggaaacgtttggtgtcaagatagtgagtgggagacaaaggatagtagctccacagacactttatccttatcagattgggaattaagaagctcaccct

SEQ ID NO: 25631 - DNA, 437 bp, Glycine max
  Intron number 2 from transcript Glyma14g02480.1 (locus Gly ma14g02480) derived from phytozome v7.0 (chr-ID Gm14; pos 1520361 to 1520797)
tcagcacttttacaggtatttttacatattccttttttcactcttggctttcttttgctttgtttattctttcttgtcttttatatttttttttatgaatgaatatccccataattactggctaatattttgtttcttgaataccttgtttgcttcaaatcctggagctttatgtatagtcttgaaaatttggttgtcctttaatttgaggcattttggtttgtttaagaaacaattttcaaaacttgatagattttagatgataaattcattgttgagtagtgtaatttttttattataaagagagaattaaacatgctcctaattttttttttctcaaggaagaggtgcttctttgacctttgttgcccaccactcactaggatttttttcttcttccaggaaatagtttcaatattccctgttatttcacctcc

SEQ ID NO: 25632 - DNA, 354 bp, Glycine max
  Intron number 2 from transcript Glyma15g19270.1 (locus Gly ma15g19270) derived from phytozome v7.0 (chr-ID Gm15; pos 16476440 to 16476793)
aacataagaaggtacttgactcttaacctccatttagtatttaacacaccgaaattatatttaaagttctttcatagttcatttttagcataatgattaaatcaaaattgatatctgacttaataatcgactaatgttttaacaattattgattacagtcttagagttttataatctaactatatgctagaataacggaataagtgtttttttgaaaaagcattctcttccctagtttcctaggaaatgctagaatttgtgagcctctgcatcatgttaatatttttgtttgtagttaaattaaagcttttgacatcaggttatcactggcatcgcacttcctgttggatccga

SEQ ID NO: 25633 - DNA, 632 bp, Glycine max
  Intron number 3 from transcript Glyma15g20260.1 (locus Gly ma15g20260) derived from phytozome v7.0 (chr-ID Gm15; pos 18096750 to 18097381)
caagttatctattgagaagagcaaataccttggaggtttgtattgtactattgtttgttccacttttttccaattgctatcttggtttgcggtttgtgaaaggaaataatcttaagtttgttttcttcctcgctttggggaggtattaaggtttgaagtctcttttattgttgcgtgtgggtaaagaatgctagttgccgttgtagatttgtttctgggagggtttggtgttggggattgtgctttgacagtacattgaaacctaagcttaagatgcattgaaattcaagattcagtatgttttgattttcgtcttcatcctggatatcagtgaaggtgatcttaaatttctatatatcttagagtttgatatcttgtgaagaggttttcaaggtgattggaatttagaatttcctgtgccatgtgcctcaagaatcttttccttttctgatatgttattttgttctcgttgatgttatgacttgcttgcatttataaaggagtatttcatccttgattgtggagttattatatttgtgaatgatctttgcttttagctaaaaaattaagcctagattgaaatgtttatgctaatgacttagcttgttggctttattgatattggtcaggtg

SEQ ID NO: 25634 - DNA, 588 bp, Glycine max
  Intron number 1 from transcript Glyma16g18480.1 (locus Gly ma16g18480) derived from phytozome v7.0 (chr-ID Gm16; pos 20463971 to 20464558)
catttttgtcttgcttctgcttctggtggccactggtaggcctttctttcttgacgctaattaatatctacacttttgggtttcttttattgtgatcttagttagttaacaagctattagctactgttcttacaccttaatttcttcacgtacttgtgtgtaatattttatttttcttgatcaatatttcttgtatgtaatattttagtgtacgaggtttcctaattgtaccatcaagtgtttaatatatatatatatcctgacgctaccatgttaaggttcagttaaattgacttctctcttacatataatttttaatttccaagttacaaaatcgtgtagtgaagacttttttatgataaaaaaatgttgaatattacaaatttaaatgagaaatcttttaaaaaaaagttaagatgggtaaagtttattttaatttatattaaaaatttgtgcgatacctagcttcttcattattttacttttatctctttctgatgatttgttaaagaaaatcaaatttgtggtacatcaacttggtagtgtcaaattgttaataacttgtgttggtttatgacttgagcagag

SEQ ID NO: 25635 - DNA, 664 bp, Glycine max
  Intron number 1 from transcript Glyma13g24150.1 (locus Gly ma13g24150) derived from phytozome v7.0 (chr-ID Gm13; pos 27479150 to 27479813)
ctaattcaggttggtaatagcaatacttaaaaagatcatcgccttttgttttctcaggctcaaaatttatttgaatacatgcactcacttttttcatggcataaaggaagacagttcaactcttttaccataaaaagtggctgaagatcagtattgtaacaaaattcaaatgcgaaaaaataattaaatgttttaaattatataaacgaaactgaaacagttagcatgcagtatattaaaaagataacaaaattgcttgactaccgtaccatattgaacactgaattccaaaggtcagttacctaggctcttgtatataattgttatactaatatttgcaacccatacagttagtttcatgtttagtttattgtgccattttcatatatatatatatatatatatatatatatatatatatatatatatatatatatatatatattattaattattggttatctaaagagtctaattccagttgactaaacaaaatagtgaattcttgtaaattttcaggatttatcttcattttctacaaataaaaaatatatacatattattgattgacattttttaattcatacatgaaatctaggtttttcattttttatccttggtaaacgcaggaggtgacgagagaaccccagaaccaaagccaaga

SEQ ID NO: 25636 - DNA, 979 bp, Glycine max
  Intron number 2 from transcript Glyma13g26710.1 (locus Gly ma13g26710) derived from phytozome v7.0 (chr-ID Gm13; pos 29905080 to 29906058 reverse strand)
atcgatactactggaaaaataaaacaggtttgtcgtaatcgtaagctctcttgatttctaattattatttgaatttggttgaacctagctaaataattgaatttgattgaaggaaaacagtaccttaagcaaatagtagaaagtataaattgagtttaaaatctatgcactgactgtgtaaaaaggtttttacactgtccacttatcagaaatcacgctaaggatggcttttatggtaattattcaacaaaattaacatacttgacctctgctgattgtttggcggtgtaaaaactctttacactgtcagtgaatgtaatatttactcgtaaatttataaagttttttttttcttttcatatttggattaacttgtggctactactagtaattagtaaggttaggctagaggtatctttgtaaaagaaaaaggtaccaaaggaatttccttttaaagtttgatcagaggctgagttgggatggatcctaatggaatcggattgcatttagtttcatgtatatattgatggtgtttttccaacatgtatttcctggctccattcttgatgttttggaggatttaattgatgttcttggaatggttgtgaagaagctgttatgttgaaaaaagagtgatttgatgcacagttgcacactattgctatgattaatatattaagatttaattaatgatttgatgcatttattttgctatgactgataatacagtactgtgttttaagtggtatgacttgtgcgcgtgctggccttgcactgctatcaactctgactgagaatacttacatttgagttctgaaagaaaatatgtaattttatttatttagaaatgggagaaaagaatgtaaaccttgactttggtattttgcatatgggagttatatctatatgcttgttaggggttgcctgagactcttggagtttatatgatctcccttggcacatgcaggtgcaaacccag

SEQ ID NO: 25637 - DNA, 502 bp, Glycine max
  Intron number 4 from transcript Glyma13g10160.1 (locus Gly ma13g10160) derived from phytozome v7.0 (chr-ID Gm13; pos 11746181 to 11746682)
atatccaacactctcaagctttccaatttcaaactgtgggtgctgaatttgctttatctttccgaggtaatttcttttactttcttagtgaactaaaataaatttctaatgaataccccatcctgtgatatttctatctatctattttctctttcttatcgatgttccaagtcattacaacatcagtggttgtctgaatcaaacatatttctgtgtatttgttttctgtctttttttaaaaaaatgtgtttgtgttaattttcaatgtttcagcatgatttcagtgtcttgctttttcttcttcttttattggaatatttcaataggaagattacatcatggatttttttaaactataagctcattgatattgattgaactatttttatttcataataatttggtttggatgtgatgtaacctaggtttagattagtagagtgattcctgggtttggaacaattttttttttttttgctttcgtaggtagaaaacattttac

SEQ ID NO: 25638 - DNA, 172 bp, Glycine max
  Intron number 2 from transcript Glyma15g11810.1 (locus Gly ma15g11810) derived from phytozome v7.0 (chr-ID Gm15; pos 8692766 to 8692937 reverse strand)
actccggcaactccgagaggttcctaatttttaattatttatttattttttgtttcgcatacttggaattggattttgcatgcttaatttttctttatgctcagttttttcttcttttatttgtgtgttgttttgacttattcatagagagtttaagcgtgtccgcgcttca

SEQ ID NO: 25639 - DNA, 881 bp, Glycine max
  Intron number 1 from transcript Glyma17g05220.1 (locus Gly ma17g05220) derived from phytozome v7.0 (chr-ID Gm17; pos 3569730 to 3570610)
tccatccaacggttacttgcctaattctggcgaaggtgggttttttttcctcaaagtttactgcctcatcattcctgtctctgtctctcttgttctctgcttgtgttttctatttcatcaaccatcaaacataacctggccagtgactccgaggatgattgttttcaaggaaaatgctgcttttgtgttgttaaattaatcaaatatcgttttagatggaataaatatgagcatttgactgtttgtgtccaaaatggttttcttagatatgcaataattgacatttttctcctgaaaaatgatgaagagagaattgctttccatctcgctgtgtagttgatgttcttttacttaaacttctggagttgtttgttcacttagtttgatttctgaagtttcattgcaagaagggaaatgatgaatatgtttgcgtgatagtcttcagagggaatatgattcctatataataaaaaatttaaaaaaaggaaatggttttgacctgaagttaattaccttccaagtatattctttatgggtaatgggtctactgatatcaatacaagaggaatatgcaagatctgttcctttgcctttttcactaaaaatgccttttggcaattggaaatatgtgattaagctactgccctcctgagaaaatgtcgatcatttaagaatttagttttctgtagtatataacatccttttgaaattctgcatctcttcatcaatagcatgcttgaagaaaacagttagagatgtaatataaaatcatccatgtttttatcgaacaacttaaaagcatttaaagaaaaacttagttatatatttttgttaaaaggggtaacattatgtttgttctgttaacaggggaaaggaagact

SEQ ID NO: 25640 - DNA, 593 bp, Glycine max
  Intron number 1 from transcript Glyma16g29440.1 (locus Gly ma16g29440) derived from phytozome v7.0 (chr-ID Gm16; pos 33251932 to 33252524 reverse strand)
gtttttgttcctgagctgtgagcaactgaaccccagtatgactatcagattcaaaatcataactttcaataatttaaagtattttttatttgaatttttcttcgtttctttctttttgtttttgggcttatatgtttaaatttttctggcatgggtgttttgccgtgtttgttctgtaaaggttgtgtattcattaaagtaacatgctattgaggtataaataattgaatttcgaagtgggtgtgcactgagcagattcatgtgttgtaaagcttatattttatttgccagcaactctgaattgttatttgtaagtaacactttaagcctttgatgatacgtgtgatatgttttgcatctttaaatgggggagcctctctctgcatgccttttagcatttttgtaactagaaaaagattattatgttgatgttggattaaggccaagttgtgttgttcctgattgaaatggttctttgtgaactgaacttgttttgattttcatggttttggtttcgatgtaacgagtttgaccctttttaatggttgattgatttagtttgcttccattgagcaaagcctttccaattgctg

SEQ ID NO: 25641 - DNA, 811 bp, Glycine max
  Intron number 1 from transcript Glyma13g36120.1 (locus Gly ma13g36120) derived from phytozome v7.0 (chr-ID Gm13; pos 37455586 to 37456396 reverse strand)
aactctgcccgctcaatttgctttatctttccgaggtaatttcttttactttctttctgaactcaaataaatttctaatgaataccccatcctctcatatctctatgtatctgttttccctttctttgcattccatcttccaacgtcggtgcttgtctgaattaaacatatttctctgtatctgttttctgtctttttcttttttaatattcctgtttgtgttaattttcaatgtttcagcgtcttgctttttcttcttcttttatcggatttttttaatagaaagattacatcatggatttttttaaaattataatctcattgatattgattgaacaatttttttgtttcataataatttggtttggatgtgatgtaacttgggtttagattagtagagtgattcctgggtttggaacaattttttttttttgctttcgtaggtagaaaacattttatatgctgtattcgtatggaatctacctaccggccaactgaaggggggcaatttataaaagaacaaatagagataattttaattttgatagaggtgtaattggattttaatgatttggtatgactatacaatcacgggagaattttcaattgatattatacttctaagatggaaccttttctgaaatcatacgggagggcggttgaaattgcttgattttgattttgagtaatcttgttatgaaaaatattcattgtttcctgtccatgttgtcgttgcagatttatatacacttttattgaaactgttgggattcaagtctgaaacaaaatcttaagaagtttgcggcagctg

SEQ ID NO: 25642 - DNA, 1052 bp, Glycine max
  Intron number 1 from transcript Glyma13g05340.1 (locus Gly ma13g05340) derived from phytozome v7.0 (chr-ID Gm13; pos 5626928 to 5627979)
tcaaacgacgccgtttcgcccatctccatttcaaggtttcccccatcacactatgcacctccattgtacttgcaaactgaaatttcaattaaaaaactgcaactgggtgtgtgtgatttgtggtggcattttcaaagtttgagtctttctgaatatgctacattttcattttcaatctaaggggctgtttggtttgaagggaaaaaaaaacatttcccatttcctgtttttaaaagtttgtataggaattactgaaaacaacaaaaaaaaaaaaaaatagtttataaacttttgagaattgaaacagattgaatatatggtgataattaaaagtgaaaacagaaaatgtttactcaaagtgaaaacagaaaatggtcacagtgaaatcatggatgtggttacagggcaaatcaaacatgccattatgttcactgtatgaatggatatctgaatcacttatttgaacatgatggatgatcaccaaatttatgaggcacggggaggtgagcatctggttcataagtggttgtaagtcaaaggggtgctgtggctttttctgctttttggaacttttccttggtaatcgcgaaggcgtgcactttaaagtttattactgctgcttctgggaagggatgatatatgtatcttgtgttttagttgtgttgggctggcttaggtgctgataagctgagcagaaaattgggctgggaacagaattggtgccacggttctgtcctaatgatttctgtgtgggagctttcttatgcttgttttgttttttctctcttttgaatttgggagggtatcccttgtacccatcttaatgaagctttgttttgttgataaaaataaaaaatgaagaggtcctacaatttcaataacaaactgcaactgagtgtgtgtcttttgtggtgccatttttaaagtttgagtcttttttgcatgtaagagagcattttcattgccggtgttgcttgtttttatgtggggttgtgacttttgttgatgtgtggatgttgtttacacgtgtagcagcactgttcaagttcaag

SEQ ID NO: 25643 - DNA, 473 bp, Glycine max
  Intron number 2 from transcript Glyma13g07420.1 (locus Gly ma13g07420) derived from phytozome v7.0 (chr-ID Gm13; pos 7526772 to 7527244 reverse strand)
tgagggtagtatatatgtaaggttcactcatccttggtttattgtaatatgaatgtctattgtgcactttggatcagcagtgaagtgcatattgaataatggtttttgcaacaattatgatgttgatggccctaaaaaagatttatgtgatgaattggatgtaggctcaggcaatgtggaaaaggggtgtaagttataattcactaatagtaattaaaaaatgcacttgacaccaactatgcatgaaatggtaactagttattggtagtattttaggatgtgtttttgcagtgattaaaacaattttcaagaactaatttttagataggagtgacagaataagataggataatgcaaggaagaatctgagtaacaaaaactgatagtataaaatcaaaacaacttaaagatattttgtttttttttttgcattagcagatctcaaacacagaaggtgaactctattgtttgtc

SEQ ID NO: 25644 - DNA, 647 bp, Glycine max
  Intron number 1 from transcript Glyma13g35180.1 (locus Gly ma13g35180) derived from phytozome v7.0 (chr-ID Gm13; pos 36666682 to 36667328)
caggtagtttcctttctccttattcttgtgtgtttctgctgtttcaagggtcataaaaaaattgaatcagtgaattttttttatctgggttttctccttttttcagttttttttttttgttatgttgtttcttttgatgatcatattctattaatatttttaatgcagcagttagagataaaatttatagaccattgttggagctaaaatttatcttgatttattcccaacaattcgttgatttgttctagatcgttgtttttctggcttttgtgttatgataatcaattttgttgcaccgttcttttatctctttttttcctcattttcttcttagctcgtcattgtcaagaacaaaatctgttgtttaatattctttggtcactttttttctttcgattcttttgatgctcaggtttgtcacgtttcactagacatacttagattcgtatcttctagttttggtcatttaactatcgatttatttattgatagatgcttaatccgtttgattacggaactgtgattccttcgtttgttaaataatcagtatattcccaggagagaagtatacatttttgttgaatataatatttgattttgatgcgacagacactattcagagacagagattgttgagaagatat

SEQ ID NO: 25645 - DNA, 822 bp, Glycine max
  Intron number 2 from transcript Glyma15g01080.1 (locus Gly ma15g01080) derived from phytozome v7.0 (chr-ID Gm15; pos 661865 to 662686 reverse strand)
gggtatgtatgctttctcaatccaactatcaccaaacaaatttatatccttttcttccattgtttccttttcccctttatgggtatccataattttcctcatcttaaaccgggagcgaataagtatttctctgtttgctaaaaacatgtgagtgcacattacagtgtttcgaaagttgtcaaaattcataacctctcaacattttaaaagagcatccccgtttagatgataattcttagatttgtagctaaagatctgatgccgattagcttgaaggagaatgcctttttgtctatatacttgtcatttagctggttgttagataataccctattagaatgttcgtgattgttattcttctatttggtctcaatgtagatagacagtgaacgcactattattgtatcacattgaaaatactttttgctagctatggatacacagaaatggaagctttaatacgggactgaggaagatggcccttatgtagtttgtttagttgtgcttacataggaatatgatcacactgatataaaatctagtcatttgattttttgttgttgttgttggatatagttgtgatttgctattgttttttctccgttgggaggaaaattctgcactaaccatttaaatagataaaagaataattttagtgagttaaccaagttgtggctattaaattgcaatatttgaatttgtggaggatgatttagacaatcatgtggatatgaatatgattatatcaccatgcataacagaatttaatgtgattgtaacagagcagtggttgtcttggaccctttaaaaagcccccactaa

SEQ ID NO: 25646 - DNA, 1036 bp, Glycine max
  Intron number 2 from transcript Glyma14g10830.1 (locus Gly ma14g10830) derived from phytozome v7.0 (chr-ID Gm14; pos 9020483 to 9021518 reverse strand)
ccccactttggaggactggccctaagggtcccaaggttaatctcttttccctttaccttctttcgttcataataaaactagcattgttaataacttcttaattatctggacacacgtattatcactataaaaatcatatactgattaataggtaacagtctagtagatacacatgcacaatactattatacactttatttaacaaaaataaattgttaattagcatagatatgtattgtaagtctatttatttctcaatgataaaagaaatattgtaagtctatattaagtactaattaacacaataatattgaaataataaattaatgcatatagtaaatggatcatactgtgtaattatttagtatgatacatacatcatactactgacatatatctactgttaacaacatattttttaatatatattttttattggttaaaatttattcaaattataatatgattgaaatttattaaataagaagtattcatgtgttttaaagattgttaaagaatgattgaaaaaagagagtgttaattcaaagtatgtttctaatatttttttataaagatttccaataaattgaaacacgtgttcaaaagattgtgataattagaaagtattgctaatacttcttttatattaatagttttactactattggacaaagtttatattatcatgaataagtaactgaataatcatataaacatataattagtttgagtaaaattaaattaagatccttttaagtaaggtttgggccgacttgaaccttgggaatagaaaaacttttgttaaaacaaagattttactaaaaatgattaatgaagtttttttttagaaattagtcatcaccagttataaacaaagcccttaaatactttgcatcaatatagttattgtgacaaaaaaaaaagaagaaaatgaataatatttgtattgttaatttagaaaaccaactactacttaattaataagcatttagttgcttgttaacatgcaacgtgtttctggtgcagtctctttgca

SEQ ID NO: 25647 - DNA, 599 bp, Glycine max
  Intron number 1 from transcript Glyma13g24040.2 (locus Gly ma13g24040) derived from phytozome v7.0 (chr-ID Gm13; pos 27386090 to 27386688)
tgaagtatttgttctccgtcatctcgcgtcgttaggttagttcatctctgccactttcgctttatttttctttaatcacaattattctgtgatggaatctgttcgtgttagagtctgtcatggagaaaacgctttccccgattttaaatttgtgttttttttttcttcaactgagtttttggatcttcttgaataagatgatccttcactaattttggttcgtttcgatgaatttgagagccgcaattggcatttcccttcctgtacgcatgcgtagggattttattatttggtttaataattaatattattgagaggctcttttgattcaattaatctcaataacttcctactcgatcatcgattttttttacccaaatgacatgccaatttgatgcctctaaccgggtgactaatacttctcctccaaaatagtagtattatagaaatgatcagcgtaagtgtatttaaaaaagaactgtttctatgtgtaaatatgttgattgttctgtattacgttaattcaaactcatattgtgtatttgttagttcattgaactcactgcattgagtggatttggtccaagttgagtttagaa

SEQ ID NO: 25648 - DNA, 464 bp, Glycine max
  Intron number 2 from transcript Glyma16g04100.1 (locus Gly ma16g04100) derived from phytozome v7.0 (chr-ID Gm16; pos 3494099 to 3494562 reverse strand)
aagttgcatagcaaaattcaggtttgtttccacaggtaagcacgcaacttggactttggggacattgttttttctttatttattggctgcttgattgcacttttgatcccatggtttatcaattttgcggatttatagcttgcatttgatcccactgttttaatggtttaattttggtacatccattatgcaatgtttaatggaaatactgacatgacagttcattagattagagtatcatgccggtgtttctgctaactattattataagctaataggtattagatgaactaaaattgcataattgtaaattgttgagaggatcaaatttgtgaaaagaagtttggagttaaaattgagcaagtgggggaccaaaactgcaattaagccttatttgctgtcattgcatgtacttcttgtgaatttgaaattgccatttcttatatgcgacgttatgtgcagga

SEQ ID NO: 25649 - DNA, 535 bp, Glycine max
  Intron number 1 from transcript Glyma13g34140.1 (locus Gly ma13g34140) derived from phytozome v7.0 (chr-ID Gm13; pos 35794010 to 35794544)
aaaagccttggacgcctctcatcagttgtcactctgtaagtcatcattacctacgcatccgtgtgtttttatcttgcttgctctatttgtgaggcatgttcttcatttgttaactaagaaactttgagagtgtcgttttttttttctttttattgagtttagttttcataaattgcaagtgtaaaaaaatttacattgttaacccattagaaatcaccctagacaaggctctggtttttagtctagtcaaatggtattgtgtgatctatgtagtcacgtttagtgggataaaactttatcgttgtcataaccaactaggaaccaccctggatttgaattttaaaatacttattacaaaagtcaataatctgaccatatatgacaacctatagttggatgatagtgtaaaaaatttttatactatcattgtattttaattaaaataaatcctaaatagggtttgcatgattcctcacagtacaattgctacgatgcttcaggtcacttttgggaaatcgacttactggttcaattc

SEQ ID NO: 25650 - DNA, 574 bp, Glycine max
  Intron number 1 from transcript Glyma16g25370.1 (locus Gly ma16g25370) derived from phytozome v7.0 (chr-ID Gm16; pos 29321706 to 29322279)
gaggaacggtcctcgtggtcctaaggtataataatatcactatatataatccaaatatctcttctcttcatcttaattcgtaaattactaccaagacatatcttattattatttttaatatatatatatatatatatatatatattaaaaactatacatttttagagtcttattctttattttgtaattttagtaaatgttaatcgataaaaaattgttacaaaataatactaccattctttatgttaactttttatgcgaaagttgagtggattcaaattctctccaacctctctatctctctttttccttttgtttattatttcaattttgaacactttttttcccttctgttatctctcttctctttatattttgctgctggagaggcagaagatccaaacacgttttgagttgtgagaaaattgaaattaaatgttcatattttatgattacttcagttacttttataaaagaatttttaaaagctagcttctaattggtaaattgagttaaaattaaattgggtttgttttgtaatgttgtgttgtgtttgaattgaaatgcagtcact

SEQ ID NO: 25651 - DNA, 888 bp, Glycine max
  Intron number 2 from transcript Glyma16g08030.1 (locus Gly ma16g08030) derived from phytozome v7.0 (chr-ID Gm16; pos 7256696 to 7257583)
actcttattgagattaaagacgttggagatacacagtatgtctcagtcctgatttttctctagagacgtgtttggatttggggaatgcttaattttcatttttaaaatttagataattacaattaggcttaaatatgtttaaattccctaataaatgaccgaattttgttttgggtcccttctaaatttttttgttattttgaatcttcaatgtattgaaccttttgtacggagtcccttaagccagtttagtgaagacatgtcaccttataatattatcaaccgtgtcttcacttaaccgatgacatccactcaaaacaaaagttaaaagttttaatatatcggagacttaaattaacaaattttttttattaggaaccaagaacaaaattcggtcatttatcaggtaccttaaaacatatttaaggttttttcattgatgttgcagccaaaatgtggtcccagatcatttactatagcattcttgatatgaccatttgtgagaattcacttgataacccaagcttgtggaagcggtttgtgacacctataagtgattagtgatgattagtagcaaagataaatgagaaacgataaaagattagcattatatcatggatgctttagtttcgacttctgcttgactttgtttttctttaaatttgaaagaaaaaattgttaattctatctcactatggtattattggttctgtatcatgtttgtctactggaaataggtccacagttgtaagatacctttgaaagatgcgaagttactattttgttgatcatcacaatctattctgttcatcagtgtgttgtttttattttttcagtcttttggtttcctcaggaaggtgctaaaggagcaaacaagttcttttagct

SEQ ID NO: 25652 - DNA, 906 bp, Glycine max
  Intron number 2 from transcript Glyma14g07940.1 (locus Gly ma14g07940) derived from phytozome v7.0 (chr-ID Gm14; pos 6001306 to 6002211)
gactttgaatccaaagaccctgaggtacaatatcatccattcacattcacctactttgattttctgccctatatatcaagatcactcttgaatattaaattaaagtgataatccatgttttattttgtcgaaaattagtcacaagcgaatagatgtttggcatcaatattgataacaaaattaaagctgtaccaaaaaaattaatcggccttttcatctcttaaaagataatattaataatactgatctttcatgggccaaaattgtattttactataaaagaaaaatatatataccgacgatgaggtattattctcttgatcttggggcatttaaaaatctttccaatcagctaactatattttctattataaccaaacattctaacttagtctctaaacttacaatgatgatcaatctagttcttaaaactataaaaaatattatatattttaatttctaaaattactaaataataatcattttattctttaaattagaaaacaacaattatttttaagtagtctctacaactacaacaataaagactaaaatgtgtatcgaaaaaaagaaataaagactaaaatgacaggcgtttcccattacctcactttcaagttgacgagttgctgtttaattatgtgttgtcaaaagtaatgtttgttttacgtgatatatataatatggtcccaaaccaaatattccagccatgccacatatatataacacataaccttgacctctagagccacattaaaatctctttaaaatatatatatatatatatataattgatgaaaattaattatatgaaaatcgtgaaatgtgcatgcaataatattagtattgatgaagattgaatctgacacgttgttaattacaaatttgatgcatggcaagtgcaga

SEQ ID NO: 25653 - DNA, 442 bp, Glycine max
  Intron number 3 from transcript Glyma13g22980.1 (locus Gly ma13g22980) derived from phytozome v7.0 (chr-ID Gm13; pos 26468088 to 26468529 reverse strand)
gaccatctactagcctgtgaggtatctctttccaagggggctgaaaaattcctctctttctccaaaacatactcaaacatcagcattgtgaggctgacaaatgtacaatcttaatatgatgctctttagtcattatttatttgttaatgcacaataatttattctctttttaattatctgattacatccaaatttactctttatttcttaaacttgcttttcccccctctgagatgtattgcaaaacattcatccaataagcataattttttgtcaaatagaaaattagaacttatataaacacaatttttagcaatacacaacacaaatagtaacggctgtaacatttgtttgtgttaaatagctctgtctgttatacacaagtcttcatttgtatcttccttctcttttatgttagttgtcatttgaccttgcaggcaac

SEQ ID NO: 25654 - DNA, 639 bp, Glycine max
  Intron number 2 from transcript Glyma14g03940.1 (locus Gly ma14g03940) derived from phytozome v7.0 (chr-ID Gm14; pos 2621269 to 2621907 reverse strand)
ctgccagggataatttgatagttgcatttgagaaggtaatatgaacatggggatgaactggcagctgtttattgttattttcagagtttggctgtggatagtcagtccatttacaactgccagggataatttgatagtttggaatttttttcatttagaagtctcaattgtttgagatgtatcttgtttttgttttttatgtgtttttgcttactctcaaacttaagcatgatgtatcaagttcagtcttttctgctactgtagtatttggtactcaaagctaaatgcattggaagtttataagttgtaaatttcacactggcttgcaagttattcaagcattgagacgtgtaaggtggtgtttgtgtgtgtgcattataagtatgcaattatatttgatattattgaaaactgcaacccagcataccttttcacgtaaaggagttcagtttatttggcatggttgggggtgaagaattagctcttgagcttgatcctctatttattttcatactgttggggtgtgtgttgttgactcttccccttttgtcatatatatgatcttcttggcattacttctaactatctattttataatgccatgatagaatcgtcaaagttactcccagttttctggtg

SEQ ID NO: 25655 - DNA, 902 bp, Glycine max
  Intron number 5 from transcript Glyma15g13020.1 (locus Gly ma15g13020) derived from phytozome v7.0 (chr-ID Gm15; pos 9693593 to 9694494 reverse strand)
aaagctcagcaaacagaaagccaggttggtcaccctttttctttcttactttgttaattgcaaatgttctagtagtagtaatggcacagcagataatcacagtcatctggctaggtggttagttctatgatcatagttctctggctgaatagaacaagaggatactatggagggttgtttgatcatgagttagaaggtggatctctatttcagttacactgcaaaactaacttggatgaatgctagaatgacatataattgtacttgaaagatatagttgttaatgttttgtttccctagaaggttttaaattgtgtccgttgttaccttgcggttgttgtgactggatgcggttggatgctgccattgcaatggcagcaatcaaggtgtgatgtggctgtggctccaaagcttaggttgcactctgaatttaaaaccctgcccctggactttttgataggaagagtatttggaagttagagcttagtcatagtgaacaacaaagaatgcaaatggagaaatctctatttgttttagcgtagagtaattctctgtataatatgatttggggtgtggttttgtaaggagcataattaagcatttatttaataatctcttatcaaataagagcatactttataagctacctttgagagtaaactgacatcacattttcatttactggactggaatattgtttattttacattaattcatgtggtaagtattgatgagctttaactattcagaactcttgcacatttacatctactcagtatttgagttgactatgatatagcttattagcttaaaatcattgactatcttgaacaatctaatcaccttgactgagctctttgtttttcatcttattcttgcagaaagcactatattctcaagca

SEQ ID NO: 25656 - DNA, 510 bp, Glycine max
  Intron number 1 from transcript Glyma14g38350.1 (locus Gly ma14g38350) derived from phytozome v7.0 (chr-ID Gm14; pos 47485601 to 47486110 reverse strand)
agaaagcctgcaagagaatccaagacctaaacgtaaagcttaggaagtgttgatctgcatagattgattcacctttgtttttcttgcttctctctcttttttttaacctctctgccacaacacacacacacacacacacacctcatcagataaaccgtaccactactaatactccatccaaaatttccactctctctacctctattactcactgcactgcactgcgacaaaataataataaaaaagttgagagagagagagagagagttgaaaagcacaaaaggggtgtgactttgtctatcttagacaaatgggctaagtgttaggtatttgtttagctcttttttgcatggaacgtgcaagccctgtgttgcaaaccctattattgactcagcttcaaacactactcttcatagggtcaaagagtgagagtgtgagtgtgtgtgtttctgtcctatatctgcaaccttcccagtgttgttgttttgaaggaagtttctatttgttcat

SEQ ID NO: 25657 - DNA, 547 bp, Glycine max
  Intron number 2 from transcript Glyma14g38960.1 (locus Gly ma14g38960) derived from phytozome v7.0 (chr-ID Gm14; pos 48127477 to 48128023 reverse strand)
ttcttcaaccagatttaagtgtaggtatcattgtatcctttatttagaatgagttgttatgttatttaataccacacctgtgctatgtagttttgggcttttagttattactggttaaattattcacttgatctttataattgtccccatttgatgttttagtctctaaataaataaattggaatttttagttcgtacacatgcatacaagtttttttttttttttttttgtattaaacaccagggaagactttgatgttggaactgttattaaaacagtttggtggttatagatccctacaaaaaactgtgtagatactaaaatttaaaaagaagacaactataaccactaattatatgaatagtttaattatttgtccattctgctttacctttttagatgattacatatttttattctcaatccttgaaaatttatacttttgttcaatgtttattgatttattggtaccgcagttatgaaggtaacacatgtttactgtctgctttatatttttcagagaggagttgactgtcaaaattgcaa

SEQ ID NO: 25658 - DNA, 323 bp, Glycine max
  Intron number 3 from transcript Glyma14g30740.1 (locus Gly ma14g30740) derived from phytozome v7.0 (chr-ID Gm14; pos 37448766 to 37449088 reverse strand)
ctatttctggttttcttcaccgaaaggaaaggcaagttgtatacatgctctaccatccctcttttaagactacgttcttctctttgtgcacaaaaaatcttactaaaccttaaggcttgttttaaattacaaaggattcaaaagccaataaacatcaatgatacatgcttggaagttggaagttttcattgaattatttttcttccaaaaactaagggaatggccaaatattaactcaagttacaccatcaaattagacaaaagaaaacaacaaatatgtgacttaagaaacacatacatggatttgtgcatgaacagtagtt

SEQ ID NO: 25659 - DNA, 285 bp, Glycine max
  Intron number 1 from transcript Glyma17g04990.1 (locus Gly ma17g04990) derived from phytozome v7.0 (chr-ID Gm17; pos 3341734 to 3342018)
ccaagggttacaacttcgcttccacttgggaacaggtttccttcctcaacgattattccccaaatcacgcttccatttctgtgtttttatcttctttcctcgctctagttacctcgatttgtatagatctcgtatttttcaactgcatttgcattcaattcttatcacatcatcttaattcatctcttttacttacaattaaatctcactccgccacggatcagatctggcgatgttgtttgccgcgattcgatttgatttttgaagtgaattgtgttttgcaga

SEQ ID NO: 25660 - DNA, 583 bp, Glycine max
  Intron number 1 from transcript Glyma13g35230.1 (locus Gly ma13g35230) derived from phytozome v7.0 (chr-ID Gm13; pos 36714469 to 36715051)
gtttgcacatctgcatcagagtgtcctcaaacgtatgcttttgtttcttagagcatctccaaccggaggtgctttgtttgcaactatcatctactgtttgcctctttagtgttatctattttgttactatataattcaatctatctatgttttttaactttgactttttataatccatgtaacctccactcttttttttccttgatagtatctcttctactgttccttatacagtttgttaagttttttttttttttttttttatgcaaatgcgaatatatgttttagagattttataaaatcaaagataagctgtcagctgtgtatatggtgtgcagctatacccacccaatttgatttatgagccactttttttttttaattattgtaaattatatatatttgttttgcagttcctgtcaaattcaaatagaacacaaaggaagttgctcattctcttcaatttgctgtgttttcttttttctttattttcttatttatctttaaatttaagccttgatataaagtactatgctgatggtatgtaggcaagaattcttttatttggtttggaccaaaacca

SEQ ID NO: 25661 - DNA, 744 bp, Glycine max
  Intron number 1 from transcript Glyma15g09610.1 (locus Gly ma15g09610) derived from phytozome v7.0 (chr-ID Gm15; pos 6880267 to 6881010)
cgtgatttgagtcaggtcaggaattcgattctcaggttaacttataagaaagctccatgcccaaagtttcatacaagcgaagatgggaaaatggaaaatttaaaaagaaaaagaaaaattgtctccatttcttcatttttcttgctttgttatttaattgattggttaattgggctagctattgagatcgtttttggagtctcgttcattgtaaaagggaacatttgaatattagagatggaatgaaatgaaataaaattaaattaatttattgattttcatatatatacgcttaatttataaatttaatgttggttatgtatgtatatatatatatatatatatatatatatatatatatatatagttctctttgatttcttgtgctggagcaagcagctttcaagttgggctattcatgaaggtttgctttgcttgtgcgtgcaatgtccaaaggtgtgcgcagtgtaccatattctggtgcgcaatgtccatttcttcaattcaagagagggttttgaattttgattgttttgaagtttaaacttcaactgtcatatagtctgcatgttttgtcattaaaatgaaatgtttgaacaatctgatgggaagacggctagtgaaaaaaagggggcaggacgggagagggaataatagaaaaaggaaaaaagtttgtttatagtagtaatttttatcgtaataaattttatcggttgcttttgtttttatttttggttcagataa

SEQ ID NO: 25662 - DNA, 929 bp, Glycine max
  Intron number 3 from transcript Glyma14g12140.1 (locus Gly ma14g12140) derived from phytozome v7.0 (chr-ID Gm14; pos 10886263 to 10887191 reverse strand)
ctgcattcactaacttcaaacaggtaatcgtgagtgtgtgtgtgtgtgtgtgtatcttttttgttataattgatttttttttttgaagttagtccttcaatgtctttaaataaatgaagtgatgaaaatgtgtgtgtgagagagtgactgagtgagttagtgtgcatgttttttaattgattttttttaagttagtccatcagtatctgtaagcagataaagtaatgaaaatgtgagtgtgtgtatccttttacctttaatttttttttctttttaaagtcaattcttcagtgtctttaaacaaataatgaaatatgctgagaagtgcatgatggttcatgtaacctctcaagaggatttttagttgttcaaaggattaagtatttgtgcttggttttggttccataggagaataaaatgttataattcaaaagtatcttccattttgaaggtatcaaagtggagcatgatggtaatttatgcatgtatatttttctattctcaatggttgactattttccaaggtggtatttcaagtgtttacaccatttgccagcaagcaaccaatatatattaaattaggggctttgcatgcaaattttacccaagcaaaggtgtccttgggtagctttcatgttgctttgcctacttaaccaagggtcttcttggtcaagttggtagaatgtggtagcgtagaagatgaaggatggagcaaaaagtttcaactgaagttatgacttgaagtggaaaagaatgcattctcattcggtttccatcttcttgcatttctgttataccatgctggtgtgaagtgattttcatcccaaaatttgtagctcaacactttttacctagtcagttaagtagaaactaagtgtagttgcaatgatttttacacaattttaactgattgtgcaggtaattgaaga

SEQ ID NO: 25663 - DNA, 194 bp, Glycine max
  Intron number 1 from transcript Glyma13g28710.1 (locus Gly ma13g28710) derived from phytozome v7.0 (chr-ID Gm13; pos 31699918 to 31700111 reverse strand)
tccgtttccggcttcaccgtgctcctcttacacgcgtattcatctttttcaatttttccttaatgttaccgtttttttttttaaacatgcccccaattttggttgttgttgaagtgattgatatttttctttataataacaaattgactttttcttcctttgatttgtgtacttcaattgcagagtatatatat

SEQ ID NO: 25664 - DNA, 567 bp, Glycine max
  Intron number 2 from transcript Glyma15g04590.1 (locus Gly ma15g04590) derived from phytozome v7.0 (chr-ID Gm15; pos 3196965 to 3197531)
caggagtgagtgccgaactggctggatgtgagacacagttatcgttcacaatggaggctctcacgtcttatcagcctgattattaagttctctacgtttgttagttttcagtttggatatggattacatcgaaacatattttgctcttagaagacagacacatggacaagaaattgattaaacagtcattttttaatttactcgtctttgatgtaattagctcaatatttggtaataatgattttctgtgaacttggttgaagtgtgctatctctaaagttttggtctttaatcaatccaaatgacattgtgtgatctatgtaaccgatctcacctagtggaataagattcttattgtatggttaaactatcctcttactagtctatgaaaaatgtcttggtttctaatgatgattgcatgcaaaatctcctccctttttgtcctctttaagacaattttttttttcttttttgcactttccttttggcaattttaatttttaagcaagcatttgctgctcttgatttgaagctgcaacaacagcaacacacacagctgtgtgtgta

SEQ ID NO: 25665 - DNA, 765 bp, Glycine max
  Intron number 1 from transcript Glyma16g08410.1 (locus Gly ma16g08410) derived from phytozome v7.0 (chr-ID Gm16; pos 7773279 to 7774043 reverse strand)
tcggcgttctcgccttctcgatccgtctcttctccgtaagcatttttcctcattccgcagatctggttacctgaacctcgtttcggttccgacttttcgttttctcaacgcgattgcatgcttctatattcagcgtcgcggatttttgttcaatttaaccgtttcattactttcgacgtgtatgtaacaatcaccaagcatatcttgcaatatcaatgaactgtttagatttgttttttctgcgacttgacagagctgagttggttcattcgccagataagtcaacgatttgaaaaaaacttttgcaccagtggtgtaagagtaatgcttagactgaaatgatgaaatgcaatgcgagataagatgttgctcgtaatttgttatggcatttcacatgtgcgtgcatttgaaaagaatttggtatttgagttatattagattagaggataaattgaagtcttcctgttggttgaaattctaatttgtataattgtatttcgttaggtttcttgttatttggttatggttccaagaatgtgtcaagagcaaactcgtattttgttgaaatagttgtgcaaaagtggtgatatggtgtggctatttctatgaactgtatacttctaagttctaactcaaatttctgtttgtattagtcttcttctgttttttccggcactgtagtaggttatctattttcacttgttggccagagttgttcttgctcttcttcacattttttaatgcattgtatacaggttataaagt

SEQ ID NO: 25666 - DNA, 818 bp, Glycine max
  Intron number 1 from transcript Glyma15g01580.2 (locus Gly ma15g01580) derived from phytozome v7.0 (chr-ID Gm15; pos 1049003 to 1049820 reverse strand)
ctcccaaagaggccaacctcttcaagcttattgttgtaagcttcctctctctctctctctctctcttattttatgctcgatccaacttctatcactttctcctgcttccgctattgtttcttctccatctcaaaaccctagattatcttcttattcccttctttcttcgctgacaatccgataaagactttatagaaattaaatacaaaaaatttttaaaaatcggagcattccgttactgtgatttgtgaggttcaccgctgtgttgtatttcagctcttctgtaagttagagcgggattggaagttcccgaactcgcgcgttgagtttattgcattctctctctgttccttttgtttttctctttctccttgcgactatgggaagcagtaatgaattgtgaattgctgtcacctggactatggatgggattttttttttatcaatgtgacgcacagacaacctgacgtaatcaataatggaataaatggagattatgatttttgaagaagggtatagtgaattctttgctttgaatatgctgggcattgtgaaagacttgaaggaagtttctgtagataaatagctatgttatatgatctaactttcagattatacccgtggaattccttccagtagcagtgttttggagttcggttttctcaatatgtggaagcaaatgtgtgcatactgctttatataattaaattttaatcatcttggctattggcaaatttataagcaactgaaggggtgtggttggggtctacttatacgtggggcttaattttacttgtttgcaatgctgcagaaatcct

SEQ ID NO: 25667 - DNA, 572 bp, Glycine max; identical to SEQ ID NO: 25550
  Intron number 1 from transcript Glyma14g03590.3 (locus Gly ma14g03590) derived from phytozome v7.0 (chr-ID Gm14; pos 2333549 to 2334120 reverse strand)

SEQ ID NO: 25668 - DNA, 974 bp, Glycine max
  Intron number 4 from transcript Glyma15g05490.1 (locus Gly ma15g05490) derived from phytozome v7.0 (chr-ID Gm15; pos 3883552 to 3884525 reverse strand)
tttaacataccacctattcctttgtctcagccctggtaagctttctatttatacattaaattatcacttggttttgtatggttgtatcgatcttgacagttgacatgctataaaagcacgtgattttttgtgcaaatgttgattctgtctgcatgtgtgtatatctttgcatggatatgatttgagatctatatgggatggcgcttgcaatactgtaattttcccttgaaacaattactacagggtcttgtgggaaaattttggaaatgggttttatgggtcaagtttccactcatattttgtcattctttgttcaaatcagccttcacttgttactcctggcatgaaaatcagttagttgacttagttgtataatggttggttctgtgcgtttatttatttcccttatgattgatttaagaagaaagcaacatcttgtttgataattgatagccatttagttgggagcaaaccttgtttttgttgtgttatatatgaattataatggctaccttcctcataatttattaaggtaactgttaataatatagtcagcaaatgacttttttttgccgttaaataaggtggataaagtttatcagttgtattgttttatgcattgttgcttctcctggtgtgttgggttagttatttttagatgttgaccagatgaaagtacaagtgatctttgcactagctgggggtgaaacttgagttatttacattttgaaatgttgcttaattctgttaaatcaagatgttgattagcagttttttgaagtgtgtatgagtcattcccatcttactaattgctgccttggaagggcttaaatctgcctgtatgttatgcagtaaatatgggactcaatcatagtgatatttattgccatattctagtgcatacagtgctcatttaattttcttttccatttattttttaattactttgagttttgcagctttgttagttgaaa

SEQ ID NO: 25669 - DNA, 397 bp, Glycine max
  Intron number 2 from transcript Glyma14g03400.1 (locus Gly ma14g03400) derived from phytozome v7.0 (chr-ID Gm14; pos 2181825 to 2182221)
gacacgtggcactgttctccaaggatctgagacaggtaacaattgtgtgtttgtgtctgaatgctgtagacgtttaggtagactttaattttaaacttggcaatcagatacgtaattgtttaacctgaaaaaccatcagtggataattggatagccatcagggagatgaaattgcattttcaaagagacatggttacattttctaataatagagttttaaatagtaagacatgagtggattcttctttgtagaaatcatgcaaaggatgttttgtttgtaatcaaaatggtttgtttaggaggaggataaatgtttctgttgaagtaaacttttggaatatggttgataggattttgtatttttcttgttttacagatccttattattttgaacgaa

SEQ ID NO: 25670 - DNA, 474 bp, Glycine max
  Intron number 2 from transcript Glyma13g23280.1 (locus Gly ma13g23280) derived from phytozome v7.0 (chr-ID Gm13; pos 26714231 to 26714704 reverse strand)
tcctggtgccaattctcttcagtcatttgctggttatgctaatgaagaggatcagtttcaacaaaacgatgaaaacaaacccaagttcctctttaatggtaccctccttttctcccatcatttatacgttgcatgtagcctgctttattacatttattgtgattttagtgtgtgtgtgtgtgtgtgttaatttctatttgcaatgctgattgctgaatgttttcttcttaatttagccttcaattcattttcatatgtatcatggaattgttaggttggatagaatagaagttggttttaaaaattatttggttgacaaattttagtgtatcaaaataaaacttacagaactttgcattacaaaaatattaaggatatagactaattgacataggatttttgttgtttaattgttaatttatttgctttgttgtaaatatttagatttgttgcatgtgttcgcatttgatgcag

SEQ ID NO: 25671 - DNA, 938 bp, Glycine max
  Intron number 1 from transcript Glyma16g34180.1 (locus Gly ma16g34180) derived from phytozome v7.0 (chr-ID Gm16; pos 36835493 to 36836430 reverse strand)
gcctcttctctccctcgcgccgcccacactaaaaggttctttctccgccaaatcgaatcaccgattccgcaatttccatcatctaacactcgatcctttatttataatatattttcgtttctgcctttttttatggtttggttgctgatagtttttcgcgtttttggtactcgtattgttataatcgtcatcgttgttgtgattattattattatatggtggatttatcgatttgatggtcttggattgctattaattggatatgctctgttttgtgatgctttagaggcacgcacttgtgtgtatatatcaatgttgatatttatacatgctattgcgcatctgcgtttgtggtttgttcaattttaatataatcttgtttttttggggttttatgatgtgaatttttttatttgcaacttgagatgagggagaagaaggtgagcctggagcagagtgagaaaaagttattattataataataatattatgatgatttaaatattcagatcgtgtgttttatattattagtttatgttgcaacttatgaataaagtagcgattgattcgggggattttggaattgtatgggagatgaaagtgtttataaaagcctgattgaatctttatatgatttgattctatgaatacctttcggcgaatgtgtgtcaaatgaaacaaatggaatcttgtgtcttttttcctttgaatttttcactgtagtattgtgcttgtttcctgagcttttgtagggatggcttggtagttatttaattttttaatgaattattcgtccttgggcactggtataattatctttatgcttagtgaccaggcacatgctttatgttttgaatttttatctgtatggaaatgaatgtggcttatttgttgtgcttttatttgtttcaaggttattgctctattattgtttgacg

SEQ ID NO: 25672 - DNA, 906 bp, Glycine max
  Intron number 1 from transcript Glyma14g17080.1 (locus Gly ma14g17080) derived from phytozome v7.0 (chr-ID Gm14; pos 18632471 to 18633376 reverse strand)
ctcgccaacttattctattctctgttttatttgaggtacctccatcaattttaccttatctttttattcttctattggaaatgagttttgcttttctctcttcacttgtcactgagggtggatgtaaggttttaaattgcagtcgctgtcgcggagtctctgaaaatcttgacattgtgaaaatttgtggccgcaattgccgtggcgatgtggtttcatagacttcaaaaccttgatgttgtggagacttcaaaaatcctgatgttgtggctgcaatttgttgcctccaaagaccggagaatttaagaaattgtggctgcaatcctgatctttaaagacaggagagtttaaaaccttagatatttgaaaagcataggctcatttttgtgctatgaagaaatgagcattttatgtcattggttttttgaaatatttttgtcgtggatttagtcccctgatgatattaagggttgttggtgttttagatttcttttgattttggatcttaggaggactgttttttctttttaaaggattggtttttggaggaattggggttaaaaaagttatttgtgtttgggaatgatgcttggcattctgggaatgctgttttaaaagttagtttaggagaactgattttgtttggatgggaaagtagaaccacttttggaatgtaaatgtagacgtggttttgattatgccgtaggatctttgaaaaaaaatgaaataaatcttttgaggagtgtgtgataatgtttcccttttgttgaatgacaatgaagggtttacttgaattttaaatttctcctctagacaaattaatatattcctgctgactattgagggtggttttataaatggatttttcttaaaatggtttcaactttcaggtcattgctgtaggat

SEQ ID NO: 25673 - DNA, 929 bp, Glycine max
  Intron number 1 from transcript Glyma13g36970.1 (locus Gly ma13g36970) derived from phytozome v7.0 (chr-ID Gm13; pos 38172728 to 38173656)
tttatctgttgaagaagaaaaacaagaaacagtgactgattatagctaataggtaattttttttttcaatttatgttacgtcgatcgcaagtgacagctctgtgcactgttcggtgactcaaggaaacaaatgttttttttttttctattgagaaattagaatggctaacatcatttgaagaatgctgtgctggttgtttaaacgtccgtttcgttgtttgttaagtttggtgcacaagtacaaaattggggtcagtcaccaaccgcaagttaaatccttgatgcttcctaaatcctaatgatttcatctctgttgactgaattttggatattagaatcatggaaaaaggttaattttgttttggggtgaaagatactatttttgttcctatgtagttttgttttttacaaactgattactgaatagaatttatagaagaacttatttgcgagttcccaattttgtggatcaatttatataagatagaaactttattgctgggttcacattggtttgataggtttatttttgctcttgttttcattctgataagtaggtattgaggtaaagacaaatcttgggaattggctagaggcagtggtaagttagattaaagacgcaatagtcttgcaagataatattggtgccatctaaagctccatgaatgcatcctaagtggtatctgactctggatattttctaattttttatcttattgttaattgagaatgagattatttttattcattgaaacttagtctatgaacagcttatatctgaaagtctgtttactagcaatgtcagagtgtttgtatgcaattttttttgtttctactttgcatgttatctgggatggccttgagaaacttattgtggaaatcggttcttgttaacagggtgtgatagaaagttgttagccgtggtgttt

SEQ ID NO: 25674 - DNA, 354 bp, Glycine max
  Intron number 2 from transcript Glyma15g19150.1 (locus Gly ma15g19150) derived from phytozome v7.0 (chr-ID Gm15; pos 16234332 to 16234685)
aacataagaaggtacttgactcttgaacctccatttagtatttaacaaaccgaaattatatttaaagttctttcatagttcatttttagcataatgattaaatcaaaattgatatctgacttaataattgactaatgttttaacaattattgattacagtcatagagttttataatgtaactatatgctagaatagcggaataagtgttttttgaaaaagcattctcttccctagtttcctaggaaatgctagaatttgtgagcctccgcatcatgttaatattttttgtagtagttaaattaaagcttttgaaaacaggttatcactggcatcgcacttcctgttggatccga

SEQ ID NO: 25675 - DNA, 679 bp, Glycine max
  Intron number 1 from transcript Glyma13g36870.1 (locus Gly ma13g36870) derived from phytozome v7.0 (chr-ID Gm13; pos 38102017 to 38102695 reverse strand)
aacgagagaattactgaccccaagagagtcaaaaggtacgtttagtagtcataaaaaattcatccctacgtaagtcctgttttagataattagcttcttcagaaacacttgaaaaaaaaaagtttcttccataagctcatttatagaagttttttcgtgttaggtttttcaaacgctgatttttaacttatacaagagtcaattttagcttacataaaaaatttatcatattttttcttcttatatgagtatttatatctaatatcaatatgctttttcctggtaaggtttgcaaccattacacaaaattggataaaataatgtgtttcttcttgcttaattaaatgtatttttttaatttaatataggcttgatgttgctattctaaattttttttggtgaataactggtgttgctattctagtataatgattaatttatgtttatgaatcattcttataattgagaactggttcttcaaaattattatggtgttttttttttctgttgttttctttctgtacaatgtttcataatacctttcgtttttatcttttctgtaacagaaaatgaaccatactaaattgctgagttaggatttttgttttctttgagttctgtctctaattgtcgttttgcatcagaatcttggctaatagacaatctgcacaaagatcgc

SEQ ID NO: 25676 - DNA, 771 bp, Glycine max
  Intron number 1 from transcript Glyma15g20550.1 (locus Gly ma15g20550) derived from phytozome v7.0 (chr-ID Gm15; pos 18416927 to 18417697 reverse strand)
cgattggtctgtctccgccacacagagtcccaaaggtataatactaaccttttcctgttaaaattaaaactttgtgtagttaaaatgccatgctttagtttcatcatattaatttatctttcttaacttcttgtcaagcttcggggtacttgtgctttaaatattttgatttgttgggtccaactagagaataaaataaaatataaatccaattttttcagtttatcgtctagtggaagttgaaagctaaagattttatttcataatttggtctagtactatggcgtcatttcattattaggatttacagttccattatttcatttgccatcaacaataattgatactcgatatagtataaaatcatttatatttttcaaattttcatttcttatgcatgcattttgaaaggtaaaattattaatttgatattttaacttattttatttttcagtttatttttctatttttgattttcaatttttctgatcggttttaattgggtataatatgtcaattattatagattttgaaattttgactgctaaaatcgtatattttgtcaattgtatcgattttttattgctacaaattagaccaacttatataaaacataacaaaaagataagtgatccaaataaaagaaaattaaagagacaatgtttcattttcagaaccttttatttattcaagaaacacttaagaccttacacaaatgtaagattattgtttgcagggaagcacaacagcacagggaacacaagttcggat

SEQ ID NO: 25677 - DNA, 904 bp, Glycine max
  Intron number 1 from transcript Glyma14g08600.1 (locus Gly ma14g08600) derived from phytozome v7.0 (chr-ID Gm14; pos 6594231 to 6595134)
gagcggttcccattgggtcatactggacaagtaattaaacctgaaaaaagtatttctttttttctgagctattagtttctttatttgattgcaaatatgttttctcatttcttccatgcatgccccgtgaatgaggtcaattggccttgcgtaacacgttggtggctgggtgggtgacgagaaattattacaattctaagattattatgtgttcatacttcatagctccactaaactaaatacacgtattcaaatgtttttaatttaagaaaaaagttaataatagtagtatttatttatgtgccatctaaaaattaatgaagatcatgatagttctgaactgcctgattagtttttactgggtgacctcttctgcaatttatctgcagaacattgtctgtgttttagtattactcaatggcatattaggcatacttgagatttgataaccttatactagcctccaaccattggctcaccaattattaccttccagcaaggttttaaattgcggtcgtggttgcaattgtgctcacgatgcgtttgcggacagttgaaaaactgttacgttgtgggccaatatttaaaactatgcctaccagtaaacagaaaaagcaacctattgcattctgtcttttcccatctagtaattcttttctaggtccagttaacattttaattaatgaagtggataatatttgtaaagttgtgacattacatttgagattcgaagaggcattgctcttactaggatttgattgaacaacttcaacacataacttccaattagaaataagtagaattttttggagctgcatagccgaatgataaacatatgagaaatttgttgataaataccttacgttgctgaaacaggaaattaaagcaagaggtaaagcattgc

SEQ ID NO: 25678 - DNA, 767 bp, Glycine max
  Intron number 2 from transcript Glyma13g30560.1 (locus Gly ma13g30560) derived from phytozome v7.0 (chr-ID Gm13; pos 33145187 to 33145953)
ttgccactgaagttaactctgtagaacaggtaggtaggatattggatttttgaggtctagatgttctttcagtgtctttgcctgtgttttgaattgcattgggtggatatactaggtgcacccgagattaattgttgtaaagatttccattcttttgtgtgttgtgtgtgttgagtcattgagcattcattcctagtgaattttaaacaaattatgggcagaagacaatttttagactatattgtgaatttgtgatacttttcttgggtttaatcaacatgcacggtaatataaaggctttacattatcaattaatccaaaatcattttttgtatgacctttaagataactgttgtaaaatttaacaaacttaccgtgcatgactgcagttcatgattggataatagtataaaagtataaaacacttttacattgttagtgcatatattatttattcatttttcttttccctttaaacgtagatggtttctgttaccattcacatgcacatttagagtgtggttgattggcggaaaatagcaaggcgaaaaatagaggaatgtaaatgaggcagtatgtgaacttatatttttgtcatgcattttttccgttcaaaattagtgctagatttcttagaaattaaggattgggggccaggcctttgcattttgattctttgtgtggttgtgtgagtgttacaataatctaaccctgtaaacttttcgtatccaggctcagagtattgcttctaaagaaagccagaggcc

SEQ ID NO: 25679 - DNA, 428 bp, Glycine max
  Intron number 1 from transcript Glyma15g03370.1 (locus Gly ma15g03370) derived from phytozome v7.0 (chr-ID Gm15; pos 2368259 to 2368686 reverse strand)
ggttgggaaacatttgcagttgtcacatctaattggtaactagaaccaaaaccttaatttcttcttctctttgacccaaaattcagtctataaattgaacagcccacaacacgtggatcaactgacacaagttggtttagcttaactaatagttttcaagttcaaattttagcgtgcatctaccatatatataaagaagagttttgttgttctgttcatacttaacttgaataatattatcttttgtaattgacatatatggtgtcgtactaaaaaaatttgaacaaactaccaaattcacatgttatataggtaaacatattcttaaaacgttattctatatatatctattgattcatatttgatgctgatgacatggtacttatgtgtcttaatttaaaggacggagaagctttgctttaggggca

SEQ ID NO: 25680 - DNA, 685 bp, Glycine max
  Intron number 6 from transcript Glyma15g11970.1 (locus Gly ma15g11970) derived from phytozome v7.0 (chr-ID Gm15; pos 8869637 to 8870321)
ctaacaggtggtttggttcaaaatcttcaaagaaagtgagtcctgttatttattctcagatctagagtctgtcttgattttcatgaaattcaaatttccatgctatgaatttcattttgttcatttagtttttgccttgttggtgctgtatattcattattttgcagatgaattaatcatttctttttatctgatcatctgattcttgtgtgtttgagagttgagacttgagagatccttgaagcatatctgccaataatgctcacttgaatgagtgattgagagtttaagcaaaacaattgacataaggggttgtggggagcaaaggtgcaattatacttcaatcttcacatgatcgattttatggtgcaaaggggctaggtgaatgttgtcaattctgtccacatttttattgggaaatgcagtatttttcctcatttgtgtggattatcacgagagatagatgtatcatttattaaatatttgtagttcctgtcttctcccattttcattactttgaagagtcaaatcatattagagacaatttagaatgtatttttgttaccgtttattctcaaattactgcatgtagtcttccttaattttattttgttgctagatattttctaatcataaatagttgctttttcctagttgtctctcaattcagttacatcaatcatcg

SEQ ID NO: 25681 - DNA, 1052 bp, Glycine max
  Intron number 3 from transcript Glyma16g04570.1 (locus Gly ma16g04570) derived from phytozome v7.0 (chr-ID Gm16; pos 3859243 to 3860294 reverse strand)
ctgttgcctcttgcaagatttcttccacaacccaagtatggtctctttgcatctcattgctataaattaacttgtctataaattatgtaattagtttgctcactaaaaagtagtagattaagatttcttccttatttctttttatgtttctgattgcccttccatttttttgtttgattttcatgtccatccttgtttttggtgaatatgaaagatttttgtttgatggttactacattggtatcttacatgtccaatcatgtttactaagcttgccacattcataaactgtttcgtatgctgttatagttgtctgtgtttgctgtgcatgctttaacaactttcttctatgtgtacttgtgtttgcagttatgcaaacatctgttttatgttgttgtaagcatgttatgcttctataatacatagagcaacggttgtttgtgcagctataatgttgaaagtgaatatgatagccttcctgtagtctcttgtgatatatattttgcttaaaggattctcttttgaattctagatcctagtttctatcaaagtgatttattaaacaaaatgttactgcttttgacaatggtttttagttggttgttctttatatcctaaaaaagaagggaaaaagaacaaaaaactccttttaggcttttttaattatggtaagcaaggaaatattagctgacaaataatcaaagctgaaattccgttcctgatcttttctatgtacacattagatattagatatgcgactatttttagagctggcactccccctaaatatcttgaattttgttttatggaatttcccttatttttgtatcaattatgtgtaatatgccattgaatattttcgtgcaatttgtttatatcaaaataaaatgctttagaaataaaaacattgttgatagatgtttaagcatctttgccaacaaattgttgatttttggtggctttgaatggtattaaaatggttggtaagttaacattatttgttgattcttgatgcaggggacaatcagctggtagaggtggtggtggaggtg

SEQ ID NO: 25682 - DNA, 621 bp, Glycine max
  Intron number 1 from transcript Glyma13g35970.1 (locus Gly ma13g35970) derived from phytozome v7.0 (chr-ID Gm13; pos 37331510 to 37332130 reverse strand)
gccgtgaaggttaattggttgcatcttgatgaattatcaactctagatgattaactcttgtctatctggccctgatgggtggtttaatttggagggtcaacaactctgagtatatgattgaagagggcaaaaaaaaaaaaaaaataatccaaacaattttaatatgagattttttttaatttctttggtattaatgctccaatctttatcttctcagcttgttagaaaccccttaaattcttaatttcaacttttttttgaaggacttaaatttcaagttattcaaatattaaaagtaaaaaattgaattcccacaaaaaatttagattctattaacatgtaatgtttagtattaatatttgtgtgtatttatgagtagaaaaatattttgatatataatataatatattattatggagtatatttatattttagagtacttatacattactaggattgttatttatcattttccaaacatgtttatgtgttcttatcctcctacatgcattagcgagttagaaggttagacttggtttttgttgtgaagtagcaacgacgagaagaaaacttgacatttttaattattatgatacaggtgttgaaattgataatctcccc

SEQ ID NO: 25683 - DNA, 635 bp, Glycine max
  Intron number 2 from transcript Glyma13g33580.1 (locus Gly ma13g33580) derived from phytozome v7.0 (chr-ID Gm13; pos 35378536 to 35379170 reverse strand)
agtttgaggagaggaagcaagctaatcaaagaagggtagttctcttggttttagtgtggttatttgattttgaggggaaaatagtaacttaataagttttaaaagtaaatgaactgaactggggtcaatgaaagagaaactgctaaagaataaattcctctttgaagttaaaccattcccttaacttgaaaaagaagcggaccctgagagaagagacaaatacagaagcgttttgaatggattagtacaatattacttataaataaggttctgtctcttgaatgatagtccaagattcttttcttttgttctttgaaaacaatgtttttcatttgatgttgaaaataaaattatgacttacttaaaaggatgaaatgactgaaactaagagaataagaaacaatactccccagtaggaaattaatgtattaatatatattttatatgttttttttttaaagttaatattcagttcttttagtatcttttattttatcattgcaagtttaaactttgagatgtcgtattctaatcgccaaggattgtgctatgatgatttactgatataacttgcatatcatgtcttttattgtgcttcaggtgctttcagattctgaaacagtccggtggttgaa

SEQ ID NO: 25684 - DNA, 318 bp, Glycine max
  Intron number 1 from transcript Glyma13g33580.1 (locus Gly ma13g33580) derived from phytozome v7.0 (chr-ID Gm13; pos 35379207 to 35379524 reverse strand)
ttgcttattttgtggctttgatctatctttttctggtgaggatcatggttggagttttggcaacttttggatattctttatttgtttatttgctttttttttttttttttgttttgccttttatctttattttttgcttttttgattgaatagttggtgatgtggaaaagaaagaaaaaataggggggggattggtaatggaatcgtgttgtgagttgtcttttttgttgtttttgttcaaagggtagagaaaaaaggatgtggaatattattgtgtttctgactttgatcttttttatttttcccttgggaaggttc

SEQ ID NO: 25685 - DNA, 894 bp, Glycine max
  Intron number 3 from transcript Glyma14g02210.1 (locus Gly ma14g02210) derived from phytozome v7.0 (chr-ID Gm14; pos 1341697 to 1342590)
ttcactgtagccaacatatttgtagggatattctggtaacatgacttctgttatattacttgatgatgaaatctcaattttctaattccttcttttggtttattctttcctattttatgtgattttagcttacttaaacatctttccaaatatgattctacgcaatctagcttcatttacatttgatcagaaaattgtagaacacagttacttacaaaaaaggatgcattaaatcaataaacaagaaatagtctcttaacaatttcttttaaataatatgcatctttttgtcttttttctttttttgtttttctgttagctttctgactttctctaattcttgttttcattccaacttactgtatggtcgcggaaaaattatatttttgcatacattcaatgtattgtaaaaaatatgttcaattttttatatgttgactttggtgttgttatgcacacgagtaaaaggataatcagatataataattggaattttagtggtctttgaattaactatgttgtagctcaaaaatattaaagatgtttctattaaatttgtggtttgattgacttgtacaaagatttctcattattaaagaagaggaagaaaagaacataaataacgggactctttacaaacatggcatcatgatttatgaaatttacattatgtctattgtttttgctcccaaagagtttcacttttctgcaaaaccagcatctgtgtttttcctcgctcgatggaaattctataggggttctgatatgagcaactgctttggtattgccaaccactatgtttttcatgctttaattgattttattttttatagttacaacctaacatgttaatattatgatgaaaggtttcttttccctgcaatcctcattgct

SEQ ID NO: 25686 - DNA, 829 bp, Glycine max
  Intron number 1 from transcript Glyma13g17120.1 (locus Gly ma13g17120) derived from phytozome v7.0 (chr-ID Gm13; pos 20940448 to 20941276)
ctacagaaaataaaggtactggtcttttcactaatcatctataaaactccattgccaagtttctctccttgggggataagttgaaaggaagttgatacatgcatttaaacttgttttataaaaaatgagcttccttttaaagaatatctctggatttttctaagtaacttagttgttttttaagtttctactttctaaatataacttgaaacattaggtccatttgtttcatagttgagaagaattgattttggtggaactaattttgaactgtaaaaaataattagtgtacacttaaattaatttcagcttatgattttacgttggaatatgtgtcacaataagcggaattggttatggagatgtgctaaacgggcacataggtgtaggaaaattgatacatgttcttcaacttattttccaacaatgtgcttcctaatgaagggaatctcctaacttttattagaaacttcttttttttccctcaagaaatctttaaaccttttataattatcttaagttagaatgtttgctggtttgtttccccatttcatttgtgagtaaattacctattattctggtagcactcaatcgctaactttgagtatgtgtagttattagttaacaacacataatttatttccagagactactcctgtgaaaataaatttctcatattagacaacctgtttgctccatcatccatcaaaaatcattatttttccacaagagcaatgcaccatgcacataaacaatatttgctagtattgataactaatgcatgttccttgttgactctttatccagtctgtaactacgcaaaaggaaa

SEQ ID NO: 25687 - DNA, 779 bp, Glycine max
  Intron number 1 from transcript Glyma16g07430.1 (locus Gly ma16g07430) derived from phytozome v7.0 (chr-ID Gm16; pos 6683421 to 6684199)
gtcgccttatcatagatttcattggtatataccttttcaataattctcatcatttttttgctttatttcttattcatttatttgtgaaacacgatcaaatgacatgtttgctttttctatctactttgttttctttttctttaatcatcatgtggtgtctcacaacacaagctaaatcttcttttctttgagttttgttccacaaagattggattccagtttgtgttgttattggagttataagatacatgtggttgaagggagaagagggaagggtgatggaggtcatgagttagaatcttttttattaaaaaaattaacaaattaacaactaatatatattgactgataaaaagaattgtgttgtcattgactaagtgaccaacacaaacatctctacccaaatgaataaagttgggattcaataagaatgagttgtgaaatttttttacacaatatctctgtctaccattatctatttagcagccatagaatcctatgatggtcatacttacaaagtggtacataaaaaatataaagttttcacgaagtgaaaatttaatatgagaagatcataatatatatattaagggatctagttcaattagttgaagtgtatataagtattgtaaatttcctcttatcgtgttcaatttctgcatatcaaaaaatatatcataatatatatagttctattgccaagaaactatcatactagtgatttggtgccatttgtgtttgcagcccagcatctaggtttcccattcttgagtgcatac

SEQ ID NO: 25688 - DNA, 593 bp, Glycine max
  Intron number 1 from transcript Glyma15g03770.1 (locus Gly ma15g03770) derived from phytozome v7.0 (chr-ID Gm15; pos 2642039 to 2642631 reverse strand)
gagcttcgggggcattttgttggttagcttatttcattgatcatcttattttgaagttaccaaatctttttatttggtggataaaaagtttagactaagagaagatacattcctctgcaaatgtcagcgagaatttatagtaaaaatatcgcctattgataggaaaaatctaagaatcaaactcgagtcacagctagtgtgagcaaaagactcaaccagatgtgcaaatcccatgttagcaaagttaccaaatctaacttatctctctattaaagttcttattttcactttcagctccttgtgtttcttcataaagacttctttactactatataagggaataggaagaaagggctatgagaaccattgaaagcttcataactcaccacaagactattattgatgtcaccactgcttgaacattactctacaatttttttttattctgagattaaaaaaggtgtataagtttttacttgtaaatagcttgctcctggctgcaactttaagcctttgcaactcacttttcatggttaattacaattgcttgcttgtgacactttaaaggtcactacttgagtgcatcagcatta

SEQ ID NO: 25689 - DNA, 869 bp, Glycine max
  Intron number 1 from transcript Glyma13g26260.1 (locus Gly ma13g26260) derived from phytozome v7.0 (chr-ID Gm13; pos 29469433 to 29470301)
gccgatattgcccccaaaactgccgagaatttcaggtatctacgtttctactcttaaagcgtgcgttttcttcttttagtgcttagttagactgcatcttgcccttaagcattgctaccaacttgcgaatgaacttccacgaaaatatcactagttttggttttagtctacgaaagtttattcattttaatttcaaaagtgtaggtttattatttttttttcttagttgatgtgatgtgatattatctgttctactttagaatttaagaaacttgaatttcagcttacatttgatgcagagatataagatgcgttggagggttaagggaggagggaaggggagaatgttcgattccctctactaacaaactaacaactaacatttgctgataaaaaaaaaaaaaaaagcttacatttgtttcagctacatgacaataaaaaaaactttcgtaccccattgcccagaggctcttcgctatgcgaaggtatgggggagggatgttgtacgcagccttatccttgcatatgcaaagaggctgtttccggattcgaacccatgaccaacaggtcaccaaggcacaactttaccgctgcaccagggctcgccctctttcagctacatgacaatgacattgaaaaaaaatgcaatgcatgtttggaatcttgtgtgcttgtagaatagtatatagatcattttattacttctcaaagacaatttatttgttctactgtattttgaactttccttttctttttgtgggtgtttgttattgcattgagattctctttattgacaagttcagttgattaattttggcttttgttatttggcaggcagttctgcactggggaatacaggtactggaaca

SEQ ID NO: 25690 - DNA, 575 bp, Glycine max
  Intron number 1 from transcript Glyma15g42000.1 (locus Gly ma15g42000) derived from phytozome v7.0 (chr-ID Gm15; pos 49315253 to 49315827)
ctgattgttccaagtaacattcatatgcccttcacataaggaacattaattaagaacactttctcatacactcttttcaattaaaaattattagatggtccaggaatattaaggtcccaactaatatttacatgacacataaatgtgtttcttattctttttggtagactaaaaaacttagaatacacgtgtacatagagataagttgaaactatagacgcatagtaattcaaaactactgaataatttcttttttcaacacaattagtattactaaagtttattgaaatttataaaatcatacgtagaactcattaaataagtagtgaaatctatataattataattatatgatttttttaaaatttaactgataataaaaaatgtgttgaaaagagttttgttaacaattactggccttacatattgtgttcttttcatattttgcttaactatttgtaattttttattgttttaactgacttaaaattaattatgcgtttttaattttactttaattatttgctacactttttgcagggtgggttgaaacttgaaattggagggtgctgcag

SEQ ID NO: 25691 - DNA, 618 bp, Glycine max
  Intron number 1 from transcript Glyma15g08120.1 (locus Gly ma15g08120) derived from phytozome v7.0 (chr-ID Gm15; pos 5715541 to 5716158)
gaaccttttgggacaaccaacaccagcttttgcaggtaacaattcatccaatattaattacgtaccttcctcgattgaattaatttgctaggtacctactctacagctaagaaacttgcatgcacctggcctgttaatttgtttcatgtaatttttcccttgtctcaaaagctttagcttttcttcaacattgttaaaacaaatgtttagtttctcatttttttttaattttactttaaaaaagtattttattttgatgttttaaaatcttctcgttaggttaaattgttttttatactattttttctttattaaagatgttaattttgacttatgtgatactaccatctcttataatttatctcgtgccatcaagttgataaatagacaaaaaaaattgtctaacagaaatgtttttaaagattaaagtgaagctttgtatgcttataaaaaaaggagtttttttaaaacttaagatatcaaattgaaacaaagaaatgagatggtggatcaaaatgtgtttcaagtttttttttaattcgaaaaagaaagatataaattatggggtatgtttgttttaaccaattaagttgggtttaatttagtgcagaccagtat

SEQ ID NO: 25692 - DNA, 378 bp, Glycine max
  Intron number 2 from transcript Glyma15g19160.1 (locus Gly ma15g19160) derived from phytozome v7.0 (chr-ID Gm15; pos 16257440 to 16257817)
tttccacagtaacgaaacttcaagaacataagaaggtacttgactcttgaacctccatttagtatttaacacaccaaaattatatttaaagttctttcatagttcatttttagcataatgattaaatcaaaattgatatctgacttaataattgactaatgttttaacaattattgattacagtcatagagttttataatgtaactatatgctagaataacggaataagtgttttttgaaaaagcattctcttctctagtttcctaggaaatgctagaatttgtgagcctccgcatcatgttaatattttttgtagtagttaaattaaagcttttgacaacaggttatcactggcatcgcacttcctgttggatccga

SEQ ID NO: 25693 - DNA, 810 bp, Glycine max
  Intron number 1 from transcript Glyma13g33280.1 (locus Gly ma13g33280) derived from phytozome v7.0 (chr-ID Gm13; pos 35161235 to 35162044 reverse strand)
cttggcgccgtcatcgacgcgaggacttctagaaggtatatgccgattcctcctccttttctttcttttattttatttttctttccctctcaccaatggattcctcttctttgcaatcgcttcagaacctctcttaattcaatcattccaagggtttctcctttgtctacttgtcttgccttcgttctgttcaattttcaagcattgcgtgttctgattgaaaggggattaaagctatagggaattttgattcttgtttttttgggggtttacgcctgcccatgtgtagttcttggagctaaaatcgtattttcttggggaattcttgaaaatttgcttaatattttaataggataactgcatgtgtggttttaccttggagaagtgcttctagctccagaattgaatctgagttgaagcaactttggttaacttcgttggattaaattttttataattagtttttctcctaacttgatttcataataaaaacattcaaacataaatcatatcacttcaaaattagttttaaccaaaatcaattgtgcaaatgtgcaaaatcaattttgttgaaaatcaattttgccaaagcacatccaaacactcactaaactaattagagagatatgatttgtgagtgtaaagatgtaagtctgaaagagcattttttccaacacaaactcagccccaatcatccatattgtggtcgtagttattattgttgttgtcacacagttatccgaggttgttcctgctgttgaattcaattaactcggtttttggtaagtgcaggaagaaatttgaagaaag

SEQ ID NO: 25694 - DNA, 978 bp, Glycine max
  Intron number 2 from transcript Glyma13g33410.1 (locus Gly ma13g33410) derived from phytozome v7.0 (chr-ID Gm13; pos 35263238 to 35264215)
ttgattgtcctgtggataaataaataaaaaagaaggtaatttgaatcattatttgattttctatgcttttctctaatttttatatgaatggttgttaaatgaatccgtcgtgtgttattcgtgtttggagatgtttggggtttcgacaagttttagttgaatgcctaggattgagttattcatgtttagggttttggcaagttttatattagctggattgggaatggctatgagatcatagatggagttagtttttaattgaatgctactggaaaataaatggacaatactgactagaaatctatttatgttgctgcttgctttccatgcttcttatgtctctagaatttgtgttccttgttcaaaaatttggatacctggcaagttgttgtagggcatcctaaactttgctggaggaagttaaaaatctgcagtattaactattttttactatgcatagcagataataaagggctaaattaagttaattaacagctttctacaggatcatcacttgattgttgtcactttaaacttcttggtacagacagatcctctgactgatgcagatgactagtgtgactgtaataaggaaaattgctcttataagtaaatttaaggaagcgatagtacacttttgttacttgaaaccctaaataagaagactcattggattgttgttaaattggtaggaactaatcgttggagttatttgatgtatttggtcaggaacatttgtttagttaatttgatatcgtagggtgagttattggtcaaagactagtgcacagatacatatttgataaaattggaatcttaatttgtaatatcttgtacatttctgtttgttgtaaacttgtaatattctttgttttaaaagattattttattgacacaatgattttgcatctgtgaatgaaaataagtcttcttccttttgcagggaagactgtttatccaactgatcatattgctaaa

SEQ ID NO: 25695 - DNA, 278 bp, Glycine max
  Intron number 4 from transcript Glyma15g16910.1 (locus Gly ma15g16910) derived from phytozome v7.0 (chr-ID Gm15; pos 13171390 to 13171667 reverse strand)
aaggcccgcgaagcttctagaaggaaccgaaagaggttgttttactttcctttccctatcaaaataaaaaacgaatttatattttttttattgacaaattagtttgatatttttgtttctgcgggaagagggtttggacctacgatatttttttcttcctttctttttcaatcatgcagcctagtttatatttcccatatttatttagttttatttaatttttctgattgatatcatgtcaagaagccacaatcaagagcttggccgggcacagaata

SEQ ID NO: 25696 - DNA, 667 bp, Glycine max
  Intron number 1 from transcript Glyma15g07510.1 (locus Gly ma15g07510) derived from phytozome v7.0 (chr-ID Gm15; pos 5278586 to 5279252 reverse strand)
gcaaagcgtggatacaaaatacgtatcctttttttttaagacagaaaaaaatcaaataaatgtgttttgctagagagaatgcttgtctggaactgtttttggttgtttttattttaagaaaaataaattaaaattatttacgtgtagccgagtttctattgaagtctaggttaggtgtttttttattgcttcaaaagctttttttttttttttggattttttcttctcattctaccttttggttatcatgttatgggagagggcaaggtgggatttggtgtgtttgttttctggggaaaaagaagtgatgcaaattttggacgttatggtgattttctttttcttttttaacattttttttccaattggttgccaggaaattgttgcagaagttaaagggaattttcaaggttttttttttttttttttccgtcccctatctgcacacattcttgtttctctctgtgatcttctggaaatcggatgttgaaagatataaaattttgatgttttagcttaaagggtgtttttttaatttgtggggtcttaatttatttatttacctcttcaatctgttgttggctgtgttgagtgtatttgataatgtgaattccttagccaataaactgtagaggaatttgtggctcattcagcaagcgtcaattgt

SEQ ID NO: 25697 - DNA, 759 bp, Glycine max
  Intron number 1 from transcript Glyma14g10950.1 (locus Gly ma14g10950) derived from phytozome v7.0 (chr-ID Gm14; pos 9174263 to 9175021 reverse strand)
gctttgcggcttttggtatcgcgggtaagttgattcgtgttcctcaatcaacacatgccctttgtcaatatttcccttgttttttttattgtccccgaaaccctaattttgaccttttattggattggcgtattgattttcatactcttttctctttgatccgttttctagattctttttgctttaatggataatgggtctaatgggtttcttctggttttgattcaggataagaaaatttaaacctttctgctattggggggtatagcaaattattgtctctgtgttttgagagtttttaggagcaatgaagattgcatccatattggatttcagcttgtgttgggttatatggtcctttgtgtatggagttgtttgctttgtgacttatgaatgaagaccctgtggatggttcgagtgtcatctttgaacagctgttttttaacttattatttttcttcttttattgttttgttagtggtggaggttttggtcatttttatgagatcctcggtttaaatctcaccattgtacaccaaaaaaaacatatagaaacagagtgtaagacactaggcaaggatgagaatatggacttatgttcattaagcttgttgtatgtattattgattatgtggctaattttgcacaatcctagttgacatatttgatctatattttacattcctttaatgttttcagttacttttataatttaattttataggttgcaagacgacagattaaaagtgtgtttgctac

SEQ ID NO: 25698 - DNA, 916 bp, Glycine max; identical to SEQ ID NO: 25151
  Intron number 1 from transcript Glyma14g05160.1 (locus Gly ma14g05160) derived from phytozome v7.0 (chr-ID Gm14; pos 3576377 to 3577292)

SEQ ID NO: 25699 - DNA, 991 bp, Glycine max
  Intron number 1 from transcript Glyma14g17800.1 (locus Gly ma14g17800) derived from phytozome v7.0 (chr-ID Gm14; pos 19781602 to 19782592)
accgtaccgatctactcgcagctggcaagaaaagggtatgtgatctttgcaatttgaatttcaattcttgctttgttaagtgcgtgtgtgtgtgtgtttggaggagaatgaagtgtagctgttgtgtttctagagcaagtttttcataattggattttggttggttcctactagagagttagattgtataggaattaataagttgttgggtctaagtgtggggcgtatatactgtactttagagaggaaaatgtagatttgataaccagtgatgagactattaagtatcaatggcttagagtttaattaaaccaagacctatataacgaatcatgtatgtgtgtgaaggctaattccttgttttacttgtgagcattcactacgtgcactaacttatttagaggatccaagtccacttaagaaaatagtgcaagggactgtactgtaccctgtagaattcacctgttcatttattttggaaggctgatgtgactgcgtgatttgatattttgatagaactggtatcataacagcaagaaataatgagttttttatttaatgaaactcgggagaagctccctaggaactaatacactgctctggatccactccttacaccgttttctcagtttccaaaagtctcctaaactgtttacactttacagttattcctatttataggcagctgctggtctgctgacataagcacacccttaatgggcctagtcagttgcatgcctggtccacttctttctaacacaaaaggcttgtatttccttggccaagtaacctaactaatgtgtatctatcagatttttcttttttattattatatgatcagaaagcatgtgattttatctttctctttctatttgattcctttcactttatggtttcaaaatatatagggtgtacaatttactggttgcagttctcaattttcactcttcatgttttcattttcagctccaacaatttcgtcagaagaagg

SEQ ID NO: 25700 - DNA, 566 bp, Glycine max
  Intron number 1 from transcript Glyma13g19060.1 (locus Gly ma13g19060) derived from phytozome v7.0 (chr-ID Gm13; pos 22651514 to 22652079 reverse strand)
acgtccttcatcaaagtttccggggtctgttcgaggtgcgtttctgtttatgcgttcagactccatagcttacttttctgctttcatggtttttttagtttcacgaaagaacatagcagatttatttttgcttttatttcatgctctgttgtttcttctcttatttattttttattttatgatttactgcttccttttaattgttgcccgtgacatactctgaaaaatatgaataagataacgcgttagggatgttaatgttggatctgaagtaacctaatcttctcaaaggcattattttccttgccacatcattcagccaatctttttgcaataaattttaaattatttcagatttgaaaattccaggggatgtggtatagtgaaaatccctttaccgcatatgaataattctatatgcaggtggatgaaaagctttaccaaaattaagaactttccgaatgtgagttcttgatgcaattcttttatacttttatctaaacagtagcacattaagcaatgttaataaagttgattaatctgttgttttcattcttttctcagac

SEQ ID NO: 25701 - DNA, 1049 bp, Glycine max
  Intron number 2 from transcript Glyma15g17600.1 (locus Gly ma15g17600) derived from phytozome v7.0 (chr-ID Gm15; pos 13993852 to 13994900)
aggaaatcttcaaataccaggtatcacatccatgatgtaagatttatcttctcatcttaacaatacaaaattcaggttgccattcaatttgtaccagaaatgttgacatcgggtggatcagaaggcttgctttggttctaaattcatgttgtgtcatgattgaatgtgtgggaataacacattagtgtcccacattgtttgaattaatgaatttgggtcaattggttacaatcctagaaagttaagtgttgtttggtgtgagaaaatactttaaaaaatataaaactgttacctattttttttttctaaaaaattataaatgaaacagtaaaaacaattttactttttattgttttcactatatcatgtatcaactttttttttaaataaaaaagtgacattttaataaagaaaagaaataaaaaatttctcgaaccaaatactacctacactccaaaaacccaacagaattggaagcaaagtacttatccctcttgcctattacaccaattaaaaagggtcatgtaaagggaaaaaaaaaactgacaagtgtgttactttttaaccgtgtgttactagcttttgattggggaatgggggatagggaatgagaaagaagagggacgtgtgatttcaatccaacagaatgagagacttttcacctttttattaatctttggagggcactgtacataaattgctagtaatgtacaatcattattcttttgactgtgaccatgctgatgccaaaatcaatgtaataagatgtcctatattctgtgacacctgtactgtctgtatccatggccaaatttcaataattcaataagccatactaattatttgttcacaattcctaataaacaccacatgtaacattattttgtcaattttgtagagatctcttttcacatcccaatgatgtttttattgtgtgagaaagaacaatatggcatgctgaaatttcaagctattactagttggcaattaattatgagtgtttggaatttgtaggtgagggaactacatagagtatacagtgttcaaaa

SEQ ID NO: 25702 - DNA, 836 bp, Glycine max
  Intron number 1 from transcript Glyma13g04190.1 (locus Gly ma13g04190) derived from phytozome v7.0 (chr-ID Gm13; pos 4542521 to 4543356)
aaacaaagtacaacccctacacagaaagggttacgttcaaacccaccaaccaaacacggaaggaatgacgaatcggggcctaaaaagggaccaggagcctccggcgagtactacggtggtggtctggtgatgttcggacgatgcatggcaggtgcgtgaactgcacgccccttacaaggtggtgtacaaaagcctcactcagagagacgccccagatccagtgtttgctggaaaatatagcggcagccagcagtggacgacaggcagagtgggattcacacactctgataccaagttgagactaagatatattcgataataatacttgtatgtctcactacacacagctgaaatgtatttatatattaagagttaaaatacaagctgtctctcaatgacagttaactacagccgagagaaaagacatcaaaatataaaaaactacatatataaatctaacactcttataccatataacagtgttttattgtaatgttctgtgtcgtgtatgaccacacaagctttatttataatgagtaaataggatcaatattgattacataggatcaatctaataataagtaataatgactaaatcactaattactatccaatcataataacagaataatatgtaatcttaacatttaacatcacatatataactatgcttagtgtcttcctcacttggtaactaagtagtttcagtgtaatgttgtgtttgacttcatacattttctagacataattttgttttgaggcttactactgatgttaatgtcattgtctgtctctgattttaccaggatttgctttctgaaagtttattgaagtcc

SEQ ID NO: 25703 - DNA, 705 bp, Glycine max
  Intron number 1 from transcript Glyma16g33860.1 (locus Gly ma16g33860) derived from phytozome v7.0 (chr-ID Gm16; pos 36622684 to 36623388)
ggtgggggcagtgactctgttctctgtaaatcgcggttggtaaaatttaaggggtcaataatggaattgcataattttattttattttacttttgcttccataaagattttgctctttctaaaatattttttttaatcctccctctatataaaatattttgttggttttactttggtaaaagaaaatgtcggttttatccttgtcgtagtattatttcgttaaatgttcatgtgattcacataatgtcacacagtaatccactttaacaacatcatcatcaaggaaaggactaaagcgaaaaggcatatatatctttttaaaagactattacattacatgaatgaaaaatgtttaacaataatgttttaacacatttttaattaactaatattgaaatgcattaaagtctcaagattacgtgaattatactgctaacttcatacataattttatgtgtcttaataaaattcaactaattataaaaacaatatgttaaaatgtatatatttttaaaaaataataatgctaactgttaatttgtaaaattaatacatcaattaaaaaacaagtatggtttttaattaatacaaatataattaacagaaaaattcaaagaaaaagaattaactaacaatagtatagttaatgatgggagaagacattatcatatcagagttgagttagtggcttatgtttgagttaac

SEQ ID NO: 25704 - DNA, 544 bp, Glycine max
  Intron number 1 from transcript Glyma16g03660.4 (locus Gly ma16g03660) derived from phytozome v7.0 (chr-ID Gm16; pos 3077976 to 3078519)
gtcgaaactttcccctcattttcattcttctttcagttatcgccatccttcactctttgcttctaataaactctctatttttgtttcttgaaggaattagggtttttattttcttctttttttctgtgtcgttttggtaattaatctgataaccgatgattttctttggtttcatgcgctggaagtgtttgattaggtttacatgtcatgatatttttttttttttgctggtaaactttttagacttgcgtggttgataatcgctgtttgtatttggctgttgtttgaagttttatggtttttaaggttcctataattaattccatactaatggttttggttcctcatatttttcgttcttgttaatgttaaatgtcaatgttaatgtttatcattcttgctgatttgattttgtttattctcaacggtagttgaatcataattgatgaatttgcttggctttctgaaaataatgatgtgtttgtgtttgtgtttgtgtttgtgttagttcagattagcaaaggtaggtagttagttatttgca

SEQ ID NO: 25705 - DNA, 295 bp, Glycine max
  Intron number 1 from transcript Glyma13g07780.2 (locus Gly ma13g07780) derived from phytozome v7.0 (chr-ID Gm13; pos 7983378 to 7983672)
agtagtagagtaatttgagattattatctaaagtgagtggggaacgacttctcatgcatatttttgattgggtgaatcatggtgcttgtcatttatttattataatcttctaccttctaagttgtaattaaattatatattatttatatgatacaaaaaacagcaccaagagcttcatctaaagtttttttttttccttttaaaataaagagttgaaatcttgatcaacttcatctttgtcgtttggtttcacttagtagcgatcctttcgaagccccttccttccatcagaaaa

SEQ ID NO: 25706 - DNA, 670 bp, Glycine max
  Intron number 2 from transcript Glyma14g13320.1 (locus Gly ma14g13320) derived from phytozome v7.0 (chr-ID Gm14; pos 12641026 to 12641695 reverse strand)
gacctaccagtcataagtaagtgatgatcttgtagtcaatcttctacagttcatctttctcagttttatccacattattgattaatgacataattactaatgaagttaaacggttactatgcttatatttttctggtgttgaggttttagtttttggattgtctttgtgtatgttttaactaagtattgttacttcatcactaccaaagattttgtaggattgggtctagttttgtagagcataaaaggtgtttgatatggaactgcacctagtcagtcttctgcaatttatcactgatactaatttttagccagccgatcatgctattctaacaactatgttcacaagtcacaactgattgataaacatgaaactttggtatacaaatggaaaccaaaagcctaacaagtatttaaagtcattcatgtatttgactatcacacaattaaaagtcttttgcaattcagcacatgctacaaatttttagcctacaataaatcatgcgattctaacaactattttcagaatcgaatgataaatatgaaactttggtagacaaatgtaaagtgatcttaggaagattttcttttgattatgtgttgcagcttcatttagtggtttaatgaacccttgacattgttaaatgtttgatttcagtgttgtctgtaa

SEQ ID NO: 25707 - DNA, 706 bp, Glycine max
  Intron number 1 from transcript Glyma14g13320.1 (locus Gly ma14g13320) derived from phytozome v7.0 (chr-ID Gm14; pos 12641818 to 12642523 reverse strand)
tcaataccgtgatcttcttctactcttgcttttcgttttttgaattttgaatttttgattgcattgattactatatgggaattctatcttgcgctctttttcttggcctagacattgttattgaaataatgaaggattttgttttgtaaacttgaatttgtcaaattgagggtgttgatttgatttttcatttgagagatctttgcataggatataacttaagttttggaaatatgtatatgtctatgtgtatatttatctgtagatatgtgaaattattgtcaatagagttgactcttctttttccatcggactctatttttctactttctggtctgtcaatgtttttatcaatcaattaaattaatattttgtttttctatttttctttgatactgttctgaaacgttcggatcagttaaattagtgactggacagaatttgcattttgaagctccccaattttctattttttttttctgattttctgttgtttctttgttttctgattttctattttttcttccttcggacccgctcaaacatggtttcattggatgaaggatgcaaaacttttcctttgattggatttttttaatgaacaatacatagattttgtgttctggttgtatctgcggtatgcaattttgctctttcagaatgatatttattttggctatggatttttcagtaaccactactaaaa

SEQ ID NO: 25708 - DNA, 673 bp, Glycine max
  Intron number 1 from transcript Glyma17g03300.1 (locus Gly ma17g03300) derived from phytozome v7.0 (chr-ID Gm17; pos 2196036 to 2196708)
ctagtacgtatgtttgaatgtttctcttcttatttgttatgaaattcttgagcttattgtcttatattgtttttggattgataaactggcaagaaagattgttttcaattttaaatgcttgaattaatgtatatgtgtatcccattgtggtacgtgtttgattccatttgggtttggacccgttggtcttgctcctttcagaggcaatggcagttgctgtccatggtagacttcaatggaaatctttatgatctgtaaaacctgtaaactttgcatttcaatcatcaaatgtaatatacaacagctattctgttttaagtctttctgaattttattcaattcattaacacatagtattgcattcatcgttattgatggagatgagtcttctgctttggttattgacttattgtcctagttatgaaattcttcacattcagacttcctgtttaacttaggtagttgtgcatttctatcggaaatgcttatgagtaaagggaagtgaattatttgttcacagaagaagaagaagagtcttttatctctatttgtcttgaatctatccaggacataattattgtatttgtagaatgtcttgtgagaatgaatgttttgatttcccttcctaaaatacttgttcaggtggcattgctcttgctgctggcgttgagca

SEQ ID NO: 25709 - DNA, 690 bp, Glycine max
  Intron number 1 from transcript Glyma13g32010.1 (locus Gly ma13g32010) derived from phytozome v7.0 (chr-ID Gm13; pos 34303172 to 34303861)
ttcttctctgcaagttcttctcaatcctgcggactgtgacttggtgttatgaatcaaccatcagacaaatcaaaccatgaggaggcgagcgttaacagaataggagcaggattgctgagttggcttgcaggattgggcccttggatgatcctgttgggaatatgctttttctgttaggataattgttgcaattctgttattgctagctttctctagaacctgcaaaaaaaggaacgaataattagcaaatgaagcttataaattgtcaacccatgtaatgaatttgcaagcagaaatcaaagtttcttttccttatcttatccctttctttggaggaattctgggcctcgaactccagaaacacctgcactcattttctctttactatccatcttgttacttgttttcattgaaaaccaaacatcttatgacttatcccaagcactttaataaatttgacgctgaagagttaaaattgttataatattgaaagaatcgcaagttattgctctcttaggggaaaatgggttggggatttgtcaatttaacgtcataatattttcttgagctgttaatacttagttatatgctaaatagtcaaatattttattgctttctttgtttaactcatttatctgttaccttaggaaaattaacaatttgatgatttattgctagatttcaatattg

SEQ ID NO: 25710 - DNA, 769 bp, Glycine max
  Intron number 1 from transcript Glyma13g37080.1 (locus Gly ma13g37080) derived from phytozome v7.0 (chr-ID Gm13; pos 38255301 to 38256069 reverse strand)
taccctcccactgttggcttacctgaggctaagaggtttgttcaaactttccttctactcaatcattgtacaatataataatagtaattactttattaatttgtgtaatactaaaaaaagtaggatatatattttcatcaaagtctcaagcaaatggttaaattgaattgagattgtttcagcttcataacagtcttaagtttaatgattctaatgcacctttgtaattaaaatactacttaaaaaaagaattttatcatgtataataatttgacttaatttgaggataattatcttcaataaaaaatatttatgctcttaaaccaaacaaaaaaatgaagattttttcaattgaatggggcattcaattcatatgatgcacgtagaatttattaattgctaatctacacttagtagagagaggagatagaaaagatagagatatagatgtgatagatgatatgataaaaaagaagaaatataaaaaaaaaaaaaaagcatcaattcagtatttatagtgtgcaagagttcatatattattactcatataacataacgagtaacattcaaatgttttcagctcaatttggaggattatactcctttgctgttagattataggtataactgtatctggtaatccaacaaatgagactagtaattaatttcttgaaccaaaaatcaatttaagataatgtttatttcttattaatgtgctacaattttcaaagcagggctgttgcagaccatctcacctctaatcttccac

SEQ ID NO: 25711 - DNA, 862 bp, Glycine max
  Intron number 3 from transcript Glyma17g03940.1 (locus Gly ma17g03940) derived from phytozome v7.0 (chr-ID Gm17; pos 2586932 to 2587793)
ataagtgggttggaagggagcaagatttttcatttgtaagtatttttgtggttcattggatttgaagcaatgacataaatgatggtgggtgagattcagcagcatgtacgcaacagttagtttgtacggtatacaagtgccattttttataatgtaatgttgtacaccttactgagttagaacttggaatgtttcaaagattttgtaaagaccaattgatggtaacaagtatttttgggagtcagtaactcagtaagtatacacttcaatgtaattaactaattcatatttgtttaattgtatgttttatgagatgggactgttgaaataggttcaaaatacaattttttgaacaccagggttgttagttatcatctacaaagcccagatacagggatacgacagtttttaaaaaaaaaatttaggatacaatacattccaagtgtgttgacaaaaatttatatagatgcagaatattggtaaagaaagagatattgatcatttctcattaattcataactacgaagatcacaacttacaaaaagaagtttgtgatcataacaaaaaacaaaaaaattggtagaactttgaataagtattggctcagtacaatagcttacaattcaaaagcatcgttactaagattactatctaattctaattgtatcattctccttgctcctgtcaccagcgataactggtaagcataaatcataaaaataagaatttctacttgaatcaataactggtaagcaaaaaaaaaaaaaacgctgttttctctctgtacccaattactgatattatttatttattgtgattgtcaaatgtcaggcaaagataccggatattgagaagtgcttag

SEQ ID NO: 25712 - DNA, 704 bp, Glycine max
  Intron number 1 from transcript Glyma13g37140.1 (locus Gly ma13g37140) derived from phytozome v7.0 (chr-ID Gm13; pos 38311805 to 38312508)
ggaagacaccaagcttctctccacgcccttcttgggtattactccttccactttcaataactgcgctacttcaatttcttcttactctttaagatctgcattcttttattttggatctactgcatatattgttactaaccttaccacatcgctgttttttgtttctattacttgtaattttagttagttcatccatgttcatttacttagttataaccaatatttatcatttctattttaattttgacttgatttgaagtatcagagtctgacagcgaagctaaattgtaaactgtaacggattttggatagatatcccgaattttgtgtcatttgctgcttatctgctacaaagatgtagaatttataggtgtatgtactatctatatgtcttagatgcatagattgagtgtatgaattatagcaagtgtattagaaaggataagagtgtgtttgatttctattttcaaaaactgttttttggttttttaaaacacttgttttggaagacattttcaaattttaatagaatttgtatgagaattgctaagtagcatactagcatgaaattgtattagaaaacggtttttaaaactagaaagggggaagaaaattacccagaccctaagtgttttctttttctttttgatgtcacactggtatgaattttgtttgaatgttgttaggtaatctgaagtgcagcg

SEQ ID NO: 25713 - DNA, 578 bp, Glycine max
  Intron number 2 from transcript Glyma13g37140.1 (locus Gly ma13g37140) derived from phytozome v7.0 (chr-ID Gm13; pos 38312918 to 38313495)
ttatcagatacttccctactcaggtgatttttctttcctctgaagttggattataggttaacttgtttgatgtgattagttaattgtcagcatgtgatttctgatttattattccatttccaactgtaaatgtttgattatgatcttctaatgtttttgttttccttttacttcacgtgtacaaaactcaaacctacttctgtgtcattatttaccctggattaattcgggggttttattatattatttgcacaaagccacattcaacccaatggctctgcatatctattgtcctttttgtcttttgggagtgtggttcatgaatcattcttttattttcagagttgctaatgttgtgtgggaaaggatgtcggataacatatagccatagctctcttgtatttgcctccctactgttaccctcttttatttgattttgatatgatgaatgtaaatttatatttggtgtttgactgtttggtctgcattatctatatgttatttctgtatcttaaatgctttctttttgtttttttttttcaggctctcaactttgcttttaaggattatttcaagag

SEQ ID NO: 25714 - DNA, 656 bp, Glycine max
  Intron number 1 from transcript Glyma13g43940.1 (locus Gly ma13g43940) derived from phytozome v7.0 (chr-ID Gm13; pos 43502323 to 43502978)
gtgagggcaaaggtgtttccaatttcaattacctggtaatttaactaattaattgcttatcgagttattgattcagattgagtgagtgtgatgttatattttggagtagtaattttagttaaaggtggggtttaaggagtccgaatgtgtgggatggttgcatgtaatgaggaacttgtctctctaaagttaatgtgtcttagtttattttggtaggttgaaaatggttctgaagcaatctttttgtcaatggctaaaatggtcattctgcaccatgacttggttggttataatttataaaacgccgctaaactaaaagtgtgttatgatatgggaagctaaagtgctaggcatcaattttaagaggaactttagaagggaagaaaaagaatgatagcaggtgcattggcctgcagttatgctaatgctagactcccccttttgaagttttgaaacggttattaatttggtttgctattttgctcagttataaaattttgggtagagcctaaagtgtcatttttgttttacatggtacttttgttgtacataacatttgatatagttgaaaatcgagtctttgtcattttatagaagtttgttgatgctatttccttcatttaaaattttgtttttcaggaatcaattattcgaaa

SEQ ID NO: 25715 - DNA, 1020 bp, Glycine max
  Intron number 1 from transcript Glyma14g34200.1 (locus Gly ma14g34200) derived from phytozome v7.0 (chr-ID Gm14; pos 42620384 to 42621403 reverse strand)
gaagcgccacaaggtctcttttattatcttctactttcccaattccatatttagggtttttctttctttatcgctttgttcagtttcaaattctgtattttgtttttgttttttttaaacaataggtaggcatttatatgattacgcgattccgaattttgcgaatttttatatttctttttccaacaatttgatgagtttggttatgtattttttctaaaagaaattattcaaaattatgattgtaatcaagtttagaattaacaaaagaagactttttcatcttatatgatactgtctctctgttaatatggggcatagggtagtttttgaacatcatgttctatggtgggctgatcacgcaaaattggttagctatcttgtattgttgtttgaaagctaaaaatgtaaaattggtttaggtacactaattaaacatactggtgttcatgatggcttcctaggtaggttgattaaatgcgattaattttggttcaagtagctccttgtctcccttaagagaagaaggatgcgaatgagataatgtttttaaagtacgtgtttacatttgataattacctatgagaagaaaatgaaagatgaagaatcaagaatatggttgtattcaatacagaatggggcctcatgccatgactgtttaattttttctataacattttatcacacgagggtctgggtggatttatttatatgcaaatttttttgaggttaagttacttgactgcaaataatttcttcacattggttaaaaacttgaaatcagaatttgattaattggatggcctagtcatctataaatggggataatattgcaatcaattggttgagctgcccatggtttcactcaagcagattgaagcacttttaagcaagttttttgagaaactttattctaatgcagggaattaccaatttaatctgttacagtctccaaattgatagtatgtgtactcattgttttcaggacgctgcagtatcagccagaaaagccgaagtatc

SEQ ID NO: 25716 - DNA, 633 bp, Glycine max
  Intron number 1 from transcript Glyma16g31240.1 (locus Gly ma16g31240) derived from phytozome v7.0 (chr-ID Gm16; pos 34662043 to 34662675 reverse strand)
gatattgtctttcctgattggtccttctgggggtaattaagctactaaagctaacttcactcttttatactatttaatatgtaatgttagtacttaggatgtatgtgtttgagaactagttgcactcaacgtaactctaacatgatataaaaaaaaaagttaccacctcacattactttggcttttgtaccgtaaaaagcgtattattctgttgaacgtgagtttaaatgtttaaccagacaccaattgtaggaggagtaaatagggtttaatttggtttggtgtagaatgtagattaatttgtcacgaatttacaatctaactaaaaaataatgttacttgagaattttttaaagttttataggtgcgtttgtttgatgataggaaagagaatagacaaaaagggaaaacacaaatgatgaggcattatttggtagaaggaaaaatgaatggaaaagaaagagaacatttgatatttagaagaaaacaattcctcctatttcttctttaatttaattttcaaaattttctatctcctctttactttctttcctcaagaccacatagagcgtatgagtgttgatggcatgttattgtatctctgctgcgtagggctgaggttaacataaagcc

SEQ ID NO: 25717 - DNA, 440 bp, Glycine max
  Intron number 4 from transcript Glyma15g09950.1 (locus Gly ma15g09950) derived from phytozome v7.0 (chr-ID Gm15; pos 7182471 to 7182910 reverse strand)
gttcgggcttcatttgggataaatttgatcacatagtaagaaaagccaatatcagaatggggaatttgttcgccccacttggattttattctagttctttatctcattttactgttgactggtggagcattttttgttttaaatttacgaagatagttagctacaggacaaattattacttgcaagttgcaagatgtcacaatggtgttttcaattcaatgaagattgaaatatggaaaactgtttcattgagtttgaaattccttttatcattatcaaaataattggacagtgagtaacacttttatgatagtttgacatggtatcttaataaggaattgtagactctcgcatgctatagatattgtctttgattgcacaggttatcaattgttcatagaagtcatgtgtttttgctggtggacaggttaccaattacc

SEQ ID NO: 25718 - DNA, 983 bp, Glycine max
  Intron number 2 from transcript Glyma15g34830.1 (locus Gly ma15g34830) derived from phytozome v7.0 (chr-ID Gm15; pos 39387928 to 39388910)
tgcaagtaaggagagatgattttccgggctctcatgtccgtaaatgcattcatatcatgcatcgcataaacatctcttcagcatcataatgaacatatcgttcctgcatttgtctgttatcacattccagcctcacattttgcatgagtcattgcatcatcatgcatatgcattcaacatactttttgttctacatgtttgctcatacatgatccttgtgttttcctctacaaaacaaaaaaaagaaaaaaagggaagcatgaaaattcatgatgcattcttagttgcatgtgttaggtaccatgagccaaccatgttgggatcataaacccatttctaaaataaataaaaaaacacaaacaacaaaacaaaatgattgagcatggtacctaatgggtggttaactaagaaaggatgtctcttcgggcatctcaatctcataattacattttccatgcatagcatgcgtattcccgagtctttcatccctatgaaatgttgttgaagtattggcgatcaaaattgccattccctgggttatggggttgaaccaagctcgtgcttttacgaaaaggttcatcgagtcaagttgaagtaaggaagtaaccatcttgcaaaattggggcaaaagatggatcgtgttacatcattgcttcgtctactgccaaacacgtttaggattgttgatatccttgttacttccagcttcaccttgacaaagatgtcatggaccatgttgaaaatctaaatcgattcaaccccatgtcctgcgtaaaaattcgcaatactacaactatgcatcattcacatacatccatgcttttcattggttgcattgctcattacattctttccttgaaaaataaaataaaataaaatgaacttaatcattgttataaaaaaaaaaacatgctttacggtgccctcaccgaacctgtgctagagctagagtaatgggtgaagtagaggaggtacaagagaag

SEQ ID NO: 25719 - DNA, 934 bp, Glycine max
  Intron number 3 from transcript Glyma15g19570.1 (locus Gly ma15g19570) derived from phytozome v7.0 (chr-ID Gm15; pos 16923456 to 16924389 reverse strand)
ttcttcttttgctgttaacaggtttggaactttcctcaattagggttttttttattgctatctctagataagcaagctgttttctgaatttgtcgagtgaattaacgtcttttgagcttgtttaaacaatctttctttacttattgcactcagttatgctgctattgtctccactgagatcttcagaagaatgctaaattttccgtgttatgttgatgtggaggccactagctagtgcctagttgtgatttagctttttccctaatgagtgattttatatgttgtaaaattgtatctgtttttttgaaatataatggtaaaaaacagacataaaacactggatgaattttttgagagagaagttagtgataaggagagaagttatatgacttcataattagttttcactatagccattttgtccaggagttgaacatgaggatgaataaccttctaaaataagtaagagaggcacctgatgaatttgatgaacacttctttagaagatggctcggcaaagcggaaataaatatgaggattacaacctgacttccctccctctccccctccccctcccccaaggaaagaattgttagcccaagtttcatcactgcttgctgcatgcttcactttgagtcccttgatgttttaggggcccaaatcagatccctaattccctatagaatattgttagctcaagtgcagacaaatgctttggatttttcattattattatgttcataaatgctaatgtataaatttaacaatactgcatgtagctaaataaaaattagtttaatttcactaagcattataacttataagcttctgcttcttatacttaatattcagtccatacagttttattatgtttaaatgccttatttttactgtttcaggaatctttcaacaatacctggtttatcaagtgcag

SEQ ID NO: 25720 - DNA, 684 bp, Glycine max
  Intron number 3 from transcript Glyma15g29910.1 (locus Gly ma15g29910) derived from phytozome v7.0 (chr-ID Gm15; pos 32834415 to 32835098 reverse strand)
caaagagcttggcaggttttgtttgatttcttgaattttccatttggatattgcatttggtatcacatgtgcttggaatggaatagtaatgatcaagagtgtgtgactgttggtttattttttgtaatttgttaattttcttttccattccaatttcatatccaaactatgagttagtctggttagttttttaggttggccaatgaccactgttatgttcttcattgcccagccctttttgtagcctgttatttgccagtcttagttttgttgtgttgtatatggaaaaataacaacttccctttccttttgtcatactaaaattggttacttggtcatattgctgctgtcttcatggctgagaccatttattgcaagcttatgttatggcaaatggaagagcttcgtcttaattgctattctaatagtttgtaaacattgcatatccatgatttatctgtaagtttggcactagaaggctttccaattttgatatttgcatgtccgtgctcaaagtgtgtaaatgaagtttgacaactatgttacgaactaattattttactggagctgcttttgtaattccattttatgaagtagaaggttcttgcaataattcatgtttgctggcttcaaattatatatattgtacttttttatgtataggaatctcctgagggcaggaag

SEQ ID NO: 25721 - DNA, 878 bp, Glycine max
  Intron number 1 from transcript Glyma13g19430.1 (locus Gly ma13g19430) derived from phytozome v7.0 (chr-ID Gm13; pos 22939691 to 22940568 reverse strand)
ttccatttttgtccttcctccccgagaaaaaagttagttcctctctctctctctctctctctctctctctctctatatatatatatatatatatatatatattgtgttttttaaacctcagaaaacggataagagagaactgaactgaagttcccagcgatttgaagttttcttccgaaaaccttgaaatatatggcaatatttgttctcgcgttctctctatctgtgttcctgtaaactgtttttggcggttactgctttttttttcttttgagattgagctggattcatgatcgatcttatcatcatcaacactgaacactgtagaatcgaagttgtaatcacgcgttttgtgtttcgctaactgttcatgcgcatgttctttggtgatgatagatctgattttgatatcgatttcaccgtttaatctggaatcacattgtagtgtagggattagctttttcttgcttgcttgatcctgtagtaatgatagcatatggtttgtctttgaattgttttctgttagattttctgctctaaattacttggatccattttttgttgctcaggcatatatttaatcattttgcctgtttttccttgcctacaaatttttatgtttattttattgttttctatgcataatcgcttgggcttgctgctttaaatagatttcttgaagatttagtttatggtttaactcaattgtatctgttaagtgtagttgaccccttataggggaataaaacttggtcattgttgttaatgttataatagcaattgacatcacatgggcatgttgatctgtttgatttcatgtgttaactgccaactaattgttgatgtatggaattttacaggcgaacgcagcatctggt

SEQ ID NO: 25722 - DNA, 713 bp, Glycine max
  Intron number 3 from transcript Glyma13g37640.1 (locus Gly ma13g37640) derived from phytozome v7.0 (chr-ID Gm13; pos 38672807 to 38673519 reverse strand)
gaaacacttctcacaaggctcaggtatgtatgcatgtacatacttaattatatgaaaaatgtttcatgcgcactttatactagtagacacatggagaaagaaacagatagaaaagagagaaatgcaaacttcacgcgtgataataaggagaaatattttcttttttcataaattaaaaaagttaaatatacatgtcaattttgaactatctaataatttttctataaaacaagagattatcgagactactagtactatagtctcaactaacatataattaactgggacaaataattaaccttttttagtaaattgaaaattttgattgtcatgagaattgattgtaattatagacatgtaataaaatgaagctatataataatttctccataagaaaagacaaattaaaaaaattatgagtgtcaatgaaagaaatatatttttatacatacaagaagtatatatatggttagagaaaagagtgtaagaagattataaatcttatattaacaattaaaatggatgatgaagattgtgtatatctgtatatcaaatatccgctcttcttatttctcatctctcgttagatgtgtttcttatatatgcctatacataggtgtatgcctcaattaataatctcttaacgaatgagaaatgatggattgattgatggtttcgtaatttgtgaatgtctgtctttagagcaatttgat

SEQ ID NO: 25723 - DNA, 824 bp, Glycine max
  Intron number 1 from transcript Glyma15g02640.1 (locus Gly ma15g02640) derived from phytozome v7.0 (chr-ID Gm15; pos 1794575 to 1795398 reverse strand)
cggagaacgcacggcaggggaagaggttcaggaaggtaattgtcctacctcgtattcgtgcgtgagaaaagagggcatgcttttcgtctctctgtcggatccaattcctggtttgggattagggtttgattcgatccgtttcggatcgtgtttcgtcgcccccttgtttgttttgtcgagtaatgcttgttttggcttttgggtcagtgttttaatccttgtttggttgtgggtcttgtttggttttagcgttgtttgtgctgcagccacttctgttgttgaggattggttgctttagttttgtcaatcaacgtgtgagtttattgagtatgatggcttagatcttggtgtggtgtagtttagtgagtggcgttgacgattgactgttggggtctggtcttaacatgtgtctttgacaatgtaaaagacaatttgattttggcagtgtttgctaggttggtgtctctttaatttaggtgatagtttaagaatgggtgtgtgtggcaatcctgtctgtgccaggcaggaaacctcattttctttccaaacaaaagtgaaaataaaatggaaatattgataagtgttagtcagatatgtggtgttatatgaaggaaactatctagatatggaattaggttctttcaaggggagggaagattgggactgactgagtgtgtgtcctaatggttgcaaaagaggaatttcgtcggtgcttttgtatctgaattagtttgtggttcaagataatgtgaaagtttccttattattggccttattgtcttcctacagtggacataatttctgctattgaatttgacaagtct

SEQ ID NO: 25724 - DNA, 757 bp, Glycine max
  Intron number 1 from transcript Glyma15g28370.3 (locus Gly ma15g28370) derived from phytozome v7.0 (chr-ID Gm15; pos 31036171 to 31036927 reverse strand)
tccttcagtccgctgtctccgttctccaatccctcgtcattcccgtaactacttacttccttaaacgctttttttttttgagaggaaatgattctgtcgtgttgaattctcaatgaaaaacttatgtgcgtctctctcttcttagaaatgagataagtagggtcgctttagaattaaaatttttgtacaattagaagagaggtacaaaacttccatgtgatagttcttagaatgtgatttagatgtaactcaatcctacaaataagacttctttgtatgctgtatggtgagggttgccctctcactgttatattctaactttatcatattagtagtcgatgtgaaatctttaattgtttaataatttaactgagaagatccttgaacaaaacttagatctagtttcataggtaattctcctggcgttgttccatactcgttgtagaaatagggtttcacctccacaatttagttatatcacctctaatgaaaactttgttgttcatattatgaaagtgaaactaattttgattagagaaaaattccaaaaccaactataaacctggttcaagatccatttccttccttgtggaatggggaaaaattgaaatgattgactttttggtcttctatagaaaataagagatggtggttttttatttgactattgatgtaatgggtcagcattatttttttttgtgaagagagttactgatgtgaattctgttgtgggtataggctgttgggtttgaggggg

SEQ ID NO: 25725 - DNA, 316 bp, Glycine max
  Intron number 3 from transcript Glyma14g27610.1 (locus Gly ma14g27610) derived from phytozome v7.0 (chr-ID Gm14; pos 33861342 to 33861657 reverse strand)
acccttctcaactgtctcctttctgcttggtaagtttctcactctgttctttcaattcttttgttttatctttagactttttttgtcggttattgttgtcattgtcctttattttgcatcattttcatgtagtactttttggtcacaatcttggctttataaactataccatgttctttcttgctacccttttgtttcatttctagttagctcaatttgagaaagacaaatttcaaatgggttgattccatgtagtaaagtttgatttttaatgatgggtctaattatttttcttctgattttacaactcacaggt

SEQ ID NO: 25726 - DNA, 986 bp, Glycine max
  Intron number 1 from transcript Glyma16g32810.1 (locus Gly ma16g32810) derived from phytozome v7.0 (chr-ID Gm16; pos 35913600 to 35914585 reverse strand)
actgaactctccaagcccctcactccttattgcaggtaaggttcagtttgtcaagctcttactttctggataattctatcgttatgccatacttttctatgccattatgtgcttggttgaggaggtagctttcttctatttttatttgaggtagtgtgcaacaggaggactgaaacttctttctaatttctatgatgttaacatgtttgttggttttaaaatgtgctctatcatgaaaatataaaagggaatgattccactaattcgtttccacaaaaactctaaatgttttcactttggttcagggaaataaattcttttgatagcatgttactatttaattgtgataaattaagattattttttctataaattttcattgggagccaaatgaaatagaaagggggaaaaaatagaactatactattttcattatcacaggttctgctctcaattttcatccagaagagtgtattgtatgcaccatatcattgaagttaatgtgtttaaccagtacaatttagaaaaagaaaatatcaattgttcgagaatcaatagcctgcttggtgtcattcatggtcaaatgcagagttgtgaagctttagtttgttgcttaaaacaagttgcatgaatatgaagatgaattattctggtttatttcatgctccagtgcattgaatattcatttcatatcaaagtataatcaacatctgttctggtatcaaatgtcctcaacaggataatgttcaacatttgatgcatataaaacaagttttagcctaggtagttgtactactttcaagtcccatttaaaaggtaatggcaaaaggacatgtttgatgtggtttggaagttaagggttgaaaaatgaagcattccttagaatcttgtatcaagtggaaagtcttgattttcccctatctatagtgtgtgtttgatgcaatttgaattccaaaaatcttatctttctgagtgcttgggtgcag

SEQ ID NO: 25727 - DNA, 661 bp, Glycine max
  Intron number 1 from transcript Glyma13g20010.3 (locus Gly ma13g20010) derived from phytozome v7.0 (chr-ID Gm13; pos 23486837 to 23487497 reverse strand)
gggtaacctaacaattctccattactctttcgatatgcttcactgcatgtttatgttccttttatgttttatttgctttgttcccaaaaattgaacgcacacgaaggaacttgagctcgtgaatttatatatgcttctggtagatctgtttctcatcaaataatctcatcgattcttcccgtgtgaaaactttatattttctacaatgggattatgtatatttatcggtgtagtgtttatgttggttttccccccgttttgtgcaatgtgatttgcttcttcaatggtttttgtttaattttatttggtcgatgatctaaagcttccttgtaaatatcgattatttcattgatttgttatttgatgttagttatagggtcaatggaattgagttcctttgtcttgtttttgaggggtgtgggagaaggggcaaattgcttgtgacaatttcaaaaaaatgaaaataaaatggagtgaacatttaactaggttttttagtgatgtccttctagacttggtatggtcaatgaatggaagaacatttaattaggttttatagttatctggtctaattcaattgggggaactaggaattggttgatgaataaaagaacatagaatgcatgaaattagaatttgttgctgtcttacaggaagacac

SEQ ID NO: 25728 - DNA, 592 bp, Glycine max
  Intron number 1 from transcript Glyma14g39450.1 (locus Gly ma14g39450) derived from phytozome v7.0 (chr-ID Gm14; pos 48551821 to 48552412 reverse strand)
aactcattaacaagcctcatatcaagagtattcgggtattccctaaccttcttatatttcatcaaatgttttttttttcttaataagcctcatatattgtattttggattctatagaccaagagtggtctctaatcatcacctcaatttgatatcatagaactcatgatgagtgatgagctatggagcctagatataggatatgacatgtgtaccatcaaggttatgaaacttgagattttatgtagactcccaaaagtttcatcatcaagtcattttgtttgataatagaattatgaaaaaatgatgaatatactgctctttgtcttgtgtttggtgactagtaatgtcaatcatggagttgatggtattcaaaattttaaagaaaatttggagcatgagagacaactaaagttcattaataaacatcttgttaagagtattcatgtattactcttagccttatatatcaatatattcttcttttaattgagcttggatcccattgggtggtttaataatgtttttaatatatatgttgtattttggattttatagacaaagtttggagatattattgactgcattgatat

SEQ ID NO: 25729 - DNA, 829 bp, Glycine max
  Intron number 1 from transcript Glyma14g08960.1 (locus Gly ma14g08960) derived from phytozome v7.0 (chr-ID Gm14; pos 6968150 to 6968978)
ctctcccaatcctcttccttctccttcacactcaggtactctttttctgttctattaggttttgctttctgatcacttttatcactgatccggcgtcgttcgcgatttcccctgcaacactcgatccaattaatctgatttcatcacgtctctgattgattgaatcaatattcaatgtacttgaatctgacgattttaagaacaagaagctagtcttcatttctgtttattttttgctaaaataacgtttcttcgttattgttttcgtaacttcgattggtatctaactccacagctgaatcaatctattgctattgcttttgtattctggtttcaaaattggtgttgtgcggacgataattttcgtgttgttgttagcgtcacggttctctttaataatgaaactcgttgttcacaccacaatttcaaaaccttgaaagaaaaataaaaaatactagtatgttgtatgtggttcattctggacttgcttcgtagtttactttagccttgtttggataaatttctcaacaaacacttacaggaaaagaaaataagaaggtaaaatgaattaagcttctctcagagttaaaattggctttcggagaagctagatgagagagcttctatgaattagcctgcgtaagctaattttagcttaacagagaaacttaattcatttaagctacttattttcttgttctaaaatgcttatagggaaatttacccaaacaggatttatgttgattatatgatttttgagctggggtcttgtacctgaggatcgatgttatatgctgaattagtttttgcatgaaaaaacatgcacaga

SEQ ID NO: 25730 - DNA, 763 bp, Glycine max
  Intron number 1 from transcript Glyma13g04210.1 (locus Gly ma13g04210) derived from phytozome v7.0 (chr-ID Gm13; pos 4556148 to 4556910 reverse strand)
cacgggtaggaatgcagcaccttcatatttttatttattttaaacacaccattaatgtcacttattatatataactatactttctttttgtttttctctctcactaagtgctaaatagaaataaattaacttatgaagaggttagattcggagaattcttataaattaactttacataaattaattttaatttataggagaaatttatttattttcttatttttttctcctataagtatttattataattttattcaaattagcgcgtgtaaaaaaaaataaatgaactgatccaaaattgaacaaaactctgcttcgaaaaccgaacctttttaataagaacggttaggttttagagtggttcaacttgtttctattcaattatttaattagaaaaacctatccatatacagtatagaatgaataattgacactaatggaaccaaaccgaagctaataaaatgtaaaccattttgaaaaaaatttaactaactcactttataaaaaaaaaaattgattaaccaaactgtttttatgaggtgatttgtaaatggaccggtttggatttaaatacaaaccaaatgtttcagggtcttaatccaaaaatgagattcttaaaataagtgaattcttctcttcctctatctatatgtaataatttttctaatatattaaaatacgtagctttataatttactaagataataacatatgtatatcttttcacttttggctattttggatccgtccttgttgacaggat

SEQ ID NO: 25731 - DNA, 1058 bp, Glycine max
  Intron number 3 from transcript Glyma13g43980.2 (locus Gly ma13g43980) derived from phytozome v7.0 (chr-ID Gm13; pos 43556362 to 43557419)
aaataaaccatcccgtaggtccttttggcacaaaggttagtgttatcactttttatatatacataaatgtccgtgtaatgtttgcattgagttgttaaaaattactcatggctgcgtacattctaattatttaagaccacaattatattttaaaacaaaatataatttgaagaaacaggcaccaaaatgtatacaattggcataatctctacacgaagttattcacatatttttatttattacatatttaaattgtaaaaatatgcagaaggataaagtgacaaaaatgtcagtcgggttggaaccattactaattactacccatgcctaccgagtttaatgtaaaagcaatcctctggagctattgctcggacaggatttgtgaaggagaaatatatatatatatatatatatatatatatatatatatatatatatatatatatatatatatatatatatatatatatatatatatattgatgtcttgctaacatatgatattctttagaagcaattaacaatcaatataaagattccctaaaaagaaacttataaagcatgatggtgtttgtattattatggttttcggtgggtgatagtggtaaattgttagtgtatttgacaaactgttatccttaattactcctctgcacttggtcgtaaaagatacaaataaagattaaagacatttatagcttgttgagcttttgcccaaccccaatttgggggtttcccgacattaaacataacactcacttaaactataagtagaattgtgttgctatgcaacttggatttgaagtggggaaatccacttcattctctcatatcaagggatctgatgccctaggcctttctttttttatttccttcttcctttttccccttttttttaagtggaaatattactttttttttaaaatcatttctttagattcacaatgccgtaatatataagtatataacccttttgaagtatgtttaatatatgtttgctttgttgtctgttttggttgataggaagcacctgctgttgttaaatcttactttgacag

SEQ ID NO: 25732 - DNA, 456 bp, Glycine max
  Intron number 1 from transcript Glyma13g21270.1 (locus Gly ma13g21270) derived from phytozome v7.0 (chr-ID Gm13; pos 24761611 to 24762066)
attgaaggtgagattataacttttctaagaataaatatatattcagcaataattattgtattaccttaaatgtggaagtaaccttgtcccttcagcatggtatgtggcatgataaataatcttgtcttttaagtatgtaatcatgaatttgatttatgacctgtgtgtaaaaaagtgtgtaaaaatatttgttgagagtgatcaatctcttaatatatatttttattaattgttcttcttatgctttgtgattaagtgaatgataattttttattggttttggagcaagaatgagaattagataattctttatatcaaattgtcatttaaattgaaatctaagcatatttgacagtttaacaaaagttaatgacttgcgtttttttgaacagaaagaaactgaagttttcaatgtctccaaacccgagttcaatttagctcctgtgaataaaccag

SEQ ID NO: 25733 - DNA, 823 bp, Glycine max
  Intron number 3 from transcript Glyma16g33240.1 (locus Gly ma16g33240) derived from phytozome v7.0 (chr-ID Gm16; pos 36220426 to 36221248)
cgctacaagctcctcggcggcctcgctgttcgcaggtataacatattactctgctaatgcattcttatatatcaggcaaggattctagctttggttattatgaatttgtacattacttgcttaatgtttatgtttcaccatggtaggtagattaatgtgaaagctagatcacctgtttatattatttgatttgatttaacaatttattaactggtaattttgctattgttgttcataggtgtatacctagtctttagatgttaactgggtattaagtacattgggaactatttgatgatacaacgattgaatcccacatcctagccactttgcctccacgttgacctagctcccctcttgcatattgttaattaccttgtccataatcaaagagaaaattctgtatgaagccatcacaacatgatagctgcttctttgcaatctgttttatgcttactgcatgctgtgagactgaaaatatatgtttttgcttcttactttattgtttgttggctgattgtaatatactgtggatttctttttagttttgggtatacttatgtaagatggtatgattaatctgcccatggtgtttaatggaacttatggaagtgggtaccttgaggtgatatgtggtagctccttattttagacctgtgtttctgtagcaacgtgtttccatattttgcattactaatgtgtttttatggcctgggtgcttttaaaattttccttgtgtatttgtgtgaacacaattcttctgcatccctgtggcaaaattataatctctatatatcttaaactatttatttcagggcttgct

SEQ ID NO: 25734 - DNA, 859 bp, Glycine max
  Intron number 1 from transcript Glyma16g02860.1 (locus Gly ma16g02860) derived from phytozome v7.0 (chr-ID Gm16; pos 2438444 to 2439302 reverse strand)
gtttttgtttgcagattcaggaactggtgtgtgaggtaatatatttgctagatcttcatttccctttttttttttgcttcatggggtgtttgttttttggggcattggagcttctttgttgttttgtggctcaaaaagtttattccttttgaaggagttgtttgcttgatgaatccttgtgctgcttccccttcaattcttaatttcttatcggcaatcgagatctggtttgtttcaaatttgtttaactattcctttcattttttgagatttgaaaaaggttgtttttttttccttctgtatttctaccatttgaatcaattgtagataggcattgtttcaccgactgcaatttttctgaaagtactgcatcattgcattccctcctccccttttctcgtggctgttaaaattgtgatgttaattattgcctagtcttatggtgaaccataaccgactttgatttttaactattcttgctgaagaaatttgaaattcatcttaaaagctgtggctgcacttctgatttattctgtcaaaaggaatgttgaaattgctaagttgactgaaaaaaaaaaggctatggtaattgtagtgttttacagcatctctaacttgctgccctagtttgcctatgtctactttatttagtgtagtaataaatgtaactgtcatccttccttttggagaaacttctcattttaaaacgtacaattaatggacctttttttttaaagtttttgtaacagtacaggcaagtgacagttacattttctttaccatatgaagttctctctgatgtagaagatactatttctcatatttgatcgagggtattttgatatgaatttctttgtag

SEQ ID NO: 25735 - DNA, 824 bp, Glycine max
  Intron number 2 from transcript Glyma13g37040.1 (locus Gly ma13g37040) derived from phytozome v7.0 (chr-ID Gm13; pos 38229545 to 38230368)
cgtctctcgccacagctacggttggcttcctgaaggtattgtctgtgctcctactgcattgtaatgtatcgtcttataacgaaagattcagttcatttgcatttgtttactgaatatttttgcttcggttaagtggaaatgattttgaagatttctgtctgagcactgtatgattagtttagcattttagcttttgtttttcttcagtttggttttggttataaattgaaactggtcttattggtcaaaactttcttcattttatcctgtttgctggttttgacttgggagtttactgagtgtagttagatgagaaggggacttggaagatattttatagtttatgtggagaaaaaaattaggattacaaagtcaaagagtattatattatgtggtcccactctttggatcacctagtctgtgatcattttaattacctgacaaatggatttttacttttgaattaggtagctaaacatctgtaggattccttgtgttctttcttcaatttaattttcgggtaagttagtgtttcttttctgttcttgggttaaacttgatagagtcttgtcagatctgataatagaatgctgtcaaaatacatatgaaatatagttcttcatatttataggaaaaaggtggtccatctacatgatacttcatatcattatataaacattaatcttttacccaagattgatggcttaagttatgccctgaatcttctactttccccactcatgcaactaaatcttttagtgaagccatacatactccttttgtttgtaggcaaagagaagactatttgaagatcaagaagcaag

SEQ ID NO: 25736 - DNA, 791 bp, Glycine max
  Intron number 1 from transcript Glyma13g28500.1 (locus Gly ma13g28500) derived from phytozome v7.0 (chr-ID Gm13; pos 31523708 to 31524498)
gctcgttgttggttaggaaaagcaacggggataccattcttcattctaccatcgctagtgaatactttggttagtactgtcattgactactctaaaatacacttatggtgtttagttttggtttgattcttctaagattaaaatttcattttgatttaagtgttacactaaatagttctttctaataatttcctgcattgacatataatgttaattttggcttatatgacaaatagacatgcgtgtaatatgtcatatcatgatttgtcacgtattactcattgacaagttattgatataattaaatttaagaaattactaccgtctaaatcactatttgtctatatatgtatctatggtctccattaacctttactcttcccgtttcaaaattactaatgtttaaatattaaaaaaaatcatattactgatgtgatagttttcaatgtgatattaaaaattttattccaattttgcgcctaataaactacatcaatccaatgattgagtattgtgtctatcaattattcaactatatatctccattgatcatccaatagttataagcaatgcatttatgaaatgtaagaataatttagtaaaattatttcaacaagtaacttatttatggtaaatatttataatggagatgtatataacgaattttgataggtttggcgcttcaaataatagagttgtacccaaaccttgtgaattctgtaaaccaggacgggttatcacctctgcagattcttgcagcgaagcctaattgtttcaaaagcagcacgcgg

SEQ ID NO: 25737 - DNA, 254 bp, Glycine max
  Intron number 2 from transcript Glyma16g00200.1 (locus Gly ma16g00200) derived from phytozome v7.0 (chr-ID Gm16; pos 3211 to 3464 reverse strand)
caagctattatactgccctccaattggagggtccagaggtagtttattttagttttagttttagcttttttgttggaattttcttctttttcattgttatacatctgagtctaaaagacacactaaactgatgttctgattcaaacatattgaaatgcatgtatcaaataattattgtgggctctcagtccgaaaaagtaatggtttaattttatttgttttatttaaggctctcttgtatacaggattcatta

SEQ ID NO: 25738 - DNA, 810 bp, Glycine max
  Intron number 2 from transcript Glyma13g40440.1 (locus Gly ma13g40440) derived from phytozome v7.0 (chr-ID Gm13; pos 40946616 to 40947425)
gccaggtaaataaatttgtgatagtgtgcatctaatcaaatattctgtttagctccaaattagcaggcttgaattccctctgcttcctctttttagcaataattaaacaggtgtcatttgatcatgtactctatgtctgtttattttattcttattatgatactctttagcttaatatatttattatgctagaagaacatcagatggaggggtcgagtctagcagaatggactagtctcatagaacatggtgaatcaagatttgaatccctactggctactaggagaggtgctcacatttaatatctgattgcatctcgaacaagattgtctcaaatacatgtgggaaacaaaacaaaaaaagtgatatattttctatctttggaactagaaaggaaactggctgactaatttgtttcttttatcattaaaatttatcatgtggaagtagaatctagcaaaaagctgtactttgtattttatgtgcaatgtatagcttcttttcctgttcaagtagccaatatgccacaagttactaaatgctgccaaacataaatagaatgccaccataatcaagcataacaaatcaaaactgtttgtatgagttttctccttctattgattaattttatcaagatatgatgcctctttgtctgttatccaaatgatattaaaaaattcccatactgatagtctagactcttcatttaagctcaacccaacttatgctttttctaaagtgtctgcttgagtctcctccattggaaactgatatttcctttgcagataaggcttggccttctctgggagg

SEQ ID NO: 25739 - DNA, 511 bp, Glycine max
  Intron number 1 from transcript Glyma13g42450.1 (locus Gly ma13g42450) derived from phytozome v7.0 (chr-ID Gm13; pos 42449213 to 42449723 reverse strand)
atccattcctgctacctgcttctactttctgttaggtctgctatagtatagtattaaacattttattccaagaattgattatagcattcaaataaacaattaagtgaaaccttgaattgtcatcagttttgaaatgcttaatatgattcctcttctttttttagtatgggaccacatgtatagacaaaataatcttattcaagtccgatgaaaatattatggtcaaaccttgacttgtcatcagttttgaatattggttgaatgttatattaatgctttttggtgaatgatttagtctctgatatttgctattaaatgtcttgaggaaatgaattatatgtttttttttcttctgagaagtgtattctcatcatttaacggttcttctccctgattgcaactttcacgtatatgtacctcgaacaagttgaggcattaaatgtgtcactgctaataaataatgagaatactggaaaatgtaaagcaaaattttcctgatttttgcgtagga

SEQ ID NO: 25740 - DNA, 886 bp, Glycine max
  Intron number 1 from transcript Glyma14g20040.1 (locus Gly ma14g20040) derived from phytozome v7.0 (chr-ID Gm14; pos 22829100 to 22829985)
tcaagcccttctccgacgcagctttccaaaaccaggttagttagtgcatgctctcatctcactctcacacaccaacacttagaaaaactaatattcttcttcttcgctcacgttgttgttgtaacctttgttcttcttccaatattgtagtttatttggttaagcactttgttataactgttgttcaaagcatcaacgtcttaatggttaataacacagcttgtacacaacgcttccttaaataacaaacaaaaagaataaatagtgcgtgcatgagtctagctaaatggttttttttatattaattagttaaagtaaattttttattgtttgatggtgtaaaaaaatttaatagataaaaaatatattctaacaataattattaactattattattcatagttataggataaaatttagatagagtttttttttgttttttttacacaagatattctcaaatcaatcgtcaagactagtttatcctagatgtaaaaaatattaaaatgaatattatcaatctcttttaataaagtcttatatatatatatatatatatatatatatatatatatatatatatatataaaatagaaaaaggcaacatatataattcaattatctatcaaaatctcaaactttattcataattcttcaataaaattgaaatctcatcttaataatctatatattttcacctttgatacaaacttttgttacgttaattctcatgaaactggaattgcaataggagaataacattaaaaatatattagaactggatctaagttgtacctgtaattattttcccttgttttcaaccggcctcctttaaatttgtctaactaattgagaaaatagtctttaattttttaggaaagaaacg

SEQ ID NO: 25741 - DNA, 489 bp, Glycine max
  Intron number 4 from transcript Glyma16g08770.1 (locus Gly ma16g08770) derived from phytozome v7.0 (chr-ID Gm16; pos 8209707 to 8210195 reverse strand)
aattggtagcaaccaagattgctgtctggactacggtatacttattctacattctatttcagatttttttagtggaagcatcttgattagatgtgtattttagtcttcttttgcttttttccatttaaaagaatgtttgtgatttgggataattgattcttaacatagcattagttcctctataaccattgaccaagtgcctaagggaagctgatcatattattcaggatattaaatttaattgttctagtgttacccagtggcactttatgttgccattttcaattttcatatgcctctttttgaggtcaatgaaggagttggggaaagagcttctctatttttgtttcatttattattctcatactatggcttaattcagtattagcatattattaatgttttattaaccatataaataaccaagatttttatgtgttacttttttttgcaggtggttaatccatttaccaaatatcctttatacat

SEQ ID NO: 25742 - DNA, 607 bp, Glycine max
  Intron number 1 from transcript Glyma15g07760.1 (locus Gly ma15g07760) derived from phytozome v7.0 (chr-ID Gm15; pos 5469162 to 5469768 reverse strand)
cgaaagagaacgacgattcaaaacaggttctcatccatctaacttttaattactttgatactttcgtaggctttgctgcgttggttattgttcatactccattggaggtttgttatcgatagcggcttgatcgccggaaaagatagattcgtaggaaattgattctgaatgtttatatttgcgttttgctccaagaatattgctgtgaaattagggttttcgtacttgaatagagctcgccgcatttcagagcttttggttgagagtgagagaatctctaaggcttttctaggtgaaagggaattggagggaaaagataggaaaatgatctgtgtatttggattagttattcctccgttgcaaatttactgtttcgattgaagttcttaaacgtgactaattactgtaattattgcattgagtgtcattgttgagtgtttttgaaaggtatatgggtgattagatcatgtcttgtagcagattattgtttccatttaatcatagattgaaattttccagatgatatttgaaatatattgtcattagtgcccatattttgtcgttaattttcttcaattgcagcttgttgaacaaattgaaattgagt

SEQ ID NO: 25743 - DNA, 921 bp, Glycine max
  Intron number 1 from transcript Glyma13g20940.1 (locus Gly ma13g20940) derived from phytozome v7.0 (chr-ID Gm13; pos 24437115 to 24438035 reverse strand)
cttgcttgctcctcaaattcatcaccggcggacaggtaccacagtaatgcactcataccttaaaattattgttcaatcataaatcatccgttgggaccactggttattgtaaaaatgtgaacaacttaccatatatgaactcatacaattaatgtgattttaagcaaatttcacatgtttgattttggtaaaaagagtttattctaatttcagaattaattgagttgtaagtttttgaaatgttctaaaatattatattaaattttaattataacatttttcattgtaaaaacattaaaaaattatagtattttagaatcaattttggtctagtttatttttttttaaaataagtgttttttttaaataaaataaacagttttatgattttttatgtctaagtttttacttaaaataagtaatttttttacttttttaaataagtaaactatatcttattcttaaaaagccatttatatataagcacttttttaaaaattattttttaaaacttaaacaaaccaattctttaacttttgcaaaatcaattttttttatagaaagtagagtatgtttgggtacaagtatataaacttaagtttgggtcaaatgtaagtttctaaactgaatttcaagaaaattcttttactctcaaacatactttttaaagagtaattaaacatgaccataaactcattttactctcaaaaagtatttttgagacccttatgcggttctactgaaaatccgaacgacccttaatactagaagctacaacaagtaataagactaccattagagaagttacaaagaagataaagaaaaatattgatatgttgcattaatgtgtctatactagttcaaacacacttatactttgattctcaagttctaaggagcaaactccttctattatttagg

SEQ ID NO: 25744 - DNA, 878 bp, Glycine max
  Intron number 1 from transcript Glyma13g39170.1 (locus Gly ma13g39170) derived from phytozome v7.0 (chr-ID Gm13; pos 39868960 to 39869837 reverse strand)
ttgcactgactgcgctgacaactacgatttctctggtttgtatccactctcaactcttaaccatcttataattttattaccctctaagttcgctcacttcactttatagaaatacaaaaagatattcacgatgaaattgaaaagtagtaattcatgtcttcttaattttataaaagagttcaacttttatatatgtaaatgtaacggtcaactagtcaaaaataattttttaagatagtacattataaaagtgaataaacgattgtacatgaagaacagtataaaaactaaaaactctttcagctttaaatgcatgtatagagtatagactatttattacttcttttttcaaaatgacaaacaacttaagagatatactaaggatttatttagaaaatatttttcatatataaatacttttaggaaaagaaagtaattaaaaagtaaaaataaaatattttttttcataaactaatataattaagcttctacaaataaaaaattttacatacaacatttatatatatatatatatatatatatacatatatataaaaggattagaaaatatatcaaagtagtatcgaccaatgagttagatctaaaataaatttaaagaaaattttttattttaaataaaaaagttatatattaagttttttttgtcaaaataactttttttatatgtgtgatttttttatttaaaaaattaatagaatattttttaaatgaatctaaaatttaagttttaatttaattgtttttacctttgggtcatgcctgtatcaaagacacacataaatagttcacgtagaacattctacaactctttgatgttttcaggcattaaggtctcagtgaagtgtgaaggtgtgaaa

SEQ ID NO: 25745 - DNA, 769 bp, Glycine max
  Intron number 1 from transcript Glyma15g17070.2 (locus Gly ma15g17070) derived from phytozome v7.0 (chr-ID Gm15; pos 13361913 to 13362681)
tcttccctccacttttcacgggtctcgtagtgctggtttcttcttgtctccaaccttaattataaattttatttacttcttagttttgttaataatttgattgttggagttgtgaatggtggaccctttgagccaaagtgttcatatttgtcatttgaagttaaaactttccaccaattgaactgaaattgcttacagtttctgaatttgtccgaaaaagcttgtaccaattgcatatttgttcttgtacgcatgttttatgtgaagatatttagctcttgttgatatattttattttatgttatttgcttgttaaattataatgagcttctcctgttgaatagtttgatagaagaataattgacacaggctaatatgttttaaggagaaaagcaatgaatttatagtttaggaggtaattttcaacatgttggatatcttactcttatgaatatattcatatcaaatgttgtactcgagatctgaaattggcttcttgcatgatctgtccatctgatcattctcctgaatttttgttcaatagcttgtttcttttcatatccagaatttcctaagggcaagatttatgtagatgagttttttttattggtgtgtgtggactgaatttactttgctgatgttgaagacattacttgttacttgacaatcacaagtggtatttatgcaatatgccttttcctggtaatcattgaaataatcagtgtttaataaataataattcatattttaggttctcttctttatacgg

SEQ ID NO: 25746 - DNA, 678 bp, Glycine max
  Intron number 1 from transcript Glyma13g27180.1 (locus Gly ma13g27180) derived from phytozome v7.0 (chr-ID Gm13; pos 30356812 to 30357489 reverse strand)
atcggaaggccgaggccggcgttctccgccgcagagtatgctccgtgtagaatttctaatttaataatctttctaatcaccgtgtcgatctcgttactttttcgtgcatttttgtcctcttagttcgtttcttttccagatcaatcgtgatagatttgcattgttcccggtgataacgttcttttttttttttttttttttttaatttttcttccaatgttgtcacctttggctgtgtattgttacattttgacttttggattataagcttgttgactcgcgcgttcttagttcttacaatgctcgtagctaaattctgttcttaactgtgctcatagttttgattatatggctctttttcatatcaatcgtcacaaactatatttaattaagttgagtgctgaattattattattggaacagtgtttagataatgttccatagtgcttttcgtcctaattggagttttatctcggtaatctatgttaacctttaatgccaaccacctttattacatggatcgccaaggtgaaactttaattctgactggagaacaataccaaaaatacataaggatttttgctcttattattattatttgtgatagtgttgtctcctgtggctgtgtggttgttacattttgacttatggacctgtgactgtgttgaaggattggag

SEQ ID NO: 25747 - DNA, 1006 bp, Glycine max
  Intron number 1 from transcript Glyma15g12040.1 (locus Gly ma15g12040) derived from phytozome v7.0 (chr-ID Gm15; pos 8935047 to 8936052)
gaatcacccagctgggcctaaaaccagtgagttgatttcgtcgaatttgttattttctcgcgcttctgattttcattgctgagtggttgatttttttacctgaactttttttctatacataaatcagcggcaggatttggcatagattacgaattttgatttattaatttgataaaaggtcatgttactgcttgatttacaacctaagttttttttttaaaaaaaaaaaaacctaatttgacattggattgcatcttgagaaaagggtttttttgtggttgaaacgaaactgttggttagatatttgggaatgttggaaacttgggcttcgtctattagtttaatttctgaacataaggagacggttgggtagataaaatgaaaatgagatggatgacctacaaaaaattgaatgttaatattttgtaatctgggtaaagtggaagacaccagcaaacaaacttgtgcattcaaatgagatgctgctttgaagggtatgatcatattcaaatatcacattttttttaagtataatgtttgctagattttgtatgaaaaaactggaaatgcagtccttgtttgcagtaaattggaagtatgatcttggtgttgtattctaacttgatttaaagagtgcagtggaacttgaatttgtctttctgtaaagaaaaaataatggtaattagttttggagttgcagttggaaagttaacaattgttgaataaagagtccagtgcagtcatttatatacatagatttgcttgtgtgattgtgttgtactttgtaaacatcacttgctcaaagtaccaataccaagtagattgtattttacaagtgtacggcattagtttcccactgattcaaattgttctctctttttatgtttttagtgaccaatgttattatcaagtgttaacattgtcattgtcgtcctatataaatgcatagattaacccattactttatgcagttcacttctgggcacctacctttaagtggggcatc

SEQ ID NO: 25748 - DNA, 927 bp, Glycine max
  Intron number 1 from transcript Glyma14g04110.1 (locus Gly ma14g04110) derived from phytozome v7.0 (chr-ID Gm14; pos 2741147 to 2742073 reverse strand)
tcttggccctattatagcacgaaagcaagttggaagttattttttgcccactacaaagcaaaaaggagttcagggttgaaaattaaaacttttctaactccatttcacttgctcagccaatttgtcttagattcttagtttatgtctaactcaatctcaaaagctagttcaaggaatgagagttgatcctcacttatatactttatcttgactttatctttagtctatatgagacttgagtttttttccaataatgtgagcaaacattgtctgtgtatgtttggattcacattggatgaactagaatcacgctgaatagtggctaacatgattttaagtgtcaactttttcatacaagcattgtctatgcatgcttgaattaacattggactatctagaattacgttgaaataccagctaacatgattttatataatgatcacttgtttgatttcttgttaagattgggtctagaattaattgagttgaagcaactttacattgcttttaagttgaatcgggaatttatattgagttttactactagtatacttttatattaaaaacatctaaacataaatcacatcacttcaaaatcaattatgtaaaccttcacccaaactcactgaaattaattgcaactaattatgattcttctttcactgttttttatatggcatggcatcatttgtggtaaatgaaatttataaaaggaaactaatttatcttgcaattttaacacaagagtataacttcccattgaatatcattatgtgaagataaatagaagcatgatacgcagatgaaaatatgcctcccatttgatgcacagtacttactctctcacatcttttggtagctccctttaacccaaccaatttgccatgtcaagtttggaggaaccacttggtcttgacaagttaccaa

SEQ ID NO: 25749 - DNA, 1008 bp, Glycine max
  Intron number 2 from transcript Glyma14g03830.1 (locus Gly ma14g03830) derived from phytozome v7.0 (chr-ID Gm14; pos 2499071 to 2500078 reverse strand)
gaacacccaagttttgcccctttcgtctttccaatgtgagttttgtactctttatctgtagattcaaattaatccttgttaaagtgtgtgtgtgttttaaatacttgtatttggcattaataactttgtccccatatagtttcaaaaccaagctcaaacccttgatctttctacattttattttgtattcatttattcttaaatagtggtgaaaatatttcttttaatggatagtagggtaggggaccttgaagttgaatgacatagtgtggaagagaggagcaaaaatgtgaagtacttgccaaacaattaaactgtgaaaattaagagatctaaaatcttcatggtctactagaaaaattacaaatattacagagagattaatcaattgcttaacatcaattaggtttgccttaagattaggttttcaaaagtgtttgcagtaacaacatattgaaaatgtgataaagtcacgataattatggcattgagcttaacatgaattttcagcaacaaattgaaaatgtgaaaacttgattttgcttttagtaaaccattgtaagtgggaagccctgactagtttacagggaaaatttactagtgtatggttggatacaactctcccacctgagaatgatttaatctgcttaagacacccattgtgcgaatattaaaaaatgggaaacttgcctctgaaaaacttgccaaatcttgttaaagcaagcattcttctaatccacatatctagaatgtatatttgaaggtaagcatgcatgctaccttattattgaccaccacaccatatcaaacacttttgtatttggttatgattatgcatgccatttatggaatcagtttcatgtcatttcatggtttgaaagccatttgattatcttattgtttccctaatcttgcttctggtttatttttattattttcatataaagtttgtttttagatgttttccagttgccaaaaaataagatttggtttctcttctttttcagg

SEQ ID NO: 25750 - DNA, 901 bp, Glycine max
  Intron number 1 from transcript Glyma14g03830.1 (locus Gly ma14g03830) derived from phytozome v7.0 (chr-ID Gm14; pos 2500096 to 2500996 reverse strand)
gcagaaccggtcctgtggaaagagacattgagcaggtgtatatctatctatctatctttgttttatccatttctttggaagctttttctctgtattgcttcgaatttcatgctggagtactgtttgcttttagattttgtgtatctgattggtgtgcatgcgctgtacagtggtggtaatgttcttatttgctgttgttgggggcattggaaataggtattggcttaattttgcttggagcttaaaattttggagatgttgatggaagtctagttgcaatgaatttggttcgttagtttgactgccagctagaattgtattatcaccaggtcaagctagtttatgattggcagtgaaaaatcttggtgattgtgagctgttgcttaggaaattttcttttaattaaaatttacttaatgagtttgtttatacgtagttaagtatgtgttgtgacttctgagtgttgttagaaaatttggatgcttttttagtggactaaacattttagatatttgactatgtgaatattagattaattttttcttgaatttatgtttcactaatttgaccatttggagatctttctatttaattatcgttctcttttatggattgtttgggtgtcaaataccatgttttgccacaggaatacaaggcaaatgcattatactgttactattatattgactaattgacagtatgttgttgaatttttagactttagtagctgctcttggtgcttgccagttgaatgttatccatgaactgtgcttatttattgattcctataatatgttataagttttcttttatcttcagatgtgttatatatgctggctgaagtcttttattgatcttattgacaggccattactgctttaaagaaaggggcctgcttgct

SEQ ID NO: 25751 - DNA, 549 bp, Glycine max
  Intron number 1 from transcript Glyma15g42080.1 (locus Gly ma15g42080) derived from phytozome v7.0 (chr-ID Gm15; pos 49481984 to 49482532)
ggcctgtggtcttagagttacctctatcaagattggtatttttccttttcttagtctcctttggtttgaagactcactacccctctttctaattcttgaagagaatgcagttttgtgtttttttattgttgtaatagagtaactatcaatgaatttgattggcttgctgaatggccaagttttctgtttcctctgattacttgaggttccatttgaatggaaatggttttgttgaagaaaaaaggggatttttgttgtgtggtttacaaagggattgatttgatgtttttcttctcttgttttggagaattctttatcctcctgcattgtgttcctttctcctcagtgttttattcttttgtattgataaaaaaaaggagtagattcaattttgtgcttggtgtttctcttccctcctgtaaataaataagaatctgtctccttttctaattatgttatgtaaaataatgaatgctaattatccttctttttttaaaaaaaaaattgttttaacttttttataatttgcagacccctacttgaacactg

SEQ ID NO: 25752 - DNA, 331 bp, Glycine max
  Intron number 2 from transcript Glyma15g42080.1 (locus Gly ma15g42080) derived from phytozome v7.0 (chr-ID Gm15; pos 49482587 to 49482917)
gtggtgaggtaaataaactaattttttttaccacgaggatgctgattattagtttcttttccggaattcaatggaaggctgagattgtatttgttcctcttttgtggtgacatgccataagccatagtgtgaatctcccgtgttgtatccccctgttcttttcattttctcattttactttgaaagtgcagctaaatttgtcttctgtatgtttctaatttcagttacaataaaaagaggatagctactattgtttttctttgaagtttttgattgccatttttattctttcttttttgtttgttgaaggttgaccttgatcttggaaact

SEQ ID NO: 25753 - DNA, 287 bp, Glycine max
  Intron number 1 from transcript Glyma13g20780.1 (locus Gly ma13g20780) derived from phytozome v7.0 (chr-ID Gm13; pos 24260185 to 24260471 reverse strand)
atctctgccgtcgtcgacgacgctttcttgcaaaagtattactgcctcacatttttttctctctttcttttgttactattattaattattcttaataatgtcatgagtattgagtagtatattactattttgagcttagaactatgaagaagagtgctaattaggtttattgcgtgattgatttgtgaatctgaaaaaaatataaatataaatacgaaacgagacggatcagatctaacgtgttatggttatgtatttgtgtgacagatacggtatcaagttgaacg

SEQ ID NO: 25754 - DNA, 950 bp, Glycine max
  Intron number 1 from transcript Glyma15g14280.1 (locus Gly ma15g14280) derived from phytozome v7.0 (chr-ID Gm15; pos 10754170 to 10755119)
aaaatttcaagtccaacgacactcacttcgtgcaggtaacgcatgcttgctttcttactttcgtttttttcttttcaatcgaaggaaatgctctgtttcattagatagatggagccgacaaattcaactagctaatcaccctcactattgttgttaagtggttcttctcagcggcatgaaaaattccaattaatgtactatcaacttgaaaatttgatttaatcctctgaacgaatggccttgcaccccccttttctcctttgctgattgcaggagtatcaaatttataaagtgttttgtgtttcgttctattggctaccattaagttctatttgcttactagctttttcttttgttgggagttggttgtgattcaattatggttcctgttttgttgtgtgtgaattgtaaaatatgcatatttcagtatctggggcagaaatatatgagatgagcatttgatgttttgatttggattgtaacaagagtgtcttgagatattctacaggaatatctggattctagtttagatagcttcccaattcattagctgattttgtgatgtttattggaaggaaaatgatgagtagacacccaaatgctaattgacacttagacagataaagaaagacaagtttaggtatgataggtgataatatgatgtaataggaagaaagatagagaaacgtgggtgtactgggtgttcacatatcattgctgttattgaaattggaagtgttagaagttgatgctttatgtgtttagcattttctgccttcttttgtggtgatctcttctgttcgaatggacttgggtgagaatgcggatgaatatcttaagttgtatttgttatcatgtatgttatatgtcatgtggtacacagctcaaccttagcatgttgggaatttgtttcaggggtggtgctactagtttgttgaaagagcatcttt

SEQ ID NO: 25755 - DNA, 828 bp, Glycine max
  Intron number 2 from transcript Glyma15g14790.1 (locus Gly ma15g14790) derived from phytozome v7.0 (chr-ID Gm15; pos 11250006 to 11250833 reverse strand)
cactgttgtcttctttgttgtgataatattccaaggtaacatttgggataaaagtagatttctcaagtatatggcattttatttataatatttgcattacagcatatagggacttagcattttcattgctacatgtgcctacctattctgtttcataaactatgccattccaaatttgtagatcagtacctaagttatatgtttggtgaaatggtgataaaacttccattttaaaactctgttctgtttcacatacactataaagcttttgtttccttatccatgatatgtcctgttcatggattattctgttctggctaaccagatcaggttttagcttttatctgtaattttaactatgtttgcttgtattttttttaatacattcttatcactttttgctccttctggttcaatctgcttattgtagatctaaatgaataactcactctttccaactagtttctgagagaattatgataaatagatcatcattttgctttctctttccggataaattagctcacttctttctttgatgtgctcacaattgtgggcaaaagggttgcaaataatcaagaaacttatcagtggttcagtttcctttcatttatattttgataataccttaacttttggtgtataaattctgataatattattaatcaatcacctattacttttggtgtaaagtataatatagggtaatgtagtatgcaagatgggatcaaaatactccctatgatcctgcttctttcattttctgacaagtgaccacattttagcttccttgattttttgttttaattagacgttccttttgcaggc

SEQ ID NO: 25756 - DNA, 576 bp, Glycine max
  Intron number 1 from transcript Glyma15g14790.1 (locus Gly ma15g14790) derived from phytozome v7.0 (chr-ID Gm15; pos 11251640 to 11252215 reverse strand)
ttggatctgcccttccttccccttctggcaaaaaggtatgcattccattttttttgctctcttttttacttcttcgtattatattgttgttgtgatggctgtgactagtttaaagttgttgactttcttcggtttcatgggtgcccatttatcatcatatgtggttgcacgttgcagtgtatgtttatatatataatgcggggtgttaatgtatagtttgtttttgggggggttggcttgttatgtgttggccttgctttcttttctggctaagaaccatttgtgtgctttccttactttgattactaccccacttttttttttggcattaagggttttatgtttcttcctttttatcttaagatttgatgattgctttttttgtctgttttgtttaaaagtttgaaataggggcttttggaaagttgtagaatttggttttcttctctcatacccctaaaaaatattaaagggaaaatcatgtaagattgttaaataggttaggttcaactgatagaattttgtctctattggtgtgcagggtcagtctgctcctgggattacatttttttttat

SEQ ID NO: 25757 - DNA, 419 bp, Glycine max
  Intron number 2 from transcript Glyma13g27340.1 (locus Gly ma13g27340) derived from phytozome v7.0 (chr-ID Gm13; pos 30529810 to 30530228 reverse strand)
ccttgaagcctgttctcctaactggctctttgcaggttggtttcctacccttattgtgtgttctcttctggcttatgttatttgattaaatattgttagttggacttacttatgtgtgttactatatatacctccgttttaaaactattgatgtttaagttttatgtacacagattaagaagcatttaataagtgtaaaaataaaaatgtatttagtctaaaatactcttattcaatatacaaaacgtaaatgctgcttgtttttgtcgaagtgctttttaaataggttgcaggtgtagtcctcctgttgaagatcaaatctagttacttagcttccatccaattccttcatttgcagactgctattgtgattttctttggtcattgcaggatagcttttttgctagttttggccttgg

SEQ ID NO: 25758 - DNA, 1019 bp, Glycine max
  Intron number 1 from transcript Glyma13g18140.1 (locus Gly ma13g18140) derived from phytozome v7.0 (chr-ID Gm13; pos 21802287 to 21803305)
agaagaaggtaatttgagatgttttataagtcacaacctttcaatctaatgtttctaattatctctagttccactttgtgatgttcaagttttaaaggattctcgatatttcaacttcctcatttagtgtttttgacattttatttattgttttaagaaacatatatatttgcaatgatttttgaggaggatcttgcccttaaaatacctagcaaagggtagactagaaaactttaatatctgtaaaataagctctctttaacattttctgtcaacatctttagtccatgacatcattaatctttatttataaaagaaagacttaagttacatgataccttttttatgttcttatggaatatagggatcttactggttaatttgcacagcctatttaagagggatatagaaatgggtgattttattctcccttcgttttccagttgactagcatctatggtttatagtgccctcctcaagtttctaatatattttcttttctatagtccttctctttgtggggaacagttagtttcagagccctagaaaggtagaaggggatggcttaaacagtgcaagaaagaaaggaaattcaaagctgtagccccattgttacattagttatcgatgatttgagaaagaatacagagacaggctgtttcgtatgtgaaatgcttaacatttcattctctatctctattagaaatgtggttcattttagctatgagaaatacatatccaaagactttgaaaacattgtgtttatgcgattcaaagttatgtcacttcttatttcttaagaactataagtctataaaaatgtaaactaagttctttggagacatctattgaatttcttatttctgtcaatagacactatgcctaatgagactaagaatgcaactgattttacatctctttagcaacattgctgcatctattctgtttccatgtcacgcatctattctgtttccatgtcactaggttgtttcccgtttgtcaaaattatatcccaagga

SEQ ID NO: 25759 - DNA, 732 bp, Glycine max
  Intron number 1 from transcript Glyma15g43170.1 (locus Gly ma15g43170) derived from phytozome v7.0 (chr-ID Gm15; pos 50700214 to 50700945 reverse strand)
gaaagcgtcagaagaagtataaacaggtcttcattttctccctgaaagtttgtttgtgtcttcgggtttaattgaacagttctagggttttcaagtcctcatttaattggagtatttctcaattgagtgattgttgttttaagggtaaatacgacacgcagatcctttagttcttgggatgatgtttgtgttttctgattggaggcaaagtttgggttcaattttgggtctgtcttgcatttgctcattttgtgtagactgtaattctgaatttttgcatatattgtctttggtttcagtgaatcaatccagattaatttgttgattctgaagtttattttttaatgtattttgttacacttttgcttgaattttaaagaaaaattttaaaacttttgcttgaattttaaagaattttttttttaaagtgaggatcctgctagggttttatgatactttgatttgattgttttatttttggtaattgaaatttttcatgttctaggcagaagtttttatatgaagatgattatccttttacttgaattagggttaatttaggattcttccagggttttatgatacttgattgatttcctttgatttaatttttggggattgagaatttaataattttgggtggaagtctgtatatgatactggatattgtaatatttatgggtgttgctgatgggattgattggctgtggttgaaaggtgttctccaacaac

SEQ ID NO: 25760 - DNA, 357 bp, Glycine max
  Intron number 1 from transcript Glyma14g00560.1 (locus Gly ma14g00560) derived from phytozome v7.0 (chr-ID Gm14; pos 284317 to 284673 reverse strand)
aacttgacgctgattttgtgccggttcctgcccaggttactctaaatattttcttcagaaatgaaaccctgggtttgtttttatctgaataatcgtaatgtgactactaaattaattctgtgctttcttttcattcaagatcttttttttttttttttctttgtgtgggtctgggtgtggcggtgccaataatctgtattttttaaccaattgattagaattagattactaatgttttagtatttagattaactggatagactaaagtaattattaattatcacaccatgccatcataaaaggaatacaaacatgtccagctctgaatttttactttgatggcatggcattgtagac

SEQ ID NO: 25761 - DNA, 682 bp, Glycine max
  Intron number 1 from transcript Glyma14g01390.1 (locus Gly ma14g01390) derived from phytozome v7.0 (chr-ID Gm14; pos 779593 to 780274)
ttcgagtctgtttcgaatcctcttcgtttgttaggttttttatttttatttttctcttttgttcttgcgagattgaatgagttattgtttgaatgttaatagttatagtaataataataatgattgtttggtgaggaattaaaggttgaaggaacaactgaactgagtcagattttgatgtgtggaacctcgtcatgtgaccagctactaagaattgaagagttaatttattcaatagttttggtttgcgctttgcagtatttttatcctgagaatgagaaatttctagatggcaactgctaagtttaaaaccttgtatgttattcaggctggccaatggttttgttttcaaatgtgtgaacttggattcctggagcatcttagcttaattcttctagggcttttcaaatgaaagagcttaattatttcaattttttcatctttgaagtatgaaacattaagctttttttatcacagagtagttaatgttgaaatttaaaatggtatagttgatttactggtgtactatgaaaaactatggtgtcgagggagtccatgaatgtgcttagttaataattttcagatttcagcatcttccattaaagatgagattgtgggaatccaattgtttgttcaattgcttttcattatgcttatctttcggtgcagacaagagctgagt

SEQ ID NO: 25762 - DNA, 797 bp, Glycine max
  Intron number 1 from transcript Glyma15g17080.2 (locus Gly ma15g17080) derived from phytozome v7.0 (chr-ID Gm15; pos 13371341 to 13372137)
tttggtgtcaagtaccagattttgtgacagttggggtgagctgaggattggttttcaccttgtgcaattcttgaatttgcaattctagttttcaattttgaatttgatattattatgagttgaacatttttccaatcttatctgattttgcattcaaaaaatggattctgctaaaagtctttgccttgaccattttgaaccattgttttgtatgagttaggctgaaaagcaatagagtacaaaacttaggcgtggtatcatgattaggtgctttttggtgctgttctccaatgagaattcgagtttcaccttggtaatgcaaaccttaactatctggatcacctgatagtccaattctgattggagaacacattaaaagtactcatggaactgcatctaagttttgtccttgaaggtttttggtgatgttagttatattcttcttatcttctgtagtcggttttaataagctttgctttagtttgttaaggctaggccagagtagccttgtagattatattttgattctagaaattgggtttgtcaaatttttttctttcttcgaagatggcacggttggtgatggaaccactcattgaaatattcaactttgcttgcctttccagattttatatgttagtttggatccttggtttgagtaggcatggatttcgaaagagtttactttcaacttttgtgtgtgttttggtaactagtaactacagaatttcacattttgttaccgtgtttcttttttttaagggtagagtaactgcagaagtattgaactgtgcact

SEQ ID NO: 25763 - DNA, 680 bp, Glycine max
  Intron number 1 from transcript Glyma16g10290.1 (locus Gly ma16g10290) derived from phytozome v7.0 (chr-ID Gm16; pos 10371629 to 10372308 reverse strand)
tgagcaataacaggtacatcgttcaatacgtcacactttcttgcttcttttatttgactgaacaaagcaagtttaagtttaggattaaataactttcttggcttcctaaaattgtttttatttttcctttttaattgtttacttcggtgtctattactcttttattctagtttttgatattatcatttaagtcgttcaataacacctggttctatcatatcaatagtctacgatttcaaaattgtaaattttttgctaaattatatttttagtcgacctttaattcctaattcacaattttagttttctattttagaaaatccacactattagtctactcttcaattttgcatataatttttcccttttacatatcttttgcttaaatatgttttggatggttgaaaaatcatgataaaattttactagacttttggtcttcaaaattttttttattttgtatttagtctctgtcattacattaattatgttaacttgagatgtcattcggtgaaaaacacatattggtgattgtgataaaaaaaatgtagagacaagaaaatttgtaaatttttattttgaagcctatatattttataatacatgactattctaacagtattataattattaccgaacttgaaggaacgaggctcaatttgtgaaggaaattgttgaag

SEQ ID NO: 25764 - DNA, 630 bp, Glycine max
  Intron number 1 from transcript Glyma16g27980.1 (locus Gly ma16g27980) derived from phytozome v7.0 (chr-ID Gm16; pos 31945803 to 31946432)
ctcgaaccagtgagactcgcacgagcgaacaccaggcaagtctttttgaatcttcttcggagaaatataccaaaaggaacaattttgaaatttttctttaagagttactcactactacctattcgtcagagaaacaaattttagaataattagtattttgattttgttgaaccgagtggcagtgcttgcttagttgggttgggggcttgcattgcttgctatctattctgaccctccctccatgaacacatttaaacattgggttggttgtacctgtgacatttgtggtaagcatttgtgttcatcactattatgagggagcttttacaaattttctttagtgtgaggattttaaatgtcgtgttgcggtttcattgctgttgttgatatcgtggacaaatgcggccgatagggtccccattgcggttgtggacagttataaaaccctgatattgcggcccaaatcatggtcgtggactgtttttaaaaccttgagtgtgggagaggttttgtgccaatgtgtcctatgtctgtgtatcatgggtcctgggtttgtgctaatgtgaccccatttcactgctttgttttgtttcagtgctgcaaagaagtgagaagcaacacccactagag

SEQ ID NO: 25765 - DNA, 721 bp, Glycine max
  Intron number 1 from transcript Glyma14g01010.1 (locus Gly ma14g01010) derived from phytozome v7.0 (chr-ID Gm14; pos 529083 to 529803)
cttcgacagaaggtggaatagcattttttttagacctaagcaatgatatcctcccccccctctctctctttcatctggatttggttcggctagtttcagacacaaattaaagaataagctatctctgtaactgttgtgtttgtaattaattggatattcaactagtaattaagacgttaagtactgtatggtaaaagtgatctcaaagtaggagctggatattgatttttgtttgagatttgagctcctttctatctgaaaattaattaatatggctttatgcatgtgtctgtttgtatatagtattgcgttaagactccaatttggaatatgtatgtagatattctatttggtccatcatggctgaaatggtttcacatgtttaaagtgagttttatcttgcggcttctactaataaaagttgggtttttttaagatcagctgttgagcaactaaaagtacaaagagagagtttttataataaatacttttttttttccaatgtaaattttccacattttgttccttagaaaagggttgacattaacaaaactgctaaaagttcaataaaggaaccacgtatgaaaagaaaattttctccacccacaatattcatattcatgatatttctgtcagagggcaccggaatttgtgtttttgctaattcctttttaaacgtgtgtcagctttgaacagccacaagcacgcattgcttgttcaa

SEQ ID NO: 25766 - DNA, 428 bp, Glycine max
  Intron number 3 from transcript Glyma14g11930.1 (locus Gly ma14g11930) derived from phytozome v7.0 (chr-ID Gm14; pos 10512471 to 10512898 reverse strand)
ttaccagtggaacgtaagcccccgttttatttattgcttcaattatatagacaattgaatgaatagttgaaaacaatcttttttatcctcaaatttgttgaaattgttgcattgtgattctgcttttttgcccctcttctttcatttcagcaaaacagttgatgcctctagtatgatttaaaagattgtatcatgatttgatttgatgtggcaaattctggtaacagattgggtttattaactacgaaacatttggagctaaatagttacattacatggattgtggaaataaagcacaatcaagatttttttttatattatttgtcatgttattagattctataaaatttcttgccattcttttgttttttaactgatctacatgtatgcatcaagatgaaattttgagacttcttagttctcaccag

SEQ ID NO: 25767 - DNA, 423 bp, Glycine max
  Intron number 3 from transcript Glyma16g23290.1 (locus Gly ma16g23290) derived from phytozome v7.0 (chr-ID Gm16; pos 27022007 to 27022429 reverse strand)
gcttcagaagcctcaaaattcttgcaggtatgctttggaaagtcatgaatgtgcacttttcttgtgagttttgaatttaactaatttataaatacaaattcaagggataaataaatgttaatcttcaatctttggtcattttactgccaccctttgtacaacaatcaaattcaggtagagcagcatgatagtggtagacaaatggcatctcacatttatgacttttctgctcattacattaatttctttaaagaggggagaatgaatggcatctctcatttttgaattctccactccttgataaaccacataccaaactttggactttggaattttcttttcatacattttattttatttctctttccccaatctttttcagaaaagaaaaaaaacatttaataaatgggatgcaggaacttt

SEQ ID NO: 25768 - DNA, 1060 bp, Glycine max
  Intron number 4 from transcript Glyma13g41780.1 (locus Gly ma13g41780) derived from phytozome v7.0 (chr-ID Gm13; pos 41991308 to 41992367 reverse strand)
atttggtggatataaagaaaaacctgcagcatcctgtgagtactgttttcttataccaattatatacttctatctctatgtggatcaacattttaggtcgaccttttttttatttcttttcgtcagtgtgtatgcaactcaattttgttccctatgagaaaaaattatcgacaagtcataagggtattgtctcacatgttctatgaaaactagacctcagtttattcatcttcatatgatgacatgttgtttaggatgctttttcttgttattttctaaggttgtattaaggcaataagaagaatcttgaggcaagacatgtggatattaaaaatctttagtgcaataatagtgaaatcaaactgaaactttgctgcatttaggaactcctgaggacctccacactttctaatgccaattgttccatttaccttttggaattcgattggttctattcaaaatgtaagtcaagacgctactcatttactgatgagggaatattgactaagaatgtgaagaattgtctcatctagtacattcaaatcttgcagcagtttggttcgggtttcatagagaagagtaaggtaaaaaagaaaaattagaaaagaacaagaaatcacgagagtgatatggctgcttacttaatgtgataataatcacatctatttgtaatcacgagtcaaataccaagttgcacacaagctagagtacaaaatttcaccagggggcattatagaccatctgatgattcccatctcacttttgtaatggaagtctgttaggacccaatgatacgtttgataatgacttggaaaaacaccattccctctgtcatgttgatgacttctatattaggtgttccatgtataattatatattctattcctttataattgccagttatgttatcatgctggtcttattgttgatcatattgttgtcatgccttgtataaacaatattctaatattctttccttaaactttaaactcttagcataattatatatcaatataacaatgcaggtacaagtgaattggaagctgcattgtctagctac

SEQ ID NO: 25769 - DNA, 925 bp, Glycine max
  Intron number 2 from transcript Glyma16g01490.1 (locus Gly ma16g01490) derived from phytozome v7.0 (chr-ID Gm16; pos 1074223 to 1075147 reverse strand)
gagctggtgctcttgttgaaacttttcaagggtcggtaaggtccatttcataaacttcaattcacactttccctatttgctttttcattaatggtacttttaagtaagactctaggggcgaaaaagttaataatacagtaatactatatagtaattggtaattaacatgtcatatgcatgtcaagcatctaggtgcactatgattagcttaattgagtaaccaatggctttattttagtagattgttgaatgcccctattgtttttgtcaaacatcaagtaaaaccgagattcaaacagccactagtagaacatgatcatttttaccttttattttattttattttatttattttttacttttgaagacagagtctgccgacccatgagccatgacatgatcctaaagaagcccacgggccaacttatgacattagcacaaaccttgaccaatcatttcatttcatataagatcagaatcttctttcttgaaaagcaaaaaacttccacatataacgattccctaaaataaactatggtgattttgtgaaaaagttatatttcttttgaagataaatattttatcaagtgtgtgagtgcgtgtgttttaaataatgctccacataaaatacaaagttgccaagggattgtagatttatgtacggatgacttttcttggacttttaaaaacaaaagggaaagaaaattatatataaatctgaacgagagtacagggaatttaaatttgagaaaaatgatattaagttacatttctattatttttctctatttatatgtaacctagtaagacggagacaatttgttaacatcttacatttttttccttgttgttccttgcatgcataacgctttgtaattccaaactttcaggtaatacccttcaaaacacaagcaagaaactacga

SEQ ID NO: 25770 - DNA, 356 bp, Glycine max
  Intron number 1 from transcript Glyma15g17690.1 (locus Gly ma15g17690) derived from phytozome v7.0 (chr-ID Gm15; pos 14094972 to 14095327)
caacttggactaccaccctaactaccctgattctggtatccctcattcttcatctcttttatgctagaaaagaaaatttggttatttatttacataagaataatagcccctttatttatttttcttcgaagttttggccttttaaccatttaattgtgtttgaggcttctgggtgggtaatcttacttacattcataccccatttgatgaagtttctttctttttactatttttgttcttttttcgcatatgggtatttgaatatgtttgattttatgtttttaattacttttatttttggctgtgttttgtggtgtttagatcagattccttactttgaggttggtgattctgtg

SEQ ID NO: 25771 - DNA, 628 bp, Glycine max
  Intron number 2 from transcript Glyma14g10670.1 (locus Gly ma14g10670) derived from phytozome v7.0 (chr-ID Gm14; pos 8875223 to 8875850 reverse strand)
ctgctgagaagcttatcaacgaagttcttgccgaggtattaccctgttgttttttctttgttgtggtatggtttggtaatttggattttgatgagaaaatcaatggttgataattctacacattcatgattttataatttatgtgctcctaaccgtggtcatagtggtggttttgttgtgttccttgatattgtggcaaattgcagacaattgtggatggtgcagccacaattgcggttgcagagactcaaaaaacgttgatgctgctgccagcattgtggctgtggatcgatttctaaaaccttgctaacattaataattggttttctcttcaacgtcttggattatttaggggtattgtattgtgggtgatagtgttaatacagcttattgaatgccttaaattacttgaaaatgttaagggttgaatggcttttgtgattttgacatgataaatagtttgtttccatggaaaatattttttgttgttgttgacttcttattacttgcacatgggcacacattagaaaagccattatgattgaagcggatttttaaaaaagaatttgcttttaacatggtgtttttaataggctgaaactggaggttctggcattattgctcgacg

SEQ ID NO: 25772 - DNA, 646 bp, Glycine max
  Intron number 1 from transcript Glyma13g38280.1 (locus Gly ma13g38280) derived from phytozome v7.0 (chr-ID Gm13; pos 39100178 to 39100823)
tctccaatctcttccctctctctctccacaacctcgtatttctattctctcctctttctctctctatggcttccttgctttaatcgcaattttactcttttttttaatcggccgatcattcgattggatctgatttcatattaaaatcttatctttttgctaattgtcgctttcccaattcgtaattatctgaagtttggatttgggtgctttctttgcccctttatcgttgattgaatggttttgatccgggactgtgtaatcctcaattctaactctgaaagtttattttttggtgataacactcaactgggtcttttttttacacctcgttaatttattgttgggtgtgggtagaaagggttagtttttatgttgtcaaaatgaaaaaacagtttcctaggatgcatggtaataggtttcgttaaaattggtagtttgggtgcttaaacatgaagcaaagtactattgggaaggtaaaaatagtgattagtgactagtaactgctgctacgtatatatttttagtgaaactgtatcgtataaatgatcaaagtatttttttgagcttgtctctttcaatgatcttagaaatgatattcttggtattaggatttacgctctatcggggcagttgctggtcttgc

SEQ ID NO: 25773 - DNA, 497 bp, Glycine max
  Intron number 3 from transcript Glyma15g19980.1 (locus Gly ma15g19980) derived from phytozome v7.0 (chr-ID Gm15; pos 17517916 to 17518412 reverse strand)
ttgccctgcacgtaggtggactttcctcatgtgacatgccagtattgcaataatgataacttttgaagatatttaaaaataattattagaagactagatgtattccatctctaccgtgatttattttccttgaaggagcatgtgctaattgttcaacttttgtcacattttttttttatcttggccagtcatatctgcatggcatatcttattacaaattctgtcgactgtcttctatcaaatcttagagttgaagactttgcaagctgtgtttttgtttcctcatttgcttagcatggtgcatattatttgccacctcatccatatattagttttagaccaacctgggtggatagcttgaagcaatatcagtacaagaatattactttctcaagcatttgatatgatggccctttctgattttcttatgtgaacatattgcataatacttatagtgatattcttttctgtttttgatcaggctgatcctgaaactg

SEQ ID NO: 25774 - DNA, 262 bp, Glycine max
  Intron number 2 from transcript Glyma16g00880.1 (locus Gly ma16g00880) derived from phytozome v7.0 (chr-ID Gm16; pos 534981 to 535242)
gctcggacccagaaaaacaaagccacaggtactcattcactgccatctgttttcattctattaaccatggaattccctcaaaaagtgatttttttcgttgcatgtttattttttctcacttttttttaaataattatttggccttatggtctaattttggtttcgggtttatcttctatgtctttgataatttaatgcatttgaatttgaatatgggtactgtgcagagtatcatctcgggcagctcaaggcaaaaatagca

SEQ ID NO: 25775 - DNA, 583 bp, Glycine max
  Intron number 1 from transcript Glyma13g25130.1 (locus Gly ma13g25130) derived from phytozome v7.0 (chr-ID Gm13; pos 28395150 to 28395732 reverse strand)
ggcaatttgcttattcatcactagttggtatgtgttaatttttaattcctagtcttacaaacagaaattatatgtttgctctaaattattctcttggtaatttcaattcacacaaacaattggtctatttacttttaaaggaaatgtttttctgttttcattttctaatattaacaattataaaagtatcaccttattttcactttatttgtcctcaaagatcttcactatcaccttataagttataacagcattccttttatcatttctagcacaaaaaattgaaacagtaaacaaaaagaaaataaccctacattatcatcattagttaaaaacacgaactctaacgcagacacaggacatgccgacaaagaataatttctttattggacaactaatgttagtattgtaatttgttaatgtaagtatttgacatgtgtcagggaaataattattaacatgtttgaaacataagagaggtgtctgtgcttggtagactcacaaaacaaaacaagacctgatattttcccaggtattgtatgatccagggtaacatttttcattgctgcttcgtgcctgctag

SEQ ID NO: 25776 - DNA, 803 bp, Glycine max
  Intron number 1 from transcript Glyma13g30920.1 (locus Gly ma13g30920) derived from phytozome v7.0 (chr-ID Gm13; pos 33410310 to 33411112)
ggtacttaaagtgacgtcctaaaatttgtttggcacgttaacctttaattcctatttatttcattcatcaagttagtttatattttttttttacaaatataagttttgtcatctatatgtgataaaaaaaaaatatattaaactttctcttggaaagtatctcctgttttaggggctttatatttgctgttaataattaggattttatttgtatattttctgacttattttcctttcttagttttctcaaattagtgaatgtcaatcatgttttattactctgtcccactgaggatttcctcaagtgattcagaaatctttttcccttttcaagtctttcctttcttgttaattattaattaattatgaaattctatataaccaaatgaactcatagaatacaatacaactgacattcaccaataacgttagtattctcttggattaattttatgataagacatttggatttctccaattataccatattataaaaataagattttttaattatatatttatgtatattatgttgcattctgatataagtatccatgcattttagtactctgatggtttaagcacgaaggaaactaaagcagtaaaaaattcttcttagatttatgtcttagcaaagtcaaacaattaaataaattgatgctgaactgtttcgttcatctgatgaatggttgttcttgtgaaagtgttcaattgctgctgttcttgtttccaattcttaagaacacatgttttttttttcgatatcaggtcgttccttgtcaaatagtgtcatcaatcttggc

SEQ ID NO: 25777 - DNA, 838 bp, Glycine max
  Intron number 2 from transcript Glyma14g23560.1 (locus Gly ma14g23560) derived from phytozome v7.0 (chr-ID Gm14; pos 27987332 to 27988169)
ttgggccaaaagaagccctctcctctacttagctggtaggattttcatcatccatccttcaatgcaattttccaaaccttcaatctcaattcacaaaccttgaaactcctttttcttttcctaatttggctctttgcactttatgcagagtgataacagataatttagaaatcaatactttaagattctgattaagcccttgaggattggtcttataactagtaaaaaatgaagtttgtcagaataaattgagagctacaccaggagccaaagtcttatgatgattaaaaaaataattaagattttgataactttatgatctactttattatatatttacatctacttcatcacaattttaattgctgtttctcagttaaccattattctatactctaccttctaaaatgcatcgcttttttttataatgcaccgactaatctagagcagccaatatagtttaattttcatatattattgtcctaaaaatcttttacattatcaatctattagaatctaatagaaattactttaacataatttttaggataattattatcaaaattgacaattttactatacaaatttaattattttacatctaattaaattattgatttatatactgtattattaacatgatgttaaacagtactacatgataatgtaacaaaaaaaaaaacaggatatgataaaataatcaaatgttattggagcatatacaaacaatttttaaaaaatttacttaacgtttgctttaaaacgagttcactatttgaagttcaattcattaatttctgcagcctgtgtggaagcaacagtatcagcagctcagagg

SEQ ID NO: 25778 - DNA, 948 bp, Glycine max
  Intron number 2 from transcript Glyma13g36410.1 (locus Gly ma13g36410) derived from phytozome v7.0 (chr-ID Gm13; pos 37702596 to 37703543)
tagcacttcggcagatccacctgcgacgcaagaaggtttctcgcacaactcgttcactttaatttattttttttaatttgatttgttttgtttcggtgtgtgcgatgatgctttggtgaatgaaaatgttaatcagagatgtaactggaactaatatgagttgttttccactaggaaggtttgatagatgtgaaatcatgaatatttggtgatctttgtgtgtttaggctctgtttggttaaatttctcaataagcatctataggagaactggagaaggtaaaagaaagactctgtttggataaacttctctataagcactcctacaaaagtaattttagaaggaaaaaacgaattacttttctctcataagctaattttagcttatcgagaatcttacttttgtagaagtttatccaaacagaaccttatgcttctttcaaaatttaaaattaggctatgcaccataagctaatttaaaagttaaaattaggctatgcaccataagctaatttatagaagttctttatttaacttttctaaaagctgattttgacttatgcataagctagttttaatttattcggaaactttaataatttaattcattttatctttttatttcttcttgtataagtgtttatggagaagttcatttaaacatggccttagtttcttttctttttgctttctcactagatacgtcaatgttaccatgttatcgagtgtttagattagaatgacatttagggatatttgcacatgtggagtcgactatttggcttattgtttttgctatatggaattatggttggacttgttggtgaatggaaatatgatatgtacactgctgtgttggaagcatgcgtacagatcgtatcttgaaacttagttgcctttttgaagtgataagccgtatgcatctaaacaggatctggtggtgagagtg

SEQ ID NO: 25779 - DNA, 681 bp, Glycine max
  Intron number 1 from transcript Glyma13g37410.1 (locus Gly ma13g37410) derived from phytozome v7.0 (chr-ID Gm13; pos 38499903 to 38500583 reverse strand)
gcgacggtcagatttagtttcatttcaaatgtttttcttttatactattttacatgtcagcaaggtaagccatggtggtggtgaaaaatgatctatttaatgggaaacccatattctacttcttctatcttgattagtctcttgatccaatatgttgagaaacacttgtgatatttgaaccaggaaaaaaaaaaaagtgtgcatgcaacattttctttttctcatttacaatatttttagatttcatgtttttttattgccagaaaggtgagcatgttttgggtttgttttggaatttttttcccatgacaaggaacttgttccatagttgatctatttaattcttctttaatattttttttattgagcttttctcttttgtggattagattgtgttgaaaattgaaagagtgatgtagatgtttaattgttctttgaattgcaaaaaaaattgtataggtttagtaatcttgtgttgtaataaatgttccctttatgtaactcattatagtattatgcctttgaagtattaaatggatcttgatttttgtggtggtgagaaaagtattattttcttgttcgtgtgtgagtataggcgtgtttctttgttggttatacatataatattacatttgcttttctgatattataattttcatgacttccgttgatgcagtctaa

SEQ ID NO: 25780 - DNA, 603 bp, Glycine max
  Intron number 2 from transcript Glyma15g05810.1 (locus Gly ma15g05810) derived from phytozome v7.0 (chr-ID Gm15; pos 4124847 to 4125449 reverse strand)
gggtctcaacactcaagacctcgtcacccttgtcggtaataactttatacaatcacatgcacatataagtttgtttacacacttcaaatcaatgaattgatcatcattactacaatttcaatttagtagatataagattcaccaagagttcatcacttcgaatttcttaattaataaaactaacaaattgatacttgatcataaaaaaaattcgattttgctttgtgacaagtgaggttctaactacgtagtggcaaaatgctaatagaatcactatatgtaaactgtattgttgactttttcacgtcacttttcttatattgtcattaggaaacgtcttttttgggtcttatttttttcccattttcaagtgattaattggatatttttatagggtgttttaaaaaattaaaagacgtttttcaacgggtatacaaaaaactgaaaaattctaagcactcaaatttactcgaactttatcttctatgtacgaaaagaaaaaatcatgtgaaactaaggtacgagtagttaacgatagagttgaaataactaatttattttggtgaatacatgtgtaggtgggcatagcattggtactacagc

SEQ ID NO: 25781 - DNA, 442 bp, Glycine max
  Intron number 3 from transcript Glyma16g12080.2 (locus Gly ma16g12080) derived from phytozome v7.0 (chr-ID Gm16; pos 12666758 to 12667199)
actgtaattcttattgttctgtcttacatttttaggtatctttttcattcacttccgttttgtcttgtcattcaagcttttttgtcctcaagttcgaccgttgattttgtttatttcatttgtctgaatttacttcaattcaagctccttatcaaaaagatgtagttttgtcatttgtttcatccgtttcatttgactaatgaattttataacttactgggccttaatggaaaaaagggtaaaatactactacttcaaaattataagcagccttttgatcgaatcacacacagggagacagggagagagaattgtggaactaattcccacactagttctatttttattttaatttagttctctttggaaatttgattttgtttctcttctatgtttaacacattcaggtttgctcgtgttggatcagttgttttagcacttc

SEQ ID NO: 25782 - DNA, 1056 bp, Glycine max
  Intron number 1 from transcript Glyma15g40710.1 (locus Gly ma15g40710) derived from phytozome v7.0 (chr-ID Gm15; pos 47703288 to 47704343)
cgcagccgcagccctcccccgcagaggcgccgaaggtactgctgatttcctcgatcagagcgcaatttgattttatctgttttttcaatttgaaagcgtgcgttgttctcttggctgctgagtgctgattttttttagtttttggatttcgtgctgctgaatgttttcgcttgtggtattgacttttgagcgcggcgtgattgagagcctgaaggttcagctaatttctgtgatcggagcggggaaagtactccgcgttccgcaatttgattgtctttttttttttttttcaatttgaaagcgggtgttgttctcttggctgctgattgatgttgaaattgtgaactcttttgtttttaagttcttggatttcacgctgaaagttttttagattcgtgtctgttcttcaaatttaaaagcatgcgatgttctcttagctggggattgatgttgaagtagagatctatgtttttttctttttaattcttagatgctatgcttgaagtttttgcgtgcggtgtggttgggagatatgtagaaattgaatcttatcgagcctgcaagattgattgttcattttgtgttgtttctgaagatgattaatggtcaaagttttaaattgtgccgcagttgtggttttgccacgataaatggacatatgcagctgcaattgcagttgtcatacggtcatggtgactctgaaatctttgaccttgctgccaaaattgtggtctgtgactctaaaatctttgacgttgtcctgaaattatggttgcgaacatttcaaaaccttgttaatggtctctttgattttctttctgctgtttgtatttttgagttgtacgccatgagataattagattggtaaagtgggttggaaacttggactgtggtagatgtggaagtactttgtttttatcttttgtctattattttctttgtttttttggtcaatttggtttttgaagaccacgttgataatttgatatgatactactatttcattttttttgttctgtagtcctgctgacgcaactaggcgaggtcggtctcctc

SEQ ID NO: 25783 - DNA, 996 bp, Glycine max
  Intron number 1 from transcript Glyma15g41470.1 (locus Gly ma15g41470) derived from phytozome v7.0 (chr-ID Gm15; pos 48569924 to 48570919)
ctgtatcaagctcaaaaacaatcatcatcagtcaggtatttagttgattctgattcatcctttttcatgattcagctgtgatttttgtgattgatgatgacttttgctgttaattgaatcaaacttgatttgtgtgcatatgatcctccatgctgtgttttgatggggaaaggttgaagttaagatccaagtttgataatttgaggattgtataatcatgggagagttgagcagcagtgatctaatatagggtctggttttttagttgaccttgattgtttattcactttttcctccatttgatctttgcacgtggtttgatttgctccaagaatgatgggtaatatattttcagctattttcttatggttggtgttgggttttgcttcactgcatcctgctatggttctatgacttgacaatattttgggtgatgcatgttggataaggaattttcagagcaagaagttctagcttataaatctttttcttcttattattatgtagttagtgtaagtaattagaagtagttaaggaatgtactagggattgaaaggaataagtactagataaagaacttattttatccgaggaccagagtctactatctgattactaacaaatgaagaccatgaagaaacaatcttagatctatagtatcctcaaccttaagattgttagaaagctgagttttgtgagattttgtgttcttcaaacaataataagaggccaaagtaatattttatttttcatgtatggcaggtaactaaaattgctagtggtatatgagatattgaatatcattacaattccaatatgttggtgatatattttccaattgatttttttgggtataattcttttgatcttttatcttgtattccttcctattatgtagttgtttctatatcttgctacatcttataagctaagctgtttctaaatttcatcatgcacgcagggtgacatattccgaaggtagtttgatctttgaag

SEQ ID NO: 25784 - DNA, 897 bp, Glycine max
  Intron number 1 from transcript Glyma13g02190.2 (locus Gly ma13g02190) derived from phytozome v7.0 (chr-ID Gm13; pos 2031558 to 2032454 reverse strand)
cgctttattggtgagtgagtgagtgagtttggtctctgggaatgttatcagaaaaataaagtttgagtctttttgttcttccatgctttgttgttattgtcgtatgatcctataaaggggtataatgttataccaactaagaattaagttaacaagctttggtttattgttttggttaaactattcgtttgttacttgaagttgtcctcattttaagttttagtccttgcatagaaactgtaagttttaagtcttgctaatgttaagttttggtctttgttgttgagtgttaacactagagaacattttttagcggcagaaaactgtttagagactgaaatttacggttttttctcactaaaactgaaaatggagaaaattatagggaccaaaatgaatcgattaacctattttttaaggactctttatagagaaaattatactgacactcctaagtttcttttcaaaggactctttttttagagccaattatactcacaccccagtgttttttgagattggacacaatactgtctttcttgggtaatgagtgtaatgagtttcttgggtttcagggttgtaggtgtcatatatttcacacaattaagggagttaatgtatgggtttaaaaggtgggtatcatgtgcaatctccaaaaacaccagatttaatttttttttttttgaaaaggaaactttggttgaaattcactggcttttactaggactatgagttgttatttaggtgcatgctcaagaggcaaatgtgaaatgcttgtgtttttattggttaaatgagtagaaataggggatagaagggagttggagtggatgctgaagaagggtggcaatggtgtgtaagaacttgttgattgttgaatttcaggttgcattacac

SEQ ID NO: 25785 - DNA, 1009 bp, Glycine max
  Intron number 1 from transcript Glyma13g19160.1 (locus Gly ma13g19160) derived from phytozome v7.0 (chr-ID Gm13; pos 22733097 to 22734105)
gctgctaataaaccatcctcttcttctgaaattaggtaccctctctctctctctctctctctctctctctctctctctcatggaacaagcaaccaattgggaacaatttcttaatttttgtaaaaaaaaaaatagtttcattttttcaatagttaactgttctttgattgacactttggagtgttttccggaagataaattgtgtttatataagttttttttttttatcaacaaagaagataggaagaaaaaagagagaagtgtgtgatgaggttgttggtatgttagaaagaaagaacagaagtaaaataatgttgcagaaagtattatagaaatgtgttgtagaaataatgtaaccctcttccgaatggtgtttgttatattaaagtatattctatttctaatttaattgtaatcaggatgtagagttgagatgcatgacatgatcatacatacgtacatatgcatagtacaggtagcattagcataagaggaaaatgtagctatcaattgatcattactcattagaattgatgccgagagtggcattgaatggccacaaacaaacatgtaattttagttttaagttcataatttcacatgttgatcatatatttggaattcctggtaccccttttcagttttcatgacagtgtgacacgaagcctgaaaaagaaaagaataggatcaaatgagtatggtttgcattggaattaggttttatatggagtgtttatgaggaacattccacgatgaaaggtaaaataatcattataatctgaagcatcatttagaagatctttttgtcagcaatgttgcatggttaatttgtttgggcaaacctctcaaatgaatgcagagttcactcaactttcttcttttcttatggtttctcctctttatgcaatgcttgtttcatcaggttctattagccagtgatgcttcatcaatcattaatcatatttgttcttcagctctacagccaagataaggagcgaggttctctctc

SEQ ID NO: 25786 - DNA, 1016 bp, Glycine max
  Intron number 1 from transcript Glyma13g18230.1 (locus Gly ma13g18230) derived from phytozome v7.0 (chr-ID Gm13; pos 21910564 to 21911579)
ttcgcttctgtcttcatactctctgcttaccaacagtcagtaccttctttttttcgcctttcattttctatatccttttttcgttgattttatcatgcaatgttatttatgtaattttaattcaaacaaacgaattaattaaactttctggatcctccgtaactttgcttccatagatttggctatttacttgctgcggtagttggatacgttacgtttaaggtttgaaagttgaaaccgtttgtacaagtgaaacgaccgcgtagatctgcgtttatcttttcatgttcggtccactaagatttcgacgttatcatgtgtactagctgtgctcagatttggttgaagtgcgaggagatcaaatttgtttttggttttttaaatatttctaaatttgaaattaactgtaagttcttgtcttaggctgcggatttgcgtgtctgatttcatttccttgtcaagggatattattttaaagctggaacatggtatatttatgttagtatgttttaatatttaccatattttgttgtgtaatgtgttttttttatcggccaatgttagatgttagtattattagtttttgttaacggggatttgaacccatgacctctcctggtctccctcctttgccactataccaaccttatattttctgccgtgtaatgtgtaattatgctttggcttgacagttttttcatacttactgaattgggttgctttgaattcttgtgtgacttcacattcaattgtgcttgatttagaaattattcattgtgggtttggagcagttgatgggttggttgctttgcttgtgcttactttccatgttaacttagagactaaggttaataatcaagttcttccaatttaatgttttaagtttggaagctctcttttgctaattattcttgactggtcctctttacttttttatggtccatccctgcttttttttttaatgctgatgtgaagtctcttgtttacactgtcttctgttcattactatagattta

SEQ ID NO: 25787 - DNA, 615 bp, Glycine max
  Intron number 2 from transcript Glyma17g04320.1 (locus Gly ma17g04320) derived from phytozome v7.0 (chr-ID Gm17; pos 2894221 to 2894835)
tgatcagaacaacgacaactacctagttgtgcagggtatctacttttttgtttttttaccgtttctttgaatacattttcttaccaattactttcccacggtaaattattgagtaaatttagcttcaatttggataaaaaaatttcgtaaaagaagaaattaaataagaaggtaaaacaaagtttttcctataaaacaaaattaacctagtttttataaaagttatctcaactaacttttaaataagttaattttaatttataagaaaagatcaatttattttcccttcttattttcatctcctataaatataaaaaaaaatataatggattagatgattaaaagaaaaggaaagatgagaaatatcataagttgaatcacatctactaacaaaaattaacattttaataacattaatatttgccgataaaaaaatatttaggatgaagtttatccaaacaaaacacaaattgtttactttctctgagtttgaaaaaatgctattttgtgctgcaaagatagttcggttttttacctgcaaagcaagggtgtctaaccctttttggtacactgcatttgatagatactgtgagaaaggaaaggagatttcacaaa

SEQ ID NO: 25788 - DNA, 836 bp, Glycine max
  Intron number 1 from transcript Glyma16g08240.1 (locus Gly ma16g08240) derived from phytozome v7.0 (chr-ID Gm16; pos 7487910 to 7488745)
ttttaattcaaaccacaccactccttcctttccaggtcctccaagtgaccttcttcattctctccatatgctttttccttgttttcattttttctcttttgatcatttcttgttgtggggttggaagaaggaggctatgcttttatttttattttaggctgtagaatacataaaaaaatgttattgaatatagctctatagtaaactgcattttgttaatagaggcagtgttcaaatgggaggcagtgttcgaatgggaccgatgttttgtgatgttgttcatatttttatcttaatttgtatctaccaataaggccattggggtgcctcatttaacttacattaatattagaagtttcattttctgggctagtttatcgaattggcttaactttctagcactaattaaaccgataaaacttaaaagggttcagaattctatcattgtggaatggtttgaaatatttcatctaccttcttcaacaataaaacaaatctttttttttttaattatcgctttacctttcttgttcataattttcattctatgatctctgtctcctctctctttctctcccttttttgggtatattttgtcttttttgtttctgcacaactgtcaataaagttttgaaacggatattcgttcctctctattaaaggttctcctcaatagttaatgaagctctggtttttctttttggccagccaaaataatttggttctatgtgaattagttacatatcatattgatttttattttttataaggaatcctgtgtaccttgttttctatgcacaggtttatcatttgcttttggttggattttgctgaat

SEQ ID NO: 25789 - DNA, 891 bp, Glycine max
  Intron number 3 from transcript Glyma14g36160.1 (locus Gly ma14g36160) derived from phytozome v7.0 (chr-ID Gm14; pos 45371378 to 45372268)
gaaggggaactttcagtgctatttaactggtaattttttgttcagatgagaattaattgataatttggcaaactcctttttgcatccgcagtgtaattagtatagtttaatcattaagctcatttaactgttcatgcatattgtgataattttaatttccactataactacaaaatttggttcctttaatcatcagtcatggttagcttctggattgctggagcttgattgtagtcttgtttagtgaaatgatgtttttctttgcatgtgtgcaaacaactttgttgatttttaataaacttttctttaataggcattggacaaatataaaatatctcttcctatatagtcatttcatatcatgtccttttttgtgagcatttagcacacatccatcttaccatacttatgttattcccatgtttttctcttgttgtgtctataaaattcaacattcacgttcataaaattcaactggtctatatatatataaattagtttacgagtttactagattgaaaatgttgaattttttaagttcaaggattatgatccaatgtcacattcagtaaagatttatgatacatgtataggatgtactcaatgtgtccgagcctgcccaagtgaagagttaatttcttcccttgattcctcaattaaaagcatatcatctgcaaaaagcatgcatttagggataattttttgcatgtcactggcagggttaggaaagaaaaagaaaatatagactactaaacatgacagttcatccccctgcattcgttgtctactgcatgaaaccaatcataacatatgcttatgtttgaatatcctgatcttttgattttctgctaccattttctcatttttaattggttgttgtcacagcctccc

SEQ ID NO: 25790 - DNA, 792 bp, Glycine max
  Intron number 1 from transcript Glyma13g27120.1 (locus Gly ma13g27120) derived from phytozome v7.0 (chr-ID Gm13; pos 30294020 to 30294811)
agcttcctcactccaagagctcaagctctagctctgtacgtatcctcaatttttttttttactaattgataatatacaagatttttatgtttaatcgtatgattatatatagttaattctagactaaatggtcaatttagtttttaaatttgtatcctattttatattagttcttaaaataaaaaaaagcaaactcaaaagtctaagaattttgttaagtttcgtttaagttgcagcaattcacttttttttttcttttaagtaataataatatcataattttagagactaaaataaaataaaaattcaaagacttaaatgaaattctaacgaaatttagacacttatttaaatttcttgttattaggagctaaaataataatgcaagatacaaatttaaatttgtcattatattatatacatatataatccggattcagagtgatgtttcttcattttcttatatcaactagaataactatatacatatgcggtatacaatttcaccaacaataatgttaaaaacatgcattaaaaaaacttacaataatctattaactattattaattcttccaattaattatgtctcagatgttaagaattctgaaagtatgctaagtttgtatgagattttatcattaaagaatgcacatgattgcttactatgttcttgtctaacataaacgccacaattacactatatatacacacaaatacaattaaacagttgcataaatgatgatatatcttactcgattttgcttcaattgatgtgcaaatacagtctgagg

SEQ ID NO: 25791 - DNA, 759 bp, Glycine max
  Intron number 2 from transcript Glyma15g13940.1 (locus Gly ma15g13940) derived from phytozome v7.0 (chr-ID Gm15; pos 10518254 to 10519012 reverse strand)
aggttcagattcttcttttgtctcgtttctgcattttattttatcttccaattcaactcgctgatcaatgcaaatttcagtcgtttatttgaattcacatttattgaagtttgattttcagttgattttaaaaatttaggtacgaacaattttattttatttaatttttttaaaaaaatccatttttgtaatgttatgaataaatcatgcaatttgagcctagtcgttagtgttggaaatgcccggggaagtgacacttgatgaatgtgttagaactttcaatagatggaaaaggtagagtctatttgaataaatgaattaagcttcttgtaaaagttaaaattagcttttgtataagctaatttataaaaactctctcacgtagcttctccaaaaactgattttaacttatggaggaagcgtaattcattttactttattttattgttctataagtttttattgagaagttgattcaaatatggccctaataaagtaggttagtggactgcttcctttagttcagataaagtagaccttgttaaattacaataagtttattttagaattttctctttacttttgttcattttgggagagattcatattggaattaactaattaaggttaaatactctcttcattttcatcttttccatgttccccttagtttcactaatgagattactgcattctgttgtaatggttaaatcaatataatgatctcactgggtttatttcactttgcagcaaccttca

SEQ ID NO: 25792 - DNA, 602 bp, Glycine max
  Intron number 2 from transcript Glyma14g04450.1 (locus Gly ma14g04450) derived from phytozome v7.0 (chr-ID Gm14; pos 3027864 to 3028465 reverse strand)
actggtaagcttgtagaatgttttgtttggagtgtgttttgcttgtttctatttagataaatatttttcattatgtttttctgtgtttggcttgtattgttctcaaacctctaaatctttcagcaacaaagctcttacattttttgatattgtataaatacttgtgttaacatggctctacatctaaggtagaattatagtaactcaagtgagccttcttcctagcaatttggataaactttatgcatgcaccctcctgattttgcttataaaatttcactgctagttatcatttctccattttgtaaattttatccggtagaatgcatttctaatcctgactctttaattgcacaacttctgtgttatgcaattttctccttgttgacataattagaatcttacatttgattatctattgttttgttgtatttactatgttgtggtgctcaccaagtaggctatatattctttagtcgcaaactgtgttactgtctgttcttggataacatttgaattgtttagcgcctgatgatgatgaatgttgaaccttccgtgtgtgcgcaggcttaaatattgaagtggacagaatattggagatt

SEQ ID NO: 25793 - DNA, 1016 bp, Glycine max
  Intron number 1 from transcript Glyma13g27500.1 (locus Gly ma13g27500) derived from phytozome v7.0 (chr-ID Gm13; pos 30685237 to 30686252 reverse strand)
cagtttttttttttggtaggttcaagttgctctaggttgttagggttctaagcattgcaacttcccttgttgccaattttaattactatttatttatcgcactgaaaattgttattgatcaatcacaattcgggtgttgcttggatttgagaaatttctcttggctttctgatttagtttttttggcaatgcaaaatcacattgtttttttatgagattccggtcttctaaaattggggttttggctgcgttgatgtcttgttggatatttagagttctagcttgtgggaattattaggcttttaagtgtttgtgattagaggaagggtgatcaaagattatttcctcaacttgtcgttgttaagtgccattacttacttcctgtttgtgagtgggattatttattagggatttttatatcgtgcttaatccctcatttggagaaaggataaccgtgtatttttccctctaaaggaatgaagggagggtaccgaagaattaagcaagtgcattgactatataaagtaaatcaacaaaatctgtgtccacaattatgcaatgttggataagtggttttgtttattgttgttggtatattttgtcaataacaagttttctcatttctcatagactgtgataaactcataaaagatcaattgtgacatttaaactattgtgattgtattattcttttgtcatgtcttcctagtttagtttaatttttacctgcttgattggaggatgctaataagaacgaagatcaactagtgttttttaggaaattataaaatttccggaatgtcaaaaattatcttttttttgtcaattattattttaatcctgtgatttcgtttgagttttcaataaattcggaatttgatttgaaatcaattttgttgcattcatcttaggtgtgacgagtcggaagatgtatgcacatgcactggacactctctgttgtatttactactgcttttgctttcttcagggtctctagtcattccaacttccatctc

SEQ ID NO: 25794 - DNA, 928 bp, Glycine max
  Intron number 2 from transcript Glyma14g21470.1 (locus Gly ma14g21470) derived from phytozome v7.0 (chr-ID Gm14; pos 25006919 to 25007846 reverse strand)
gtgatcaagaacttaaagtttgttcgtttcattatatttattagtctttcatataatggaagctttacctgtcagtggttattccatgcctgtaattctgatgtacttgactatttgtacaattgtttggttgaacgtttgcaaaagtgatttgaatgaaattgattttgcaaaattgattctagttaaatttaatgctgaagtaaagtgatttatgttgagtgtttttgttttaaaactcggtttcaaatttttatccaatgtaaaagctacctaaatttgtttaaacccagaattcattatgggctcaaaataaattctttagcacgagaccaacatgtgaacatttactcaaaatcgtgatatttggtatttcaacttgattttggatatcttaatgtgaaactaaagatccactatgtgaacaattcattctagtttgacggaaggtatacacgatagaagtggtgcttttactgtgaatctgtaatttctcaattagaaagaaagttttcctaataaatggtgattaagtttatgcaatacacatctcaacagtcttctctgcattgttttaatcaaattaactgctaaggaaacaaaatgctatttgatgcttagaaagttagaataggaatcactgaacaaaacccaggaataagtttataacttctgttattttttttcttttctaaaagtaatctgaagcagtcaatatacaaaaactttctgtaatcatgcttgtaattattcaataattagtttaattgaactgctctcctgtttccaaaattttgctggcaatgtaaatagatagtatgcattcattttaattgtgaggaacatcttccattatatgtatagaaatttctgatttctatatttaactgttttgtgtcaggttctggttgtacaacaagacccaaat

SEQ ID NO: 25795 - DNA, 994 bp, Glycine max
  Intron number 2 from transcript Glyma16g01850.1 (locus Gly ma16g01850) derived from phytozome v7.0 (chr-ID Gm16; pos 1383365 to 1384358)
tctcacaacaggtaatttttctcattgctctcttttcatgaacactcgcataatagtatacacctaaagaaagaaagagattgaagagaaagaagtgtaggtatgaccgtatgcatgtaatataaaatgacaagaagataaagaaagaaaaaactgaatgagagtgttcacataaaactcctctgaacctcttgggatgccttgaattttatttagtgtgtttggtttcacctttgggaaaacgaatccaagttcataattgtttttggatatatttttatatgtttggtttcatgtttgagaagaattcataattaattctgagtcgaagaaacaactttgagtaattttttgtgttggatccaaaattttataataaaaacatccaaacataaattaattacataacttcaaaatcaattttaatcaaaattagttttacaaaattaatttcattcaaaaccataacatgtttggaaccaagtcacgtccactttgatccacgtcccatagaagcaaatatttgtagcttctgcatcaattatgaatttggacgtggtttttgggctctacatacctaaacaacgctgtaccaaacacatgctcaattttgccaacgctcatccaaacacatacttaatgggctgatccaaatcatgacctgacttgacattttggagccctcggtatggacatatccagttttggggcgattttttgggttgcatattaagggaaaatgaaagagtttgttcattgtataagcattgttgtcaaaacaattatataaatctcttaactgcctgtggatgtagggtacatcagccaaaccatgttaattctctgtgtctttccttgtactgtttcattgtttaatgatgtttatattataacagaacacctcgaacctgcttgttgaattacctgtttggtttgattgctgttccattgacttgagtgtttttcttatggtgtgtgtttcttgtctttgcag

SEQ ID NO: 25796 - DNA, 957 bp, Glycine max
  Intron number 1 from transcript Glyma13g19880.1 (locus Gly ma13g19880) derived from phytozome v7.0 (chr-ID Gm13; pos 23371738 to 23372694 reverse strand)
acgaactcacctcctctggccccctttcttcccaggttttgttgttcttcttcttcctcctcttttttcgttcactttgaattagctaggttaatttttttaacgcaaatttggtcaaggttattgaaatttctgtgtacggtgcagtgctaaaagaaaatggcagtataattattatttttaaaaaaattattaaatagttgtaacttgtaatctagtcacaaatccttgtgtatattaaggaagtttaacttagttggtggaacacaatacatattttagttgttatagactcccttatacgtgtatttgattcctagttttcaaaaaaaaaaaaaaaagaatcgttatgtatggcttttacaataacaatttaaaagtcaactatcattaaagtcgtattaaagatgatttctaattgattagcggtagtaaaatttttatattgagagtttatagaaattaaattgtgtatggataccttattagaacttgtcatttgttggtttggttaacttctgttaaaatatctgtgcagcaagaattttaagttgagttttgttggttttcagttccttgaacattttgatcataagtattcttgtattctatttagtaattatagagcataatcctgtaactgtaatttatttattgggttataaggaaaacctacctgtctgccaagctagtaagtctttaacttctgaagattgaattttgtgtaatttttcattgaaccgacttcttaaagatcagttgactgaaaatttattcaagctttgattaatacatagttatggtatttcaaggtgatatattgtggcctaattgctgtctccttgttgggatagaatgtttatgttatgtccatcagaccatttcttccactttttgatttgtaatttttggtttattacagctatcagaaattgtaaaacaaggtcaattggtgtc

SEQ ID NO: 25797 - DNA, 456 bp, Glycine max
  Intron number 2 from transcript Glyma14g03790.1 (locus Gly ma14g03790) derived from phytozome v7.0 (chr-ID Gm14; pos 2472416 to 2472871)
atcacaagtaagctctaagtgctgttttaattttgtttctatgcttttagtattgtcatttttgtgttttttgggggtagaatctagattttcttgtaccttaatggttttattttgtcttcataattggttttgattttatccaatcttgtatggaattaattggattttatttttaatagaatttttgaatctcataagttaggatgaattaatttcgttctgcattgtatagtggatcctggatttgatgtttcagaagctttattatttgctagatttctttattatacactcacatatggtagatcagttgtagtgaagttgaaggttgattaaaatatgcaaattttagtttatcggtgattttttatttatctgatttcttgcagaatctgtttctgtatggtttattgtacagtgattgcaggagaggttgcaaactttgttgcatat

SEQ ID NO: 25798 - DNA, 706 bp, Glycine max
  Intron number 1 from transcript Glyma13g34240.1 (locus Gly ma13g34240) derived from phytozome v7.0 (chr-ID Gm13; pos 35869995 to 35870700 reverse strand)
aacgctaaaagacgaagtgggagctacaagagaaagtaagaattatataactcctgctttgctagaaaattatgtgtgatggttattgttgattttcttatttggatcgtttatttcttctttaaaattccactgtccttttatgttacggttgataaagatatgcaattttcctaatcaaagagggaccattattttcatcaatcgagcagaagtaatgtgtttttctttctttagcagctggtctcaataattataaatcttttttgctagtctttcttaagtcatttaatttttaggttttattaaattttgtcgctttaatttcataaaattatttttgcctcaatgctttcaaagagaaaattaaattccaaagcttttaatttgctttcaaacactttaatttgtaaatattaatagtatatatatcgtgtgttgaaaatatctcattgacccttagtagtgcaaatatgatattttgccccaaataattaacctagacaaatacccttagtttggttgcagttttaagggattgaatgattatgatagtacaatcaattgattaattgttatacattgcagttgtttgcataaatatttgtagttatgtagtagattgcaggattaattgagcatatagttaaataagatcgtttaaaattttattattttttctctttatgagatcaagtgcaccaac

SEQ ID NO: 25799 - DNA, 943 bp, Glycine max
  Intron number 1 from transcript Glyma15g10520.2 (locus Gly ma15g10520) derived from phytozome v7.0 (chr-ID Gm15; pos 7637326 to 7638268)
tccctcgcctctcttcccaatctagttatggtttataaaatctcctttctcgctctcttcatttcacttgcttctgttccatctgcttcttttgtaaacctgttttcttaatccttttaaaaggaaacccatttgattaattgattaatattgtgttgttgagttggttaagcaagggagatattttcccctgctatttccatctcttcatcttcactcacgttatatcgattgcatttccatgccttcattgtttttagagatatataatattaagctattctccttgagaattcatagacgattttactagtcgattggactttcaattaaaggggtggtctgactctaatttcccttcaacaccctaccttttatctatttttatgttaagtttttaagatttttagcagctaaatgctcttggtcttggggtttggctataatttattttacttaattgccctagattttacagaaccaactctattctaaaatttggtgtatatgttgaagaaaaatgctagaaacacactcacgaacacactattttgcacagactctctttgataggttacaatttattaaaaatggcaatttttttgtggatttcacatcacatttaatgattctctctatgatttggtggtttttgataaattttaaccaattaaaaagagtgtgttgctagcactcctcatatgttgaattgaagctgagtttttatgtttttttttttaattattcgttttaaaaatctttttggccattcttcttaccttttttacttcattgttttttgcttcatggctgaaaactaaactggtcttgtgtaatattttgtggtttcttctaattatattgtatattgcctggactcattcagttcttgttggatacaaaaacaggtacccggtaccaggatctcccacccaagttcagt

SEQ ID NO: 25800 - DNA, 573 bp, Glycine max
  Intron number 2 from transcript Glyma14g01360.1 (locus Gly ma14g01360) derived from phytozome v7.0 (chr-ID Gm14; pos 767349 to 767921)
acctttaaacagctgcggctcctgctgaagatcaagtaagaccaaaatggaaactatttttgttttaagcctctgtttgcttaacaagtattaccttttcatgatgaattttaataattttgaatatgggtttctcaattttctttaagttgcacttataactttacacatatgaggctatgaaactttttaatgtggctttactatcaatcagcatgctgcattttaagagcctttcattcattaatgaagctatgaactagcagtagcactattgtaactttctgtgagttgtgcttgatatcatattgatcaatttgtacctctagaagatttggacatctacgttcctgagacaattatggctatagttttcacttcgcgtgattttgtttcagaaataccttgtttatccatttttttaattccattggagggtctcttattgtaaaggggaataaccactgtcattatccacttctatttatcttgccttttttttgttttagcgtaaggaataaaatttgtaatccaatattcatttgtagggagctagggatctgaagataagat

SEQ ID NO: 25801 - DNA, 575 bp, Glycine max
  Intron number 2 from transcript Glyma16g23830.1 (locus Gly ma16g23830) derived from phytozome v7.0 (chr-ID Gm16; pos 27676279 to 27676853 reverse strand)
attgttgaattgggttctggttgtggattggttgggtaagttcaattgcaatctcatcctatttgacctgttcatgctaaatggctacagtttgtccatagtttcttgattagcttgtctttttccacaaggatttactgaactaggaaaatagagctttgagcttttgcattgtctttttttacgaacaagagaccgtttgaataagcttctcaataggtcctttttggagaagaaaatataatgaattaagaagttaataacaatcaaatttctcctcccacaggttaaaatctacttttccacctaaattttgctatgaactctcatctttctactccattagttgtgtataagttgattttatcttatgggagaagtttgattcattttacctccttaattcttcttattttctttttggttgttcaaaattttatccaaactatctctaagttttctaaaaaatgacgaggaattatttttaagtttgttcttactcattctatgatacacctttcttatttttttcttccttagttgcattgcaacccttttgggtagtgaggtcattg

SEQ ID NO: 25802 - DNA, 660 bp, Glycine max
  Intron number 2 from transcript Glyma14g15270.1 (locus Gly ma14g15270) derived from phytozome v7.0 (chr-ID Gm14; pos 16154913 to 16155572 reverse strand)
gcttgcttggactccgccgccgcctcctcattgtggtaacctcactcttgtgctgcgtgattgtggcttccgtttcaatcctagggtttaggaagaagttgttttaggcgtattgtgaaggctaatgtttgtttcccaaaagttgctgtattgcattgttcagccagttagattatgatatgaaaacgtaatgttgagtggtttactatgaattctggtggagcaagcactagctttaggttctgacttttgatttttaattattatttattctataaatcaaacgccaataaggaacaatttttgggatagattgtttgataaatcgctctcgcttcacttgtgaatttggtcagtttgattcaaagatgagggcgtgttgttggtaggaagaattgtaatgttcaaaatttcaatcttctgcttaaagtgaatctgaagtaggaactgaatgtacataaataaaaatgttgagattgattatttattagtgttccctcttgtggtttgattatttatcaatactcctcctccgtcccactctctgttgctcataattgattgctttggaagtatatgtcatcagactaatttagcttgtaatttttttttctatgctcaacagagcggtttaaagttctttcctataatatattggct

SEQ ID NO: 25803 - DNA, 777 bp, Glycine max
  Intron number 1 from transcript Glyma15g15100.1 (locus Gly ma15g15100) derived from phytozome v7.0 (chr-ID Gm15; pos 11538632 to 11539408 reverse strand)
agcctccctctcgaggttccctctttttcctcttagatcctattatctctgtctttttttcgcttcgatttcgtgatgcgtgttgtgaagatggatttgtattagatcgtgattttttgtgtgtgatttaatggggtttggaatttgttgattgagcttgttttgggaaattcctctgtgttgtgttcggatggggtaatttttaataatttctaagaatttcatataatggaatatgtggaaatgtttgttaggggaattcaaaagttattttaggagtttcaatttatagactactattcttctgaattctgtacaattttaaacatattatcttctgggttttgcctataaattgttaagtatgaactcgaattttaaaagacgtgacttcgaaagtgttgttggataccatgtaagtatgtcttttagcttctatgaagcttgaggcctgttttgacccgaatgataactcacctaaactttctcaaattaaagaaaaaaaaaatcttttgggtgttggactgttggtactgttaatagttaattaattttacttgattggttcacccaacttgataaatgtctaagagtgttctgtactcgcctgatctaattttttttgtctgtataatctgtaaattgttactggtttggaacttggaatttaattattgagtatcgtttttgtttttgttgtctcgcgtttccttagcaacttcagtggtatgattgttttcaggaaaatatatttgagtggcaatttgcgattagagg

SEQ ID NO: 25804 - DNA, 819 bp, Glycine max
  Intron number 4 from transcript Glyma15g05430.1 (locus Gly ma15g05430) derived from phytozome v7.0 (chr-ID Gm15; pos 3839458 to 3840276)
tcaggaactccaagccctagttgcttcatttgcaggcaagacttcatcatttttcttctgtttttttttttttttgctgacataagttagttttgtggaaactcttgtattttcactataattaaggcatgattctattcactttgaatttgaatatcttaaccgtctaactttaattctgttgaatttctgatatcgaagttgctatcgttgactcttgctctattaaaatttttcccttacttttatcataacccgttacatgttacctttgttgaatgttgatcatagactatatgctataccgaaactaactcagtaatttctgtgtgggttaattggtaaagcttggacgaaaggatcaatgaatctgtatcaagttttattggttttatatagtgctatatatataatgttattttcgctatgcttgaaagcaattgcaccttagaattagtttgttgagaaaaatgtattatagtttaaacttgaaagactggtgattaaaaatctgttttctattggacttccctttccctattatataaacatgaaaagatatagatgaatgctgtaatttcttggatcaacatgtactgaagataaaggttccatagatattgcataaaactaaaagtagtttactagtaacgtactatttccatggtaacttatgcaattgtttcattaaatatgattcttggtttttgattgcttttccaactagctttcttgtgcacctttattttattcaaagatgtttagttcagcaaaaatgttaataccaataaactgtttccagaactttacacaaaggag

SEQ ID NO: 25805 - DNA, 438 bp, Glycine max
  Intron number 1 from transcript Glyma13g02870.1 (locus Gly ma13g02870) derived from phytozome v7.0 (chr-ID Gm13; pos 2829770 to 2830207 reverse strand)
tcaaggctggggttgtttctgaagatgtgagtgagttcgggaatttgtggtttttgttttaattggatttgattgaataaacctatttcatcctaaatgatggctaattcaactgtaaagtattatcctttcttctaaaagattctcaaagtaaaaaaaaccatgtaagtaattcttcaagtattagaaattatggtaagtagtaagtagtcttttttaagtattggaaacccttcaaattggtcactaaatgttagtaaattagagattaaatggatggatactcaatgttttggggattatttgtatagttttattacttaagggattatttaagagaaaaggtgatgatactctgagaacctgattgatggtttatttgaatttggttgtggttgtttttgaaatggatggtgtgtgtttttgcaggggtttgca

SEQ ID NO: 25806 - DNA, 724 bp, Glycine max
  Intron number 1 from transcript Glyma16g02080.1 (locus Gly ma16g02080) derived from phytozome v7.0 (chr-ID Gm16; pos 1600843 to 1601566 reverse strand)
gaaccattctatctatcgaggtcaccttcttttctaatttcaatttcttttgtgtttatatatttgtttttttaatatacgttagctcgcccagtttagcaaaaaaaaaaaagtcttatgtttttgtttttaattttagtttatgtattatctgaaataattctaaaaatgttacttttatttctgttttttaactataaattttcgttttttaaatttctttttacaacattttcaaaacatcaactaaggtggtgtttttcattcaattatgaatacaaatattttttttcttcttttcattgttgataatgcaagcttcacactttcgcagcttcttccatttggttatttatttattcttttgctttctcttatttattcaattccatctgcacagaggcgtagactcaagtgtcctagactcctagccctttggtttttaatcgtgtcgaataaggtggtgtttgattcagtggcataagactttgttgttgtattaagcacctaattagtagtgtctgacaagtgtaaatgtgtccaacattgggaagaagtgtcagtgctcatatcataggttgcaagattttcattatcaaattttgctagtccaatttgaaaattgtgataaagcaaagtttctaatcattataatctgaattctgaatcatcatctggtcttgtctttatcgtgatgtacttgctttacttcaggtttgccgga

SEQ ID NO: 25807 - DNA, 817 bp, Glycine max
  Intron number 1 from transcript Glyma13g24760.1 (locus Gly ma13g24760) derived from phytozome v7.0 (chr-ID Gm13; pos 28082698 to 28083514 reverse strand)
gaagcttttgggataatcaacaccagcttttgcaggtaattaattaactaacatggcataatgttcttgattaattgattctggtatttgattctttctttgtttgatttgttcaatagatcaacgttaatacatgcaaaggaaattaatcaatcaattaattttattggtacttcattaattcttatctcccacatgcatgtttcaatgaagttttgaactacttgaaatctgcaaatttaaattcaagttacagaagctaaagcctgtgtttagagtatccaattcttttatttcaaaagtttgagtttagtatccaattccatatatccattgtttgcatagagattttttatcatttcaactcaacaagatttatatcagatatgattttaattatttttaacatcgacaaacttattatatttgaaaatttgtgagtagatgatatactattttttttcttccatattctcgatgcattctaattaagttataaactttttcttgagaaaaaaagaaaaaaatatattttttaaaataaactgggtttaacgtatatatactgaaaaatatgaacatgaaatacatgattaaaatttgaaatatcttgttaattagaatttaatacatcgttaataattaatttcattttgatttaaaacgtaattttgattagtagttttatcatttccattttgttgctccaaaatcttagttggcttatgaggttttagacgcgttggttttgaccaagttggtttttctatttaattatgcagaactacctatatagatcaacttctattgagtcaag

SEQ ID NO: 25808 - DNA, 654 bp, Glycine max
  Intron number 1 from transcript Glyma15g41690.1 (locus Gly ma15g41690) derived from phytozome v7.0 (chr-ID Gm15; pos 48871463 to 48872116)
cagccctcttctcctccactcactcgaaaggcatgtccctttctgtcttctgaattttgcaccgttttcattttctgacatacccatttccccactgtgtctaaatgtttgaattttgattgcaaagtttcaatcttttctaatattaccacgacccatttgagccttttgtgtgtttggtgatagtgtacatgtttttcacccatttgttcaagagtttaagtttgatgtcgcacgaattttgcactgtccttagaaatcacccccttcacatgagtttaaagtaatgattttaaaatttaataattttcaactacatagtctcttggaattgctcttcatatgacttttagagtaattattttaaaagtcaacaatttttaattttatgacaatccatgattgagtgatactataaacaacctttaattcttagttaaaagtgtggacgacttgaatgtgatttctttttagtattgttaatggtttgatgtcgaaaattgacacctgaatgaccagtttgatgtagtgatcattagaggaccaagcgaatgacacttaagcctttcagggactacaaaatgcatgtttattattattatttgggatattcttgttacttgtgcatgagtcaggggtttgtttgaatggcag

SEQ ID NO: 25809 - DNA, 1029 bp, Glycine max
  Intron number 1 from transcript Glyma16g27810.1 (locus Gly ma16g27810) derived from phytozome v7.0 (chr-ID Gm16; pos 31758380 to 31759408 reverse strand)
aggacgcttgttggccaagtaagacaacatgtgcaaacatttttctataaggaaataagtttttttatttgaactttttaaattaattgaaacgcattcacgttgttttttactgcgaattaattatattgccttatatgataagatttttgacttttgtaatactcactttaaaagtcgtatttagaaattagttgaaggcgtaaaaatctttttagtgatggtgtatcagaattaaatttgatctttttgtgcttgaaaatgtttgtgctacattgtttactcttttctttttgtttgtttcttttgggtggagttctcaatgttgttgttataggccttttatctgttgtggttttagttttgcagaatggtatttggcgtaatcgtcgatgcctagtgtgatgacaaatacttggggtgagacggcaatggaatccctattttcagttagttgaacaagttattggttaaatctttgatacgagtgttgtgtcaatgaaaaggactccctttccaatctgctccatataatgtatcaaataagtattgtttcaagccaaaattcgtttttttttttaattgattgagtctcattaataatgtattctagttccgtctctagttaaaactctgagctaggtatttgctcactttacattgaatggttagatatatttgagctgttaggaacttattaatttgatcatatgcacaaggaatgggaaaagttctggatcttgaaatagagaatgctctatgcctctagtttttgtcgcgcatgattttgcaaatgcttaaaattggcatcttggttctcaaataaagtctctcgcataaatggaaaatggagtcattagtgtggtatagctaaaatatattaagaaaacaatgaatctattttgttcacaaaatttgccaattcttgctacactagtgaaaagttcttcctgtttctattccctctaattatttcaaaacacttgaattgcagcttggccgacaagcagaaactatcattctcccttt

SEQ ID NO: 25810 - DNA, 578 bp, Glycine max; identical to SEQ ID NO: 18609
  Intron number 1 from transcript Glyma14g02660.1 (locus Gly ma14g02660) derived from phytozome v7.0 (chr-ID Gm14; pos 1655473 to 1656050)

SEQ ID NO: 25811 - DNA, 988 bp, Glycine max
  Intron number 2 from transcript Glyma14g40670.2 (locus Gly ma14g40670) derived from phytozome v7.0 (chr-ID Gm14; pos 49678737 to 49679724 reverse strand)
ttagtgagcaacagcttgtggattgcgaccacgtggttagtttctctcacttttcatgccttctctgttatttggcctccttttttttggtattgattaatatttaatactataaagtggtaggtgaatgtttgaaaacttgattttgaacttgcccctaataaggtggtaggtgaatgtttggatggttgattttgattgaaattgtttttaaagtgaagtgatttataactcttaatagttattaattgtgaaatccaaggattaaattttttgtccaacatataagttaaattgcttccaagtaaataatcgattgtggatccaagactcgtcttttcaacctgagatcaaacaggtgaacaactaaagtcaagttagctgatattttaagggattctgaatcatctaaagtgagcccaaagatgcgatattatgaaattcttgtacatgatttgaatgtgtttgatatgttattataaagtgtatgattggaaatgaaaagcatagcttttattaaataattggtttattttgattatatttttcttgacttcatgcttatagattattttgatcacagtaagataatctgaacacataataacacattgaagacatgatgtgcccgaccgtaagctaacaaaccttctaaacaattgccgtatccatgttagacatgtttccagattggacattccagatattatcaactgcattatgatattatgatccttgaattttgattttcttttctaaattaagactttttgtttttcctttaaacgttgtaatgtaactgtgttgtacccaataattttaaagtttattgcatttgcttgttcgtgtaacatggcatttgtgtctagatcgtatgtgtaccttctggctggtaagacagtaaaataacactaaaattagccgccatcctgatatacaatgatgaattaacggctatgaatctctccccagtgtgatccagaagaat

SEQ ID NO: 25812 - DNA, 718 bp, Glycine max
  Intron number 1 from transcript Glyma15g17240.1 (locus Gly ma15g17240) derived from phytozome v7.0 (chr-ID Gm15; pos 13583199 to 13583916 reverse strand)
actgttcctcatttgtgtaaactctgggctctgtaagcatattaataaccaaacattttgtttaagttttcaaccttctctcagttttgtggtcttccatctaaattcacttcttttatttttccatatagttttatgaatatgtaattttagtctcctaaaatatttattaaacatttggttctcatgtctttcaaattgagtaattttcatattcatgatggcatatctacatgctaatatgatagtctaatatttatgttacactaataatgtgttgccgttgcatgttagtgtttttctatttatgtacaacacacggttagtgtcacgttaatataaatgttaattgtcatatcatttatcatattagcatgttaatgtcaaatcatttctaatgatagtaggaatcaaaagtgaattcaaggcaagattttaaacaagaaaagaaacttaataccccagttgctggtgaaagtccaaatggtttaatgtttgattaatgacttcagaagaatacttttaatttcattcttgaaacggctgcatccttccctttactgatgagtgtgaaccacaaatatatcactaagtacacataaattaggcagtgtaatcttggtagaactgaacatgggtgaacactttcattaatcatgctgtcatcagagtttttagtccacatgatttggatcttcttgcagagcttgccctggaa

SEQ ID NO: 25813 - DNA, 690 bp, Glycine max
  Intron number 4 from transcript Glyma15g13040.1 (locus Gly ma15g13040) derived from phytozome v7.0 (chr-ID Gm15; pos 9708833 to 9709522)
ctgggtaaatctttcttttccaccttttatttggtaaaaaaaagaaatgtttattgatttatttatggtacttaagcttgcttggtttacaatttaagaaattgaactttatacaagtgtggttagttagacatgttaatcaatttgagctagtgtagttcttttggtgaaacaagtagatattgtgtatttctgtttatttatgatgttgtcctcttgtggaatatagcagtcaaattgcgaatgtgcaaaatctgtgaattacagaaaaaatgctgacttctgagtgtttttatgtgactatagagggtgtgggtatgattaaatttatagtcctgcaagagatagttttcaatcatataaccaaatttccttatactgttataggtcattttacattaattttccataaaatagtataacccccataatcaattgcaacaaacaactaccatgtaatggttgcaacttgcaactagtatttctgtgttactaacttcagaactgaataaaccattatactatttttcttatccaaacatttgacttacaaattcaaaatggtgcatctattctataggtttgttgcacactttatagattttttgatgcatagacatttttttaatgttttacttcaacaagcttacctattatatggcagtctctgctgttgaacagcttcaagtc

SEQ ID NO: 25814 - DNA, 361 bp, Glycine max
  Intron number 4 from transcript Glyma16g26780.1 (locus Gly ma16g26780) derived from phytozome v7.0 (chr-ID Gm16; pos 30849085 to 30849445)
ttgattgcagttcaacagcagagccagcttttgaggttgcatattctattgtttttcttcattctatttgtttaatgaagtcatccatgtattttggttttcttcatgttttaacttcaactcttttaagtaccatgaacattgatagcaaaacaaacaagtaaatctttaaaagctttaaatgagagttaaatggtgggtgcattggattaataagctttggattttcatcaatgatagtgttttctattattattgtgttatttatcatttttgttccgtaaatatcttttaatgcttcaaaattaatattttatttggtgctctaaatctctggcttttatatagggtagagggggtg

SEQ ID NO: 25815 - DNA, 462 bp, Glycine max
  Intron number 1 from transcript Glyma15g17780.1 (locus Gly ma15g17780) derived from phytozome v7.0 (chr-ID Gm15; pos 14261564 to 14262025 reverse strand)
ataataaaaagaaaaaaagcatgtagcaaacaatgaaaagaagattaaaaatatagaaacaaatttaattgaagtaaaatattttaatttgaattaatacatcaaaattttacaaataaaaacaatataacatacattcaacgttgttggcttgagcttacacggtgaagacaattttgctttgaatgacctgtgatgcgacacactgaacatcgttttgggaattttttaaagttgctgggtgccccagcaataatgctgggtgcacctagcaactcccccttcttcccgtgctatcactcaaaccaacagaaaatgtgacagaactaacattaacataaagtcattaaccatctggtcttgtaacaacatcgttagtgagaaatccaagcatttttttttccctttctatgttgttctacccaagaaccttgtccctccaaacctcactcaagcgcggtt

SEQ ID NO: 25816 - DNA, 850 bp, Glycine max
  Intron number 1 from transcript Glyma14g31370.1 (locus Gly ma14g31370) derived from phytozome v7.0 (chr-ID Gm14; pos 38083108 to 38083957 reverse strand)
ggttccgggacttggctcggacattgcagtttaaggtacgagtaatgttgcctactacttcgcttcattttttttctctcgaaacattgtatctttctttgtgtacattggtatgtagagtagaactgaaccactcttcattctggttaccaattttattaatctgattgattacacgtatccacaaacccgtgtttgattctctcctgtgcaaaattatctaggaccaatggcggtcacgtactgtgagcgagatttcgctcacacttagtgtgttgggggactcgtgtggtcgttgacctcggacaaatgaaattgttcatcaatatgttgttactcgttagtctaagtgacgttagtcacagatcgttcaagcaaggtcttggattcaagagtcctgtgaatgaaaagaaaaatgtagttggaaggaaaaatcagttgccaaattgataaaaccaatagatttttcccgcctatgtcacgaggacccaaaaaacaaccaaaaaaattggttttagaaaacattaggtttgcattgtgggaattgtgggtgatgcgagtattataagattgttcgttgatttcttattaagttattgctgttattttgaagtaccggtgtaccaattgaaaccatcttactagcgtaaaattggtatggactaatcagtctctaagaaccaatatctgggcttttcaccgtagtattcttttgggtagtaatgttgatattgatgctacattgatggttaatcaatactctatgcacttttgttactagcacatgtcattgatattaaattgctctgctgttgtaggatctctgcattggaaatttgtttcaatttat

SEQ ID NO: 25817 - DNA, 714 bp, Glycine max
  Intron number 2 from transcript Glyma15g08680.1 (locus Gly ma15g08680) derived from phytozome v7.0 (chr-ID Gm15; pos 6137995 to 6138708 reverse strand)
ttgccactgaagttaactctgtagaacaggtaggtaggatattggattcttgaggtctagatgttctttcagtgtctttgcctgtgttttgaattgcactgggtggaaatactaggtgtaccctagattaattgttgtaaagacttccattcttttgtgtgttgtgtgcgttgagccattgagcattcctagtgagtttttaacaaattatgggtacaaggcattttttaataaacatgcacgctcagtataaaggttttacatgatcaattaagcagaaatcattctctgtatgacctttaagataattgttaataaaatttaacaaacttaccatatatggttacggttcatgattggattggataacaatataaaacacttttacattgttagtgcatacattatttattcatttttcttttccctttaaacgtagatgatttctgttaacattcgcgtggacatttagagtgtagttgattggggggaaatagcaaggcaaaaagtagaggaatgaaaatagattctgaatatttttgtcatgcactattttcgttcaaaattagtgcaagatttcttagaaattaagcattgggggctaggcctttgtgtttgattctgtgtgtgtgcgcgtgtgtgttacaagaatctaaccctgtaaacttttcatatccaggcccaaagtattgcttctaaagaaagccagaggcc

SEQ ID NO: 25818 - DNA, 1024 bp, Glycine max
  Intron number 3 from transcript Glyma14g18360.1 (locus Gly ma14g18360) derived from phytozome v7.0 (chr-ID Gm14; pos 20454860 to 20455883)
gctgagttggtggatatccttaacaaggtgcatttggcaccatagaaataggattgtcttctcaaatgagaagttcaatgccaacaaactgatggaggaagccttttgtaattaggaaggaaatatgtcataggtatagggtaaatacataccaagattactgtcagttgtttggtagattaattcttggtaactaacctaggctaccacacttctgcatatcttggagctgatgtgtattttgtacagtaccccttgtactgatgtttatatccaatatattagtatttttgctgataaaaaaaaagtttctagaagccattgtctctattttctttcctcccagccaaatatattaatctcaagtagaactaagcattaactatgtggaagaaagcgggagccctcttggaggggagacccttcgaagaatgattgttttccttgttttttcatcttcaaccaagaaataaaaccattcttttctatcttctagtttctattttgggttcctaacagaaaatattgtagtgtgagaaagttaaagaaactgagagaaagagagggaaaatgctcaaaagataatggaactgttattttgttaaaaaattgcaactaaaactgtttcagttttacagtcactgtaattcatttgtagttaggctggtcacagtaactaaaaactaactacccagctgattcaacactagagctgtgtcaacaattcacagagaaggctctaatacccaaaccatatgaacttgttttggaatgttatcattatactgggctacttttgtactgtgattatggcattatgctatgctgatttatttatttgtagaaaatggcattgattacattcattatatgcttccgtgtttgttggtcagatcttcccttgatatgttttgattgaacttgtttcagctgtatggaaggcacacttatttttaaagtaagtagatttggtgctgggtactttataggctgtgatcaacatccgaggtgcaagtgagtattt

SEQ ID NO: 25819 - DNA, 452 bp, Glycine max
  Intron number 1 from transcript Glyma14g07200.1 (locus Gly ma14g07200) derived from phytozome v7.0 (chr-ID Gm14; pos 5346443 to 5346894)
caaagaagagtggaagcaatcttatttttattgtacactctgttctctatttcttcatttcttctacaccgctaacgccctcttttcattttgtttttgcaaaaaaactctctttttacttaattacactgtgtggtacggtatcggttggataattttctgagttttatccatttgtttacatatagcagcagaagtgaacggttgggggagacaaccctttttctgattacatttgttccttctttattttttatttattcaggtttgctgattaattttgcaaaattttgatacttcatgtgcctacccatcagtaatgattttagtttttcaagtttgaaacactgaatttgtgctgatattgtttcgatgagtgacatttctcgtttttctagtgtgaaatactaatttgtgttgatattgtttaggtgtttagttgatcgtggtgg

SEQ ID NO: 25820 - DNA, 887 bp, Glycine max
  Intron number 1 from transcript Glyma16g30660.1 (locus Gly ma16g30660) derived from phytozome v7.0 (chr-ID Gm16; pos 34208493 to 34209379)
ttgcaaaacacctgataatttctcacagtgttctggtatgttcaatttcaaattaagtcttcctttttttcttaaagaacactacactacagtgttatgtttccatttcctatgcaatgaatgatctataagtcttgttagtggtggccatataaaaacttatgtttttatctttcattgtttgatgataacctgtttttaataggaaaaaaaaagtctttatttctattttcaaaaactatttttagttttcaagatacaactaaacaagttcttcagactgtttggtggagaatgatgtgagacacagaatgtggaattgagagggaacttgaacaagattaaaacagaagaagcagagaaaacgttttcccgatgttttttattttttggattttagaacacttattttggatacgattctccaaacttatatattttggaagagaaattgattactaagtagtctaaaattattttataaaacagtttcttaactgagaatactcagaccctaaatcttccaattttagtatatttctaaaaaaaatcagaatatttgtggtctaagttttatcattatcaagcctttcattttccttaaagaacaaaagagtgtcacattccatttactatgtaatgaatggtcaacaagtcatgtacttcaaagttttctacttttctcattcgtaactggacaataacacattttaaaggggaaaacaagggcatctaaatctgccaattttactttgtttgtgtatctattacctctgagttttcaactccgaaagttaaaaatatttgaggtttgattttttctcaagaaattcttgtttgaaatgatttgagcaacccttctgcacttggatcctaaatcacctgaa

SEQ ID NO: 25821 - DNA, 736 bp, Glycine max
  Intron number 1 from transcript Glyma14g11760.1 (locus Gly ma14g11760) derived from phytozome v7.0 (chr-ID Gm14; pos 10284435 to 10285170 reverse strand)
agagaagtctcgtttccaagttggtgactatcttggtatggcaactttgtttcccaaactttaatcttttttaaaaatcttgatgaaattttttattttgacgtttaagcacaaaattctcaattaaaattaaaatgtgtgttaagagactgtttgttacagattttaaaaataatgatttttacagattttaaaaaaatgatttttgatgttgaataattcagtaattatttttaaaagattttaaaaagagtaacagctatttaatgtctagttatataaaaatcatttccttaacaaaaggaactgattttagaaggaagttattcaaaataaattttaattttaatcaaattttaaactttttttttctctctctgaaaattggaaataaacacatgagaaacttaaacaagtgattttttttttcttctaagaaagttattttttaatgaaaaaagctgtgacaaatgggtcctgtagtttttgacaaaattggcctaagtcttgtattatgaaaatgctagttttttttatccaattgagagccaaaatcttcttttttgaaatgcaggaataagattaattttacctttcaatatttcattataggaatgacatgtggattttgattagaccactattgataatattgcatttgcatctaagttttgtaatgtggaaaaatcctaatcaaatgacactttccatcaatttttgtctccagtttggaaat

SEQ ID NO: 25822 - DNA, 378 bp, Glycine max
  Intron number 2 from transcript Glyma15g19250.1 (locus Gly ma15g19250) derived from phytozome v7.0 (chr-ID Gm15; pos 16424105 to 16424482)
tttccacagtaacgaaacttcaagaacataagaaggtacttgactcttgaacctccatttagtatttaacacaccaaaattatatttaaagttctttcatagttcatttttagcataatgattaaatcaaaattgatatctgacttaataattgactaatgttttaacaattattgattacagtcatagagttttataatgtaactatatgctagaataacgaaataagtgttttttgaaaaagcattctcttccctagtttcctaggaaatgctagaatttgtgagcctccgcatcatgttaatattttttgtagtagttaaattaaagcttttgacaacaggttatcactggcatcgcacttcctgttggatccga

SEQ ID NO: 25823 - DNA, 259 bp, Glycine max
  Intron number 1 from transcript Glyma13g24020.2 (locus Gly ma13g24020) derived from phytozome v7.0 (chr-ID Gm13; pos 27350184 to 27350442)
ggggtgcttctctcgccaaccatttctcccgcacggtattaaacttttatgaaaaattgaaatgagagtgaatgctttgaatttgaatctttttctttttgcatttttctgcataatgggtatggtggttttcgtgtaaattttggagctgttgcaaatggggtgttttttttcttcatttttttgttgtctccttaatgggtaagatgatttgtatataaagtttgaagcttttttcatgattatgatgatcaggtag

SEQ ID NO: 25824 - DNA, 915 bp, Glycine max
  Intron number 4 from transcript Glyma14g06160.1 (locus Gly ma14g06160) derived from phytozome v7.0 (chr-ID Gm14; pos 4457596 to 4458510)
cgctgcacggttagtgtttctggccttgtaatttccctttttagtgctttcagtttagttcgtgtgttaattggaaataggtttgttttcattttctgtgttgttctctgtttatctaaatctgaagtgtgttatgtgtgtgatttggttcttggatcgaacttttttttttcgcatcgtagtgctttgtggttttgattattgaagatacttgatcgagctttgaaatcttacagttttgacatcgtttctagaattggaattcctagtttttagaatctttgaatgatgacatgatttgatactattcttagtatcttgtgatgaatcacaaatgatttggaattatgcagtacatgaatgaatgttgggatactctcataaattctcatcataggaattgaaaaattaaatgagagtgacttattaaatgaaaaggaattaaagagcactaagaaaagcaaactatgttttcattcatatgaaacaaggattttatgcagtcactcaatcactcatattattgctcgcctcttattctcctgaaatagaagctccacatacttagctgtgatttttgttttgtgggacttacggtcaagttcttttttcaattcctagtttaacattatgtataatgtttatgtaaaataaatcaaatcctttcttttttcaattcctagtttaacattatgtataatgtttatgtaaaataaatcaaatcctgactgaacgttacatttatatagtactgatatataactatatattaccaaaatggtaaaatacaaataaagaagtcaactagcacaaaaaaaaaaaaaacaaatcgcttctcctaggctttacctgttgaaattctcaactgaattctctatatgtcagagttaattatttgttccccctctttcagca

SEQ ID NO: 25825 - DNA, 402 bp, Glycine max
  Intron number 1 from transcript Glyma15g42100.1 (locus Gly ma15g42100) derived from phytozome v7.0 (chr-ID Gm15; pos 49502359 to 49502760)
ggtatgctttgtaccactctgcacatctttcactcttctctctttttatgcgtgtttgtgtgtgatttttgtacttttgggttttgattaatgctaatggtgtgagtactttaatcattttgttcaagtggggtctcagttacaatcaccccttttcaagtttgaatatgcttcaagcgtttttgggacctgagtatatgggggtctattcctttcttaaattttgtgtttttccttgatttgatgattattgaaaattaagttcaattggggggtctcatcctcagagaatttggcttttgaatcatatgatttttccataggtgttcaaaacttaattgactttcactttcagtttcttgatctgaataatcagtctttaatgttctgcacatgtagggg

SEQ ID NO: 25826 - DNA, 926 bp, Glycine max
  Intron number 1 from transcript Glyma17g00610.1 (locus Gly ma17g00610) derived from phytozome v7.0 (chr-ID Gm17; pos 279219 to 280144)
tgaaaaaggtctgggttcaataagtttctcttgctcaagtttaagtccattgcttttgatttttcttaaagttaaatattcacgaaggaaattcaacaatgttacattagtcaggtgtgagtgaaatacagaagaatttgtgtcttccatcagcgatatagttaggaaaatgtcaattctgtatatatatatatatatatatatatgccatgttaactggcatcaagcatgtatccatattggacacttcaaatactcctagctcctagcctagctacatttaataagtttttactgctattttttttaacttgtaagccaatactacaaatgggaggattttcagagagtttcgctagcatttctcttacaataatttggtgaattataacattttattatgttatagacttatagtggctcataattttgtgttaattttatattaatttaaagcattgtattctagtcaattttgtcctatgttttatactattagttgtattcctgtttttgaattgtatcatccgtgtcttgtgttgcatctttgctttgtaggttagtgtcaatgatttatatggaacaagagctaaaaagctctggtttattattaacaccttaatcacactagagtgtacagatcatgttgaggctctcttatatctagaattaaataactgaaccatttctgatggcacactcctggtagaagcgcttacattatttggatttatctgtactattttactggatttgaatgcatagtttgtctgttttttgtcatgggcatctttcaaattcctatgaatgcctattagtaatttgcctgcctcctccatgcctttgtgggttctctctccatttacatttcaatggattcatataagagaatactttttttgtgttctgtatttaggtccttaaag

SEQ ID NO: 25827 - DNA, 852 bp, Glycine max
  Intron number 1 from transcript Glyma15g07900.1 (locus Gly ma15g07900) derived from phytozome v7.0 (chr-ID Gm15; pos 5561371 to 5562222)
aactctttggccccgaccactctgctttcttcaaggtttcacctttcccccgttttccttttaaatcactctctttttttcttttcttttctgggttccttcccatttcttctatgttgatgttgcctgtggttttgggtttttggttgttgtcattcttattctgaaatattcttattatcaagtgtttgctttatttttcccaatttcatgttctgcttgtcttttttattctttgcattgtctgtgtggctggcaatttacacacctctttgttatttcacttttttctagtggatgctaacttttcttcaattggtttgacaatgtgtgtatttgaaactgagccgctgctgaagatgaatcttcattgatgcagtaattacatgaatatatataccacttagatctcttgagaaaattcaagttgcacaaatctttcaagtttcaaaaaaaaaaaaaaaagcaatgatgaagttgatatctatgcagtgtaaatttagactgtcgattaatctgaaatcatgataggcttgagtgtatgacttgtaagatagttaatgtaaaagtcaacaaacctatcatatacaaccatttatgattggatcacaatgtaaaaaccttttaaactgctagtgcatggttatgtgttcgttattgttttattattaagtggtatttcttcaaagatatgtacattatattagatattagattatgatatgcatttgaaatggattttagttggatggataagtttctactactctgggcagggtgtgtgttaatttagtgtttgaaatttgtgttgttgcagattagtggagttgttctgcttcagcttggtacggg

SEQ ID NO: 25828 - DNA, 861 bp, Glycine max
  Intron number 2 from transcript Glyma13g20090.1 (locus Gly ma13g20090) derived from phytozome v7.0 (chr-ID Gm13; pos 23556537 to 23557397 reverse strand)
gcagtggaaaatttgaaatctgccattgcttttcagtaagctcttccaaacttgttggtgccccaatgtttcactgttttattttgcctggtagttttggtttttcaaataaatgctgccggctaacatgctactgctatctggagtgaactttatgctagatatagattaggtggttgtggcctgtgggaaggccatgaaacaggtttttagtaagttatttgtagtttatgatgaactacgaagactattgtgataaaatggagaccaaatactagcaattgtgtgacgagttgtttttaattgaaattatgtagttgaaccactgatcgcgtgagtcaactggtgtgaggctgttttagtttaaccaatgatttcgagtttgagtcttatatatgtagttgggttgaatactcagagtaattgttttgtgacccatagtgatcttaccctacttgagctgaattgcctttcatggaggatactcgtggttcatatattattatcaaaagacaaatttatgtatttgaacatatatgattagccgattgtttgttggcctgagcaagtaaaacccaccaagtgttataagtcttctgattgaggtgggatgatctagcaatgaagcaagcttatacatacactatgagattggtatatttttttattatattagtcttagatgggttttttttattaaatctttagtattgtcttggctgtatttttaatacaaacttggaaaggctttgattatgtagtggcaagttctcatattcttcagctttggcttaagcattaaactatgtacatgttcaattgatagagggaagggtgcagtgaagaaaagagtgggggctc

SEQ ID NO: 25829 - DNA, 819 bp, Glycine max
  Intron number 1 from transcript Glyma15g07800.1 (locus Gly ma15g07800) derived from phytozome v7.0 (chr-ID Gm15; pos 5488350 to 5489168)
tatcagagagaacaaggtataatcagcaaaacttgtaaaagtgaaacccaatattcaactttttaaagaaaaaaaaaaaaaaaaaactctattccaaaacaatcatattgtggactctggacagaatctcggaggatgacttattttgaagatacagttgtacccaagtatttggcaattcagaattttcgtaatatttgacttagctaattggatctattgatttaaagtttaaaccccagatgttgtgggaactgtctaattggttgccctgcattgatgactacttcctttactcagactgaatccagactgggttatgaagactgacttttgtttcttgtgaatcttctaacatatttgccaaggtttgcttgctatgctgggtagcatgtgatgatagtcaaatgtgtagcatccatattggtccaaattacaacagcttgcaaaggaataaatcatcaaatttatcaatagtttcaagggcagtctaaaaaaactagaatggtttcaaatttaaaacagaacagcaaatatgttaatcatgtatccctacataacaaatgtgtgctttgtctacataacaagagattagctatgagagataattttgatcttttcacaatgaattttagagaaatcctgatcttttagtttggcactgtatccatctataacattttgcaatgattgctgtattaaaaccttgtcaaattttgtttcttgtacatggttgtcaattttccctttttctaaattcccttgctggagtttaaccacaatttcaattttcaaaattggctggtgcagactgctgta

SEQ ID NO: 25830 - DNA, 613 bp, Glycine max
  Intron number 1 from transcript Glyma13g23320.1 (locus Gly ma13g23320) derived from phytozome v7.0 (chr-ID Gm13; pos 26746636 to 26747248)
atctgaacacgaagcgtattattgatctacggcacgtatatgggcgtgcgtctctacaaatacttgatctagttttttatcttttgtcttttatcagtacacaccaggtggaatgcacttcaaaattcaaaatttcaaattgaccccaccaagcttttgcaaatcattgttggtactaagtcaaacgtgaccaaggatttggttgactacgattagagagctactagattaattaggataagcactataaagctacactacaagatagaaaagtaaagatacgtcattcatttcataataaaaacatagtaattcctacattaatatacatagtaattttagtaaaatatgaaaatagttctcaacaaaaggtccaaactaataaactatcaagggtccaactatttctagtagtagtccttaaaccagtatggctttgaagtgattcgaatgagcctgaaagttctctagcatcagtggcccactaacattatccccctcttcatatgggaccttgttcgcaaggtccattggtgatgacttagaggcatggattgttgagagacgttgggtgtggtttccaactggtgttaggttgttgtcaacatcgggg

SEQ ID NO: 25831 - DNA, 801 bp, Glycine max
  Intron number 1 from transcript Glyma13g40170.1 (locus Gly ma13g40170) derived from phytozome v7.0 (chr-ID Gm13; pos 40714753 to 40715553 reverse strand)
gtcactttcacctttgattccattgctcctgggtatcccccaatttctctgcttttacttcttagttcttaccatggatatggatacaaataaaaactgagtttaatttaaatattgcactctaagtcttggaaagttttaagctaccttctaatgacactccgattaatgcatctgacgtctcatgccttgtttgttagacttattaaatgatgtgttaacatgtcattggatgattgcattcaaattagtttattatgatgatacaatttggtttagtttaattgtcttcctcctagattttcgtcatgtactaaaatgatgtgccatatgcttaatctttaagaatgtcatcagaggtttgatctttagatctgtatgtatgaaaatatctattgaaagatgttaaattgatctatatgcctcaaagaattagtccttgactctcttgattaggacttaggagataccatgactttatcaataaaacatcttgccatgtccaaccgtgttaaatttcatggacatcaccccgctattgaatgttttaaacattgttagaaatttccttatataatatactttgcttgatcagtaatttattctattctcagacaccacccttcattattttttctgtttatgcttttaatttagtatcagtatgagtctgagatagctgtcgttcttaaatgaatgtgatacttcttgtatacagcttaccttttatacctgtgctttgttctttcatgtgtttttatgcttaacgcgtgttctgtgtcctagaacagcattacagta

SEQ ID NO: 25832 - DNA, 1027 bp, Glycine max
  Intron number 2 from transcript Glyma14g24030.1 (locus Gly ma14g24030) derived from phytozome v7.0 (chr-ID Gm14; pos 28672964 to 28673990)
gtcttcatacagatattagtacttggatttcttgagtaattaccttaaacttatctattatagtgtactcatggcatgtgacatggtaaattggagaaacaccagtaaattttttaagtttaaccatgatacactaatatgttatattatcatctaatcataaattattcttgatataatttttaaagtgattatcataaaactaaacaaatttatcatatataatgttataattagatgatgttattttacattatccatagcttattttctctaatttttcatctatatacttaatagacaccaccacctcaacttcagttatagcaatcactcacccattgagtaattattttttgattataccggaacatcatgcttgaatctaactcgaatttgcggttgtggaaaaactagataggaaaaagagaaattctagttataaggtatctagtgaatccctcattaaaattgagatcttgatcaaagaaaaagatatcccatatttagagtcctttttgtatattatatgaatataaataatctcattggaccataatacataacaattttttgaaatatggaaaagaatatcttaatattaactagcctctggttatatttgatttgttttaagaatgactttatttattcccgtctctttttttcctgtttgaaagaatctttcctttatactatgttttccaagagtctagaaaattttcattagaataatcgttaaagttggcacaaataatcacgtaattcattgctagaccaaacgagtttattcaacctattaatctctgattaataaagattgtgattatagcaatttaaaaaaaagttaaataggaagttttatagagaaactaatggataaaagttaaaatacgttaatatattaagacaaggaccaattttatgctctctaaataaacacacaacttttgtgcatgttgataattcgttctatatattttatgttgtaggccagtggttgaccaaggattcactttcttgggga

SEQ ID NO: 25833 - DNA, 648 bp, Glycine max
  Intron number 4 from transcript Glyma16g08470.2 (locus Gly ma16g08470) derived from phytozome v7.0 (chr-ID Gm16; pos 7869483 to 7870130 reverse strand)
gaaaagttccatagagagacattgtatgttttggtgatgatttttttttttttgtttctttctgttataagatgcaatctcaaatattgagttttgatcatttgtgctgcatgtggaacctgctaattgttggtttgtttctcacctacggtactttgtggaaaccatagtgtttaatatggagcatggttttaaattgcggttgtggtacatggctttgtgacagttccttgatatgatgggaaattgcacacaaatgcagctgatgcaaccataatcaaggtcgcaaaagctccaaaaaccttgatgttgcaaccacgaactgttttttaaaacggttatatggagcatatatttgcttttcatttcaacaaaaaaattccattgtgtttcatctagttgccttgttcttccttgccttggtgggagtggattgaggtcttgttttgcttcttttcttgtcaatgttattgctcccttcctatgtagaaaatattagatcctttttaacagccttgattgttcatttggaattaaattctgtattatagaggaaaagggattcacatttttgtttttcttttgtttctgtctgttttgtttgggaatccagagaagtagggaaagcagttgcaaagataatagccc

SEQ ID NO: 25834 - DNA, 516 bp, Glycine max
  Intron number 4 from transcript Glyma15g03660.1 (locus Gly ma15g03660) derived from phytozome v7.0 (chr-ID Gm15; pos 2573421 to 2573936 reverse strand)
accggactccttcatctgagcataagggttcagacgtaagattatttctctctactttttatttattttcatattttgatctcattttaattccttaggaacagcatttaaagtgtcatgctgctatcctaaggaaatgctttatttgtgaaacaacattgaaacttgttacctgcagaaagcattaggaagataaaggaaaaggaagaatcaaaagaacttttgctttagattactgtcttaattttaagtggctgttgttgcctgttggttttgctgaaatattttgaagatagagaatacgacaggtgttagtttttataggaagtgtcaaaaaactgtttttcttgatctgtgtgataaataaatgttcaacattttcattgtttaatattgacatttcgcttttacaattagcaattttcatccaataaatttctcattattttgaaactttgctgcatatctctaattttgctatatcaattttgaaggttcctgcatcgccttctggat

SEQ ID NO: 25835 - DNA, 978 bp, Glycine max
  Intron number 1 from transcript Glyma14g12700.1 (locus Gly ma14g12700) derived from phytozome v7.0 (chr-ID Gm14; pos 11561558 to 11562535 reverse strand)
tctccttcaagctcgtcttctacctcgctctctctgtatgcttcttttttctctctttccgtgttcctcttcttcagatctaaaacttgcgtttttactttttaacgttccttcgaattgactcattcgttagtttagtaacacttatcagtaatcacgattggcagaaacgatacggttaaacgcgcttaggcctttgcaattgaatttaacgatggttgatttcgcactttgatatgtatgtgagtgagtgtgtgttttaaacctcattgcttgtttttgtactcggtttctagttgcttcttttcattggcgtgattaatcgatttggttatggaacgaatgtacataaaataacggttttcgaggatagttctaaataaatttactgaacttgcaactccaagtaggtcttgaaataggaacctaattgattgcgaaccttaggttaagttaaacatattttgtaaaaaagtaataattaggaatctaaatatcctttagtatgtttgagaatcttatctatgcctagtgagctagtaattatatgacattgtttggataaacttcttcataagcacttatagccttctaaaagaagaaaaaagaagataaagggaaaaaagaagatattgccagcttgttattgatttcaattgtgattgtaaaaggtattttatgagtttatgttgatgaaaactgtaagattgacaacattttatgttaagcaactaacatttgcaatcttttttattttgtttgtttatgcccttggcaactttaatttctgtttctaatgctgttttacaattcagaaagaagtagatcctttggcatttcaggaaacatatctgtctgttcctttgcatttgttatttggttatttatgcctttcttcttctgagccgtaatgctcttttcattatgtttttgctgattgcaggatatactttgcagtctcttcagcataatagggta

SEQ ID NO: 25836 - DNA, 414 bp, Glycine max
  Intron number 2 from transcript Glyma15g34480.1 (locus Gly ma15g34480) derived from phytozome v7.0 (chr-ID Gm15; pos 38933745 to 38934158 reverse strand)
atcttttctagcaaatctaaccgctcaattctctggtaactaaaatccctaatttgtttcttctatcgtggttcttttttcatctcttggaagctatagagaaatgacaataagtcattgtttagctggaaattattgttttggattaatttattcatagtataaaagttcattttaagaaatggttttgagtttgttatcatttttcccaaactgttttgatttcgaacgtgtcacgttctaaatttgcatggcatattgtctttaactaagtcaattttgcttaataaaccctttcttcactcctctactttactaacccaacccttgttcctatgtgtgtgagtgactgagtgagtttgtttttctcaattgatagtgcttgatcgctccattataagcaaaacgacgtgg

SEQ ID NO: 25837 - DNA, 913 bp, Glycine max
  Intron number 1 from transcript Glyma16g17740.1 (locus Gly ma16g17740) derived from phytozome v7.0 (chr-ID Gm16; pos 19423836 to 19424748 reverse strand)
cctgcagaaagacccccctgcgtcctgtagtgctggtatgcttttttgttctttttgggtctctctttgttttttttcttggccttcaattattatacaattaaaaatttacacaaacgttgtacaattcaaaatatagtttgattgaaaatgtagtttctgacaaaatgtatagaccaaggttttaaattgcaattacaattattgtctagttgtggttttgttgggatcaacaattgtggtcgcgatgggcccaaaaaccttgatttggtgttgaaatcatggtcacgaactgcaccaaggttttaaaaaagggtcatcggctgtaattttgacagcaaggtcaaggcttttaggttcccacgacgaccgcaaatgtgactatagaagttgtatttgctcacaatttaaagtaatatcaaggaacattagaaaactcagactacaatgttggttggtattgtgttgtgatggactttacatcttttaattttatttttatattatcttttgattgtttgataaacttttttatgattgttactttcttgtgtacacacacccgtggctgtatgcatagctaggtgtgtttgtgtggaccaaattaatttaatttttaagtgccacggaacatttgtttgttgatagttatcacaataatttattgaagatgtatgaacaatataatatgtgggtccttaacacttatgctactagtaaaatagaaaattttgaaatttagaggttggatgcaccccacattatgtagttaatttttattttatttgtttggtaaaaaaataaaatgattccttgaggattggaaccacaatgattctatgtttgcttaaaacctatcaaaacttttgagtgtatgagttatggaattttttatattcaggtccagtggcta

SEQ ID NO: 25838 - DNA, 771 bp, Glycine max
  Intron number 1 from transcript Glyma16g26290.1 (locus Gly ma16g26290) derived from phytozome v7.0 (chr-ID Gm16; pos 30423188 to 30423958)
ttaaggtctgttgtgcctaatattagcaaggtatgaaaattttggattcaaagctcttcttctttgtggattattaattctaatgttttttttaatcagcaaatgttcgtgtttgttagttttgctagaaatgttatttggggagattcgaacctgcgacttctccccttccttcaccgattgatcaatcttatatctccttattaatgattaattctaatgttagttcatgctttgttgggttaggagtggttggttacttggttgtgtagactgtagaggtggcaaaatgggcctgtcacatgaaagttaaggcttgagctttaaaatttgagttaaatctgggtcatttttagcgcaattcaatcaaacctgattccggctttggacgaaaaaattgggctttcatctggcttgggcatcattttagaagcttgaattgagtctgggatttttgtgtccttgcccactattattactcaccaagcttggcctgcattgtgcgtcgtagtctgctttgccacctctactaaaatgtggaattattatgatgtgttttaatcatgttagattatattgtgaagtgaggtgacttgtgtttgtttatttttgaagaatcttgtgtggtggtttttatgaatgtgaaacttaagctgtgtgtatgtgttgatttggtttgattgttgttgatttggttattgaaatcaatgatttgctcccttgatgtgtttgggaggatagaagctaatcttcttttgattattttggtag

SEQ ID NO: 25839 - DNA, 778 bp, Glycine max
  Intron number 1 from transcript Glyma13g34460.1 (locus Gly ma13g34460) derived from phytozome v7.0 (chr-ID Gm13; pos 36026525 to 36027302)
cgacactgtatgtaatattacttgcttactttttctttttttatcgctcatgtaagtgagtgaaactaacaaattttaaaatgtttaattcttttgggattatataaaactcatgtccacgtttttttaggtattattgctgccttttacattgaagaaacatataaatcgagcaaataaaatatttacttaaaatatttactaagttgtcattaattacatattagtgtaaaaaaaaaaaaaatactccttgccttatatatttaactggatttggaagttccttacatagttaattgagtttaacttgtttttaaagattttaaaataaagtattattttgatttataataatcaaaaataaaaatttctaaaaaaaagatgatattaaatgagattattctatttataatacttacagattatacctgatttttttttaattttaataatgattatattaaaaatataattaaaaatgagttttaattattttatcaaccatcgtaagtgtattttcttcagagaagaaagtgttcaattcagagaaaccaaatctaggtctaacaaaagagatttttcacttatggtgaaaaaaagttatgggcaaatcaataaatttgatattctaataaatgttcgtttattacgatcttaaataagatacaatatttttcttttgaaatattaacattaataaatattaatttggtaaaaaatgattcacgaagtggtcttttttttttttaatcgatttttttcaaggtgaaggaggaga

SEQ ID NO: 25840 - DNA, 587 bp, Glycine max
  Intron number 1 from transcript Glyma16g26890.1 (locus Gly ma16g26890) derived from phytozome v7.0 (chr-ID Gm16; pos 30990448 to 30991034)
tgctgccaagtgctacacacaattgcacgatacaggtgtttttttttaattgaattctagtttttttttgttctatactgtttgatttacaattagctgctggaagctcaattcttttgctttctttttgttttctataataaaaatgagtttttgttcttatctactgttattgtgaaagccccaaaagataaagattttttttttttggtttgattggtaaagatttaagatcagagagggagtaattggtttgcagttagtggggttttccattctattgtaaatttttatactgaaccatttgcaagattaatcattttgtgatatgaagctttaattcaaatagttggcctttataattcaattttgaattttcaaccgtcccagttggaaagattattcatttattcatttttgcctgaaaacactatgaactttgactcaatttgttgaagaagtaaatgggggaatacctaaagtgagatcaatctttttatgtgtttactcattgtttttttttttctatttgtctttgttattattatttgttgcttatggtggtgttttttggttttagctctaca

SEQ ID NO: 25841 - DNA, 908 bp, Glycine max
  Intron number 1 from transcript Glyma15g03600.2 (locus Gly ma15g03600) derived from phytozome v7.0 (chr-ID Gm15; pos 2501230 to 2502137)
ccaatccttttatcctcatttctggttagtatttatatattttttatttctttctattttctgttcttcttatttgagctgaatttggattggaatatgtgtttcttttgcccggttttgttcttagtgcttttcgatttatggatttcgattgttatcatttctctccatttactagcttattgctttcatggcttattatgaatcttctggatattctttatgtttagattagaagcttattttgttcattatttctctattgatttacaatttcattgaattgccattttctcttgttgtgctcttatatgccctaatctattttttctttttttgtattagtttttgggaagatgcatctcttttacctagctttcagctttttaaagaccaatctgaagttttgttctatactctacagtgctaaaaaatagagtattttgtatttggaattttggattgtctctctgaaaaatcaaaccctggaaatacagttttctggtttgctctaggtgagtagaagtatgcaagtgcaagaacaattggacaggaaaagtctttttctttctagataaaataaaatgtgatactgtatttcttcttatggtttgttttgccctgtaacccgtaacaatccatagctacgatattatttcagatcagatttccattttttaatgctctagaggaggcttttaagcttgagtttgtgcaagccttttttagtcatgactttacctctttatgcatatgtttattggataaatggctttacgtctatctctgttaatgaagctactccaacctgactatatttaagctgattaagaatcctattgtatctctattgaacattatagtatgtaccattgtgcccttttttttttgcagatatccttgtttgc

SEQ ID NO: 25842 - DNA, 521 bp, Glycine max
  Intron number 1 from transcript Glyma15g11410.1 (locus Gly ma15g11410) derived from phytozome v7.0 (chr-ID Gm15; pos 8360443 to 8360963 reverse strand)
gcctagtaaacattcatttcatttctcatattagaaggtctatctcacctcagttgggttccatttataggaataaaaaaaattaaatgaacatctaaacttaaaattgatttgcatatgatatatgttccactagcgagtagtcacacacagaagacaaaatccttgttgactatttcagactctatctatccaatcatgatgctataattcttccaatgaaaacaattattatcctgatcttgattataaaaaaaatgcaaattgtgtacttattaactaaattagttaatttaaataaaaaaatatttttttaaaattatccttcattataatttaatatcaaacttaaaaaaaattataatcttcttgaatgaagaaagttttgaagataatttcatcaaataatatttaagattaaaaaaaatttatcatttatatttaaggtcagagagaatacccattgaatatcaaaacctaacatagatacatgcacttccgatttgtttgtacagttgggt

SEQ ID NO: 25843 - DNA, 917 bp, Glycine max
  Intron number 1 from transcript Glyma15g39370.1 (locus Gly ma15g39370) derived from phytozome v7.0 (chr-ID Gm15; pos 46000163 to 46001079 reverse strand)
cctcgcacccagaaaaaccaacactagtaagattctacggattttcctatttttgcgggggaaagttgtgtgaaaggaaatagaaattgaatttttgaaagtgcgggattggatgtttatggggttttttgcgtgtgtgtgggtgggaggcttttagtggattggatgatgggtttttccattgagtttaatttctatatacatattattggctcttctacctctttatgctgtagaacctgcacaagatcaaagaaaagaaaaacacaacaaagcaacaagcaagaatctacaacatgagtttacgtggttcggcaatgtgcctacatccacgggaaatgcagctcatcatcatcacattgatcatgaaacattacatgttcaatacaagcagcagctagctttgatctctcttggtttctctattccaaaacctctctcaatctcctagctctctttctctattgaactctattttttctacaagaaaactctgtttttcaacctctaaaaaaaactctctctgcattacatgatcaagagtatatatacactctagctatgctttggtgccaagaccaatttagttataataacttaatttagttatgatagctcctcttgaaaccttcccacttgtgcctttagtgattttgagtcacacaccagtataaaagttttttcaattgttagctcattagaaatcacatttggtatgatttttaagttttttttattgaagttatcaagttaacaaacttatcataagtgacgagttttgattgcatgatagtgtaaaaattctttcattgatcagtgcataaggctgttttctcttttgttattttggtgattaatgattttttgttgttgaaatttcagttgattgacccagttgataggacagtagataggga

SEQ ID NO: 25844 - DNA, 380 bp, Glycine max
  Intron number 1 from transcript Glyma15g37760.1 (locus Gly ma15g37760) derived from phytozome v7.0 (chr-ID Gm15; pos 43702678 to 43703057)
ctgccatcttcatcatatgtgagtccaaatcaaaacctctctctctttctctccatcacccatttccccctttcttaattttttgattccccacatgattcgaggcactttcagacactaaatataaatataaacatctctaataaatgagaattcaaacattgatttacctagtttcaattgattaagggtgtacttagattacaatccaaacacacattaatcccatagacctaaaccatgattttttttttctctcttttgcatcatgacgagtttgatcttgatttgatcatgtatatgtgatgtgatgatgcgaagattatgtttttgttttgtgggcagttgtggaatttgctgagagatttgcttaccaaggg

SEQ ID NO: 25845 - DNA, 637 bp, Glycine max
  Intron number 1 from transcript Glyma15g09850.1 (locus Gly ma15g09850) derived from phytozome v7.0 (chr-ID Gm15; pos 7064300 to 7064936)
ttacgagatctgcgtcagttccatagccactttcggtaagacaagttattgatctgaactaccattgttaattttcttccgctctgtttggttactgagaaaatcacactattctgatgagtaatgtggtaaaattgcgtcaggcagctgtttcagtgcagcaccatgaatcatcattgttcatgctacgtgcccacgtaacatgacatgaactgcctcagattttttatttttatttcaagaatttaattaaaatgcagaataaagaaattatcttctatacacgattaacaaaattattatacgcaatcctcatatatgaaaatcctttatagtatacaatatgaatgcacacgttattttatttattttaataatcatttaaaataatttttaactaattaataatataattgccaaaaaagtttgattttaattcttacggataaaaaaaatgtttacgataataataatggctgatatgaaacactttttggataccaaagagagatgatgataatgatactggatatttatgaaactaatttggctccggttgtagtgaaaagtctgagggtgaaagtgtgaaaatgaaatgacaggggaagtgaagaaggtgctgagtggggaaacgggg

SEQ ID NO: 25846 - DNA, 778 bp, Glycine max
  Intron number 2 from transcript Glyma13g33220.1 (locus Gly ma13g33220) derived from phytozome v7.0 (chr-ID Gm13; pos 35097305 to 35098082 reverse strand)
gcgttaacttttcgcaggtaaagataggctgatgatacattggattgagatttgaggatatcaatcatcaaaattttcttggcatgtcatttagagatttctatgggctagtttggataaatttctcaaaaagcacttataggagaagaaaattaagagataagaagaataaaatttctcgtataagttaaaattggtttatccacctcagctttttggtttattttacctcctcttttctcctataaatacttttcaataagtttatccagattggccctatgtctttatgttttttttttaatatactatccttaccagacatctattattaaacaaagggattgtgtttcatggatttgagcattacccctgttaatctgcttcccatcatgagaacaatgtctagatttgtgtctaaagtcaagattatagcatttagtattttagttgtacagataaaaggaacttggttgctgactgggtacatttggacatttggttgaagtatgcattttaaagatataaaatgctaaataaacttctgtagaggaaatgtaaaatgatgcttacactataaaatgatgccttagtatttttttgtagggctcattatccaagggaaatgtaatgcttggcaagttattttaagttaaatatataaatcctgattctggatttagatatttgtgtatgttatttttatttaactttaatacacagacacccaaacacacatggtgctatgtcccaatgtcttgtattatgtacattagcc

SEQ ID NO: 25847 - DNA, 860 bp, Glycine max
  Intron number 1 from transcript Glyma16g28820.1 (locus Gly ma16g28820) derived from phytozome v7.0 (chr-ID Gm16; pos 32775381 to 32776240 reverse strand)
gaaagcccaagttttgtccatttagactttcccatgtaagttaactgaaagccttttcaagagtgtttttggattctctacatcacatctttgttaactgcctggttggacagttcttgattgattatgtgctcatgacaaatagctgatattgcatgttttttatgctataactatatgagcaatatagtatggaaagactgttaatttgtattgtccttattttatatgccctacgtccgatgaggtgtcattttgttctttatcgggattgaaatttcgacactttgtagtagggagttccctttaaattgtaatctctaactaactttcgtgtgttgactgtattgtatagcctcctaaactttttatacctattttctgcaacttcttaatgcataggaaatagatgactgcaccttgaagtattttacttttacttatatgccacttaaatttcactgtgtggctaaaattggtacttacctgagttggcactgcgaattctctgggttcactgcattatagtggcacaattcaggttaattagtattattactatccagatctttatgattttgcatagatttttattaatatccatgctgagttttcttattttagtaattagtgctactgctaacaagtagaggtagtgtagctttatcgctggaaaacatatttcttatttggtgtatgcctttacggttgtatttataaattcaaaaatgctaataaaaatgcatcttttctattcttccttgattgtagactaagagttgaacatttatatatagtaggcttgaaattttaaactcttgagttatttctatgtataaacgttatctgtaaactgcagg

SEQ ID NO: 25848 - DNA, 996 bp, Glycine max
  Intron number 3 from transcript Glyma13g44360.1 (locus Gly ma13g44360) derived from phytozome v7.0 (chr-ID Gm13; pos 43815004 to 43815999 reverse strand)
agtggccctcaaaatattcaaaaattttcattgaggtaagagctgtaactccattgatgagtgaaatgcttgaactatttcaccatctgctcttgtaacctcacgtgattcaattctttgagttgatttaatggcaaattaaatttcattttgttgtggactcataagatctgtattcagttgggatagattctatttgtggcaaccaaaaaattgtatgcaggttaatttgtttacttccataaagcttggtttcatgtcatcaaagaaaattagttttcttgtcaatgaagtggatgttatttattgtattcctccactgtctgttctactggagtttaaaacgttcaagtctttgcacattgttgaggaaatggggagagtgaataggctggaactttattgtttgttgtgttccattaccattaccatgcatggacctttatttattgtacactaggactctgattacacagcggaatttacatcctttgctatgaaggtagtacaatgaactactctgttaacccataaccccaagtactttggctctttacgcatacagcagactttgattgacaaataatgaattaatattttcttataaatctcacaagaatataaagaatattctttgcaattcaaaatattgaaggtcaaatagatccatagaagttatagttggtgaagggagttctttcaataaacatatgcataacacttttggtattggtggggagctgaagggtgtcaacttgattcagttccgtttcttaaaatttttgtggtaaaacatctgattatttcattgccatacatgatagcataatcagtataaagctgtacctgtgtaggaaggtgatttgtctttcaatttttcaattttcttaacatgcccaggagcttgagattagaagaaatttctctccaacaaatatcatcatttgtgaactttgtatgaatattaatcagattaaatcacatttatgcagttag

SEQ ID NO: 25849 - DNA, 810 bp, Glycine max
  Intron number 1 from transcript Glyma16g05610.1 (locus Gly ma16g05610) derived from phytozome v7.0 (chr-ID Gm16; pos 4943178 to 4943987 reverse strand)
ttctgcagccgctgccacgcaaaacagtgcttacggtaaacattagtcttcatcacagctcgtgttgttctctgcattcctcacttatgatgtattcaaagcttttgaaatggttgtgcattttgttttgttatgttccccagttccgcgtatatgtcaacaaatgtttaggtcgcaagttaaacattcacacacacacatattttgtttacttgtcatatgtaatgtctccaacaatttaagaaacaagtttgcatttccagttgccatagtccatggttggctggccttctgcactatccttattagatatacatattcgtttcattttcatttgtaatcgtgtttagtttctctgtaacagaattagcttttctgttattatttagtttcttgccgactcagcatataatattcatctctgtaattttcaatctaatgatcagataacatcttcccctttcttctctcttacctaaattctagtaacccataaagtctagcattgccgttcattcccaaaatagggaaatggctcataatgctgaacttgcacattttccttgggcatgccttattcttattgacattgtttgttgttgtgactacctttcaagtattgtgagatagcagcatcaaggtatttgaaaatatcagtctctttactgatcattgattttttttattttttttaaaatttgtctagttagtttttttttggatgagatatacttccttgaaaatattaaagtcagtagcgtatcctttattgtgttacgtgttccagaatttgccgagtcactgcaggaa

SEQ ID NO: 25850 - DNA, 872 bp, Glycine max
  Intron number 2 from transcript Glyma14g20450.1 (locus Gly ma14g20450) derived from phytozome v7.0 (chr-ID Gm14; pos 23538279 to 23539150)
ccgaaagccattacagatatccttcacccaggtcaattcatttagtagctattttttaattagagaagttgaagttgtttttgaatttcataccattttcatacgttacattctgagtcctaacatcattagtaaaaaaaaaaaaaaaatagtactatttggaatgactttgtgactaaagcaattgttttcaaacactgactggtttgttacagtaacacatctttaatactctttctcattattctgttattgaatgaaatttatgtgaatctattgaatatgtgagttttatttcttaatcagtactagtagatctgcttctaaatttcaattaatagtataaaatatattagaaaagagtgttagatataatatgttacaagatttatcatctcctaacaaaaaaggaaaacctttcacgcacgtgatcttagacaaaagaaaatctaaacacctgataatgatagaaaaaatcttgcacatgatcttagacaaaggaaaatctaaacacctgatattttaattaataattatcagtgatgagcatatccaacgcaggtgctttattaattgcttaaaattaagcaacattacatgaaaaaataataaaagtagagacatagaatagaaatagatataggcaaatattagtttattaactttgtcagaaatgtctgtaagagattcgaacccggacttctcccttcttctattctctcttaaccccaagtcattctttcctcccaccaaattaattttatatctccaagaatatgactactcttcagcaactgcacaatcaaattctggcattaacaatctgaatatacgcagatttggcagaagacaaaagcacctctgtggccgta

SEQ ID NO: 25851 - DNA, 759 bp, Glycine max
  Intron number 2 from transcript Glyma14g07140.1 (locus Gly ma14g07140) derived from phytozome v7.0 (chr-ID Gm14; pos 5293332 to 5294090)
agttgaggccaaagactgcatcacaatctatctaggtatgcttaaaatatgcgataattatgtcatgttactttgtagttcttgatttggatggtttcgatgcaactcgagtatgggatgggggtggtggtttctatggaaattggttgctgaccttataatttttccagtaatgacttgattaagtttttttttttgtttttttattttccctttcttttggggtcttgtgtttcattatctgtggtttacgagttgagagtggtgttgttagtcagcattgaacgtaaccagaaaggtattagttgtttgataagaacatggtctgaggcataggatattgggatatgtaaatagtaatgataatggtaatgcctgcttatcttgatgcttgtttgtttatactagtaacgactacttaattcatatttgaattattgggttctgtagacacttttttaatgtagctcgtagattggactgtgtcagtgagcaagatttctttggcagtagtagctagtatgttccagctcttttcctagcaataggctttctcaagcttagtttgctaaggacatggtcttgctatcagtttctggtcaagttcgtttaagtgttcttttctgctatttagttttcttgcttatttcattgagttgcttgtcagtatgttctgatttgcaattggcatgcatactttaattttagtatctgtataatatctgctattatgtacagtttcaagcaaggaagaattcg

SEQ ID NO: 25852 - DNA, 575 bp, Glycine max
  Intron number 2 from transcript Glyma16g01620.1 (locus Gly ma16g01620) derived from phytozome v7.0 (chr-ID Gm16; pos 1193593 to 1194167)
gaaggtttctcggagaaatcaagggtcacagaagaaagggtttcgtccaaagctgtaccaaacttcccttggtctccttctttggaccaccaccataacacactcggttctttcaatggtgttaaagacattgtactaaaaggtgggatatcacagactaaacttcaaaatttgactttataactacttttttccttttcttctttagtttttccaatctacccttttagccatcgttatcttcctgtttcttttcccttttgtctttattataatcttttattttcaaagactttatatattgtgggtaggttgaatattaaaatttcttacagtttcattgtattcttagctgatgagccatgatggtagcttgtgctgattctgtttgcaacttctggcataacctaggatcatatatctcatgtatcagattaaaagctatgtaatagcaacatactggttaaataagaagtgagacctttaaaattttctaaatttcaatcattagtatagagggtatgcaaaatattttgttagagtaacatttttcaaattgagaaacaaatatcatc

SEQ ID NO: 25853 - DNA, 1017 bp, Glycine max
  Intron number 1 from transcript Glyma16g33880.1 (locus Gly ma16g33880) derived from phytozome v7.0 (chr-ID Gm16; pos 36637051 to 36638067)
ggcgtttttttcttgcttcaggttgattttggtttcattttatgtgtgtaggattttagtgaggatgaaacttagatgcagttctttaggtagttttgacgaggttttaaggaatggtttgtggccgcaaatttggtcgcagcgtcaagggttttgggatttctgtgctgcaattcacagtctgcagctgcagcctactatttgtcccaacatcaaggtttttgggatttatgcactgccaaggttttaaattgcacttgtagttgcagtcacagtttcatcgtgattctcgatgttgcatgaaatttcggacaaatgtgtgttggattttatctggggcaaaagttagttgcagttttttatgtagttttgatgaagttttagaaaactgtttgtaactgatttcggttgcgacatcaaggcttttgggggtttctgcactgtaattgacagcttgctgctgcggttttggctgcaacttttttggcaattgtgtgctgcaattaactgtccattgcagctacaatgtcaaggcttttgggatctccacgaccacaattgttgacacatttgagttcagatgcaacttcagggtatttgggattagtgtgccacagttgacagtctgtctcctattttggtaaacaatatcaaggttttggggatctctgcaaccacatttgtatgcaatatcgaggattacgacagaatcacaatcacaattatggttacatttgcctgcaatatgattacgagggaatctcgtctgtaatttaaaactttttttcttcaatcaaaactagtatttcactttggtaattcacataataaatatttgcattgaaggtcaataatattactaaggtgaaacttcaattctgattggacaacaagagtgaaaacacgaggaactgcagttaaattttgtccttttatgggaggtgtttttctgattagggtctaacttgggttgtttccacaggtgtttttcttcttggattgggtgaggcatttgct

SEQ ID NO: 25854 - DNA, 822 bp, Glycine max
  Intron number 1 from transcript Glyma16g04050.1 (locus Gly ma16g04050) derived from phytozome v7.0 (chr-ID Gm16; pos 3427984 to 3428805 reverse strand)
taggaagttgtctgctgttgatctcgttggaattggtaactactgttctataccacagcctccaagaaagaaggaaaaaaattatactaatgattgtcattgaatgaattaagtagatgtttggtatatatgatgttgtagtgtgtgctttctgtctgttatgacttatgaactagtgatttttgcttttatcttttattctttgctattctttgaagttaatgtagcaagctcctatcaaaatttaattttgcccttcatgatgattttggtgaataaaccatcaatttcatccttgaagtattattactctcttattaatagcccataagtaataatagtatttaagagaaaaagggttatacattgacagtgtaaatccaatcacaactcatcatgtatgttaagtgtgaaattgatgaattttattagggacaaatttgaaaggttttttttttattattttgaggatttcttaacatgatttgtaattcttttcggactacttgagtattttttttttttaaaaaaaaaattagggaccattcaggagagagggtaggataattaaggataaaattgatggtttacttgatttttgtttattatcaagaaacattgtgcaattgccaacttttaatttatgcagaatggcatgtatgatccatgtgactgaccttacctagtgggataaggctttgtttttgtagtgtgtgtttattggctttagcttctttttgccaaacatttcctttcctaaaggtaattgaccattcttgaaaatcaggggttggagctaccataggagctggagtgtatatt

SEQ ID NO: 25855 - DNA, 936 bp, Glycine max
  Intron number 3 from transcript Glyma16g00320.1 (locus Gly ma16g00320) derived from phytozome v7.0 (chr-ID Gm16; pos 90156 to 91091)
cagcaatacccagcatcaagtttaccgaagcaccggtacctcacccaacattctaattgtgcatcacacactcttatatgacaacctttctgtcatttacaactgtaaaatttgtcttcgaagcatttacttttcactttatgtgatttttgtgtatataaattggcatagtgagctagattattttcgtaaataaccttgtgagatctagaaagtgtctagtatttgtagaattaatagaagcatcagacaaattttgaagccagacatggagtggattgctaaatatatgtttgtaacaaaaacattactttctctttgattgaatttgatgagtcaaaagcactgtatctgctggagtcctagcggcaacttcttttgagcatttttttaaaatgaagggttttacaaggattacaatgacaattttaagttttatgaattgcttttctcaccatcttacaacaatccctagtagctctataattgtaaagatctgaatagctgccttggatgctgcacttaatttgtatatcatgcagccaatttacttgttattagaaatagacaagaattttttttaaagcaaaggagactgctaaccagttagggagcaactggttaatgaataaaaaatcgaaagttttcatagtaaagtgtaacatcttatgttaccaatacaccccaccatggtttccaagaaaacccttctatttattgattccttacacttgttagcaggaccccaaagcaaaatccaaaatcaatattaatcttttaccaaaaggccgcatattctttgcatccagttttatttacagcttgaaagtttcatgtcagatgtcttctcttgttttctttcctcattaattgacctctggttcttgtttccacaatgggacaatattttttgtcatactgcagatcaagtgttac

SEQ ID NO: 25856 - DNA, 384 bp, Glycine max
  Intron number 1 from transcript Glyma15g02390.1 (locus Gly ma15g02390) derived from phytozome v7.0 (chr-ID Gm15; pos 1609258 to 1609641 reverse strand)
acagagcagtagcttcacgtctcacccttcccaaggtccctatattgcctctctttctcttttctctcaagatcccaaccccattttttatttatttttcaaattttccgttttgattggttttgtggggtaaaacatattattgcatgaaggttgtttttggtttatttgtacgttgtgagaaatgtttgttttcttcttttaatgatgcacgtgaatccagcgtaaccggtttttatgactcctacgctgttcatagatgacacatttcattgcatgttaagtttttttgtttcgtgtttcaatcagcatttatggttcttttctagcgagactctatttgttgaaattcagtttgtgtgattaaaacatgtgagtagggaa

SEQ ID NO: 25857 - DNA, 910 bp, Glycine max
  Intron number 2 from transcript Glyma16g30450.1 (locus Gly ma16g30450) derived from phytozome v7.0 (chr-ID Gm16; pos 34083826 to 34084735)
ttgcaaaacacctgataatctctcacagtgttctggtacgttcaatttctaattaagccttcctttttcttaaagaacactacactacagtgttatgtttccattttctatgcaatgaatgatctatcagtcttgttagttgtcatataacaacttatgtttttacattcagttgaaggaagttcccagaaggaacagatgaaacggcctcagctaagaatagtgaatcttatatcgggaagagattcttagaaagtttggttgcagttgcagggcttctaatttggctttcatgagcttaactcaaatactacctatatattaccattttcatatcacgttgaaatgtaaaccattgattagttgatactgtaaaaaatatttacactcttgagtgtactaaatctctgacagactcacaatagatattattgcaaaacctttttggagatttattttttgtttttaatactaacctagagtctacagatcaaagttaattaattgctgaaaattatgttcattctcattcttggcgctgttagtccagtgtgaaaacggaaaaattcagtttcatgttatatatggctctgtatatgaaaaggaaattaaagaaaaagtagaatttgattatggctaatttcacccattatatttattacaagaaaacctttatttaaaaattatttttttgtacttttagcttggtcgtaaacattaacattacatcacgcacaaacataaaaggcaaaccaaattattttacatccctaaattttatgaggaaggattctataaatattaacaatacatctcacacacacaaagacaacaaaaattatatcactaaattgaggtggggatagttttgaaaaaaaaatagttggtgtggttgtgtaggtgtgttttt

SEQ ID NO: 25858 - DNA, 737 bp, Glycine max
  Intron number 3 from transcript Glyma15g09460.1 (locus Gly ma15g09460) derived from phytozome v7.0 (chr-ID Gm15; pos 6765741 to 6766477)
cggcaaattctggtgtacgtggcaggttgacagaggtatatatatatatatagaaatattttgtttttgttttcagtttttttataagaaaatagaaaattagtagtatttaatttgcacgagtatcttcaactgtgtgtcactcctttaattaaaggataaatatagaggtataataggtgacatgatgatccaagaggtgtagcttagttggcaatacatgctgaggttgtgggacagcttaaaatacactcttgagaaagacaaaagagctttaaatctgattaaatctcagactaagagttagtctcatcgcatgtcctttgactgaaacttgtgagatatctcgagattctatgggagtcaaagactctaattacgtggttgaaaaaaaagtggcatgatgtgatataacaaaagatctatctaacatttgttatatatatatatatatgttgtacatctatattaaatttttttacttcaaattcagaatcacatatatatggctatatgtgtaatgtggttgtgctgtgatatgatcttagcaattgttttgagtagcagtacaactttttttttatttttgagaaggtgaacatttacatgcatgtgttgtcacaaggcaacctatttgtggaaaatggaaatgcaggggataggcttcctgtgcaccagccctgatgatgtctccacaagcagtgagtcctggtttggtgagggcagacttggtgctt

SEQ ID NO: 25859 - DNA, 1029 bp, Glycine max
  Intron number 1 from transcript Glyma15g13540.1 (locus Gly ma15g13540) derived from phytozome v7.0 (chr-ID Gm15; pos 10138904 to 10139932)
tcatcaggctccattttcacgactgttttgttcaggtaactataattactcttcatatcataactccattcatagtttcttgctactgcagctaactcttttgcacgtcttttgtttttaaagcaaatcctttcctagctacttctattacgtaccccgagcaaaactcgtttatcaaatcagtaataattttttcttttatattagatggttaaaatgcaagagttcgtgaaaacatttctatagaaattttaatgtttttaaattaagtgttttttattgagaagtaatttaaatgaatgtatttcattaatctattatatgaaatacatcaaatacataagaaaatatagaagaagtggttgtataatagaaatagaataggataacaacctactatatagtaacaactatttgaaatataaattaaagataaaatcaaatagataaaaattatttaaaatacaaattgaagataatatcaactaataattaaaacataaattcaaattaagagataactataatatataggttttagctttaagtttcaactaaataagactgttgtataggatatatatatagagagagagagagaacatgcatgtctaagtcgtttctatttttttgcttttaaaatacttattttagaaataattttaaaaaattaatagattttcataatttctgagtaatgtttaagatcatgttagaaaataatttcataaaaaaatgagaacggaatcaatcatgcatctggtctccatctgaaatttttttccgctcaaagttatgaactggggcctctggctcaaccactccttataatgttatgtgtaaaggaaaacgtggttggaaatgtcaaggtttccttatcatatgggcactgataaaagtacgttgaataaaagagaggaaaataaagtgttgctttattttttttgttgctgagaattgaattaattatatatccgcggatatgatatgacaggggtgtgacgcatcaattctgttgaacgacacgga

SEQ ID NO: 25860 - DNA, 608 bp, Glycine max
  Intron number 1 from transcript Glyma16g23080.1 (locus Gly ma16g23080) derived from phytozome v7.0 (chr-ID Gm16; pos 26755962 to 26756569)
tcttattggtctgattggatattgtgaagaaccaggtgactatgaatggcaaaagttccctcttagttgtgtagtataaatggagtcaaaataaatgtcatcagttgatcttctttttgtttttaaggcaataaggcatgctacaacattacaatagtgtctgcgatccctactaggttggcaccccagacactatgtatcacctgaagcacacccaaatattattaataaaataaagaaaacaaaagcagggggatcatgaaccaaacccatgtacaatcatctgaaactaaacgatggaagatcatatctattacagaaaaaattctccctaataaaagtaggtattaaatcccaccaagagaaaccttgtatgtaagtgccgtgagaggcaagcttatctgcacaatttttaccttcacagtaaatatgagagtatctaaaagtcatcctatcagctgatgttcttgatatcgataatatttgttgtaaaagcacattgctttggttctgtttatgtatggataaaaaattctcagtgttgagagggagttattcccacacaattttttgctaacttggtctaattatgtctttatcaggacgac

SEQ ID NO: 25861 - DNA, 736 bp, Glycine max
  Intron number 1 from transcript Glyma15g08800.2 (locus Gly ma15g08800) derived from phytozome v7.0 (chr-ID Gm15; pos 6220592 to 6221327 reverse strand)
tgccatacccaggtattaccaactttctgaattcatatattaactttgtttccagattcaatatttatggggaaaaaacgaaactttgatgtcatttcttgatcatttttttgaactatttttcagttagtattagatttattaaaggtcagcataagttggcgtaaaattgtagttttgatcgaagtacaacattgaaacaattacatttatgtttcgtccaatatggaaacatatttgagcagtggtttatataggtaacattgatacagctttcatatcttatgcctccatttttctacaaaaataatgttaaatagattaacagtctgtttggattcgcggtagaaataaaatctcagggatgtcaccgcgaaagtaattatttgttgcttcagaaaatcacataagttcaactcaccgtgttaacaaacattcactaaccaagtgaattttgaagtgtttgatgaatgggatctggcaataattcttcaatttgattctgtggaagagaccaaccacttttgtttccagatttcacgttgaatagcacaattaagaaacatgttttagcttttactcccttgtatatcagactactcaatttgttttttttttacccctctattattctctgccaaactgtaaggggagatgaccaataaaattcttctagaaagtgtttgataaatgactttcttgtaaatatcactgcggtttttctggtgtaggttcg

SEQ ID NO: 25862 - DNA, 733 bp, Glycine max
  Intron number 2 from transcript Glyma14g05860.1 (locus Gly ma14g05860) derived from phytozome v7.0 (chr-ID Gm14; pos 4236234 to 4236966 reverse strand)
actaccacgcccaatttcaagatctctcatacttggtaattactactaattcccttctcttttgcctagtggaagttgtgttgagtttaagaaacaatgattgagggagaataggaggagtgattttcgaatttctgtgattgggtaattaaatgctaaacattgtgatagagtggattttaagagaaatgctagtagcacactcttttaaacacattgtttattattatttgctgaaatttattggaaattataaaattgtgagacctacttctcatttaatgaattttacttctactaaattttaagtaatagtagagtttattagatagtgtgttgctacttaaacatttcacagttcttcaaaggagtttgctaaagtatttgtggactttgctgtttggattggctatatatgtatgaatgcatggaaaagtcttggtcttgtgaagctttcctgaataggttactgattcagagttatccctttttgtttcactttttttttagtcggtcctgctttgctgttacaatgctttatacccttaacattttatgtttcattcgattctgtgttggtatctatgttatagttggatagatccattatatctcttgtcttgatttacagaattggatttgatttttgctttttattgtctctttcctggaagttctaccatataattattgttgtgtatgattttgtgatgaaaaaacagcgatacagagg

SEQ ID NO: 25863 - DNA, 354 bp, Glycine max
  Intron number 2 from transcript Glyma17g03200.1 (locus Gly ma17g03200) derived from phytozome v7.0 (chr-ID Gm17; pos 2143862 to 2144215)
cctcatttccgaagagctttcttataaagtcaaaggtgtcattgattcgttactttgtttattttattcttcattttgctcgaaatttgtagctgtttgacttgttagggttttcttatcaatgatgttgtgccactatcaaattgattgcgaatctcatcttataagaatattaattaatggaggttaattttatggaaatactttctttgagtttctttttctatcaagttgtaatctgaaatttgtttgtctctgttgtgaatttttccttgtgcttgactaactgttgcgacaatttgttttccttctttaatagagttacctggagttctttgggtgctaccagattca

SEQ ID NO: 25864 - DNA, 1025 bp, Glycine max
  Intron number 1 from transcript Glyma14g01580.1 (locus Gly ma14g01580) derived from phytozome v7.0 (chr-ID Gm14; pos 912902 to 913926)
caggtctttctgaatttcttagctgatttcattgtgactcagttttatttcatgcaactgagtggttttatatctaatttgcataatgtacatccaacttttgtttttacctatgttcatgtattttttttttcttttttctgggattggcttgtgaacttttcatgttcaactcttggtgaatagagctcaactatcttaatcttacattaataattattttcccctgctcattctgtgtgaaatactatttatcgtttaagaatcattggatactccggccttggcggttgtaaattataagtttgttacgttacttctctctctctctctctctctctctctctctctctttacgttcataacctctgttgtttatgttatggttttactgatcctagaaactttctgagacccattttgattttgaattgaactgacacttctctgtttatttttctgcaacttgcattgatgttctctgtagccaattaaaaaaatgacacttgaaatgaaagtatatgaatttgatctaatattcatcttgttttcattcttccttctttggcatctgcccttatgctccagtcttctttttctgttgagtgttgaactataatgcacttcttttatttccacagctgattagaactcaatttatttgagtcttctttagacaaaattatcataagtatttgtaggagagaaaaaataagaaaaagaaaaaaaacaagtttctccattaattaatttgtaaaaattatagtattagttttttcgaaagttgattttaactttatacacaagctaattttgggccctggagtaatattggggacatattcaatgtttacaagtttcccttttgcaatgaaatgattataagatattactcattagtcattaccattgattccaatatccttgttcccaataccaatataaactagacttggtgtacgatccagctattgattgaaactatatcaggtaaagcactggaagaactcagagcttctctctac

SEQ ID NO: 25865 - DNA, 629 bp, Glycine max
  Intron number 1 from transcript Glyma13g38250.1 (locus Gly ma13g38250) derived from phytozome v7.0 (chr-ID Gm13; pos 39080969 to 39081597 reverse strand)
catttttctttcctcaagactcaaaccagccaaaggtattgccttctactgttttttcatcttggttaattgttagcaatatacatgcatggtatgtttttaactttttataaatgtaatgcaccattgcttggcatataattagtgtttcatttctccctccatttaaaaatatctatcatttaaagtcagcccatgctcaagactaagattaagatagctcttaaactgcatcaattataagaggtataattgtacttgactaaattatcttctgctaaagtattcaaaatattatcattccactaatgctctcttcctttccattttgtgaagaactgaagatacttagaaataaaaacaaatatataagggattcttcttcttcttcttcttttttcgtcttcttagtttcttaaagtgacccttcactaaaacaaatattttgaaatttaatatttcacagggagagaagaactataatattgacataagtggttagaatttgcattatgagaagtagtaagctgttttcatattcccagcaattctctgttgtccttcttaaccaaagctgatccaagttttttttccctgaattttgactttaattcaaattagctgcagga

SEQ ID NO: 25866 - DNA, 581 bp, Glycine max
  Intron number 3 from transcript Glyma13g16580.1 (locus Gly ma13g16580) derived from phytozome v7.0 (chr-ID Gm13; pos 20509944 to 20510524 reverse strand)
ctctgttgctgaggttcaaattactactgaatactgatacctctgtttgtctcgtcttactgtcttctcacgatgtaccgcgttaggatactttttccgcgtgtgcgtagtttatgcatgaagaggcagactcaaatgtagggctataagagcatgatttgtgctagctgcatgaatgcttctattgtttcttattttctacttagaaaaatttcttttcagccatttaaattttaaaatgagaaccaaataacaagttcactattgaagatgctcttgaagttttttcccccatcatgccctcctagtcctatgttatgcatttgtgccttttaatgtgtatttgcatttactatcatggtcttgaaggaattaattaattgcatgatgagctagttgtgaacctgctagatgctttataagggttttgtttagggagttatgtgttggcagacgttatagttctttttaatataattcatatgcacgctgaaatgatttttcatgactagatgcaagaatgaaacatattaaccatttggcacaactcctgacagcagttttatcttgcagctgtggtg

SEQ ID NO: 25867 - DNA, 583 bp, Glycine max
  Intron number 3 from transcript Glyma13g28840.2 (locus Gly ma13g28840) derived from phytozome v7.0 (chr-ID Gm13; pos 31806479 to 31807061)
tttgtctggcagggaaacccttgtccgaatcactggtatgagtgtttctcttcacattatcgcaactaataaattatagaccactattccagaaataaaaactatattctttttctttcattttttatgtaatttttcacaatattggctatttctagttgattttatggtgttagagtgaatatatgttgtttttattttatttttaatcccctttagcttttcatgttaatatatacccccttcgtgagattctttcttggcacttaaggtatccatacctcatgatggattgtgttcttagtcatagggcctgcccttctttaaaattttgttttttgttttacattatctttttttttttttttttctattcatggaacctaggattcatttgtatatcaccaagctaactttgtttgctgataaatgaattttgttgaatcttttcttttttagtggatatgctggggatctgtttgtatacccacaaagctaaccttcttcaccaataaatgaatttttgtctgagtattttctttccttcttcactaataatctttgacttctaacttcaggtggt

SEQ ID NO: 25868 - DNA, 712 bp, Glycine max
  Intron number 1 from transcript Glyma16g08430.1 (locus Gly ma16g08430) derived from phytozome v7.0 (chr-ID Gm16; pos 7802434 to 7803145)
gattcgtggctcaaagccgctgaaggtaacggatctcgctcccttagattcgtatcctaaaatcctccaatttcgttttttgattccatcaatcttaccgagctcgtagttttagttgatgttgcgtcttgttgtttttaataatcgcaatgttttgttgatcaccgaatctttgatggatggttaatgctgatgtgttgatgtgctcatgcgttaaattgtgttcatcaaatggttttgccaaatacttttgatattatttttggtgaaggactgtgatgcttataatgtattggaaattaacaaattagggaatggactggtgagtgttaagtgttaatgttttttatcgataaatgttaattgttagtttgttagtttttttgttagtaggagtgattgaaccctgcgaccttttcctccttcccctccttcttaaccacccgaccaaccaaccttatatcttctgtgttaagtgctaatggtttcatcaatgtaatacactaactaagacttgtaattcagtgaaggactgcattgcctattaggagtattgcgtcatttttattgtttaggtgacgtgggtgatggtgactggtgagagggagttacatcgcttgagatgcattttgacttaactctgacgtatagccttttttttggctttggttgatcaggtttatttgaagttgtagatcgacgagcgaaggct

SEQ ID NO: 25869 - DNA, 436 bp, Glycine max
  Intron number 2 from transcript Glyma16g08430.1 (locus Gly ma16g08430) derived from phytozome v7.0 (chr-ID Gm16; pos 7803157 to 7803592)
cttatcagaggagcagggtgattctaagtctccaggtttatattttagttcttttcgttcaccacctagttagccatcaatacatgctgaaaattagacttgggttattgctgcagagttgtgctgccaattttaacctgaatttccgtttcttattctctttctcacaatcttttgcttggtataaacaaaccattttggtttaaaacattaaatgtgtttggttcagcttattttgaagaaataattgcttacttttcattgcctatttttgttagcttccctggagagcttttgaaaaataaggaataatttcccaatattttcattgccgaaaacaaatgaaccaggaattatgtcttttggatacatattctccaatatcagaaatgctaacaaattgttttattgtttcctttttaataaatagcatcaa

SEQ ID NO: 25870 - DNA, 901 bp, Glycine max
  Intron number 1 from transcript Glyma16g23140.1 (locus Gly ma16g23140) derived from phytozome v7.0 (chr-ID Gm16; pos 26831831 to 26832731)
acactcaccagattgcttcctctggattgtatgagaattctccaccccccacttgtcaattttttaacttttacttgttttctcttgttggtaacttttttttggaggaaaaattttctgggtcagttttttctttatcggaattttgtgtcgaatttgagcatggaagaatatgtgtgttgggaaagggcagatgtgatatcctttggaggaaaaaaaaataagcttggaagttctcgtgagaactttatgttaatagagtgaattttgatgccaaagtgtttttgtttgttaaataaaaaaagtttaattatttagtatttttggtagttatagttgtttgcagttctgcactttaccgttttgacgattccatatgtaaaatttgtatgttttaacttttaacacagagtgaatttaatgcgttttggttcctccaaataaatttaataagttttggacctaaagatgaatttttaatgtctttactaatacgttttgatttataaagacacttaatcactgggatcaaaatatgttaactaaagcttacaacactttttacatataggatcaaaatggagacaagtacacaggtcaaaataataattaaacttgaagaaaattgaacctagttttataagaataggagaatgttgtttgtacaactaagagagaaaaaaatttaagatataataaataatatgataaagaatgataaatataaactagtggatgtgtatcagcatcgtatctctaagaaaatttattcttctcactttctgttctctttgaagataacaaagaaaagtgtaatgatgagtattgttaggcattttctatgatgattgtgtactaataatttctccttgttatttggatttcagtttgcattttgcca

SEQ ID NO: 25871 - DNA, 736 bp, Glycine max
  Intron number 2 from transcript Glyma14g37340.1 (locus Gly ma14g37340) derived from phytozome v7.0 (chr-ID Gm14; pos 46639387 to 46640122 reverse strand)
tatctttgattttgagcgtcaagctcctggaacaggtttgcttctgtttaagttgaattcaattttgattagttctaaatcttctactaagtaatttgtatgctttatatttctaacgcattaaatgtacttacttttttttaagtgagtttagttgcatgttatagaaatgtgatttactctttagtaagaaactgataattacagtttccaagttttttaataaatggatttattttactcatttcatttttaattataagatttaaaaaaaaaattatttttccactttcataagtttcttttctaatttttaaatgttttaatttttttttcatattctttcttaattattctttcttcaaacactaataaataataattaactagataaaaaaaattaaaaaaataataattttaaaatgataatacagataatttacaaatttaatgtgataaactaaattaattattcttttgaaaaaatatgaattagttgaaagggttttataattacaaagagaaaaaataaaattttacattcagatgagttactaaatatgtaggtaatactgtctttataaaatagtaagatttatgagaattttatttgatcaatttttccttatatggttgttgtagttatgtatttagctttagatatcatgtcagctaaagagttttaaataaactggtaacagaggtggattcttttggtgttgacacgagttggaga

SEQ ID NO: 25872 - DNA, 981 bp, Glycine max
  Intron number 1 from transcript Glyma13g34780.1 (locus Gly ma13g34780) derived from phytozome v7.0 (chr-ID Gm13; pos 36317444 to 36318424)
acgcctctccctacaccaaccgtcttaagttttgggtaccccttcattatttgtgtctgtgctttttttgttaacttttctttttggggttttgagaatgtggtgtggtctggtgtcaagtctcatttgcttccaaaattttgacatattggtcttgtttgattatcagtttatccctgtctattatagaaatatgaagttagatagatggaaagggtatattgattcataactccgaatttggtattttttttttactttagaaaaaatgacacttctgtttgaggatttgttggagatcttttgaaaccaaaatgatttcccataatctaaatattccgaaacctacatgctatcaaaattacatgaagtttttttaaatgattcttgtgcctcacccttacttttcttccctttcatcactccttctaaaactttatgccttgttgctgtaatttcttttattgttgatatgctgagttagtttctgaacagtagcatgtatgccggtattatatgtgtaggttttactggagcttcttaagcgtgtggaaaaccattctattaatccaacacgaatcaagaacctctatgatatttggtcgaagaaaattggatcaatgaagacctggccagttgaggtatgtttcagaaccccctaatgctttataattgttacctttacgttaaatgttcataaaattcctctgtcaagtagtaactatttctgacttgtaacaagaatataactaagcttaagcaagaacaaacaattttgccttcatttgctttgaatttcattaagaaagagaatagtgtttgataacaatgattggacttctttaaaaaaatctctatcaaaacaataataatgcttggagacaaccaactcaatacaagcccatcagcttgaaagtaattaaagactgaattggatatttcatagaaaatagtacagctattttgtagcaggaacactga

SEQ ID NO: 25873 - DNA, 610 bp, Glycine max
  Intron number 1 from transcript Glyma13g23500.1 (locus Gly ma13g23500) derived from phytozome v7.0 (chr-ID Gm13; pos 26882931 to 26883540)
gttgaacaggtccaccttttttccttttctacttctctaaaagtaactcatttttcaatttcaagtatattgtttatgacctttatgttttagattttaattcatgtttgctttggtgttcatacaaattcaagttgttaattcttcatttgttatccaaaaaacattaataaaattaaaacaatctagagataaaaatatgatcagccacatcaggttgctagtgggggcatgattttgaggccaatggcttagtctacatcaggtttagaccaaacctatttgcacaataagtcaaataaggccttatttaaagcctatttagtaacaaaagttcaagctttgcgctattgaaaatgcctaacagactggcctatttaaacaaagacaagtaatataatgataatatatcgttgttatttttatttaaatttttactgtaatggttcgaaatttgcagtcaaggttctgcttctaatcttgcttgtgcatttatggcagaataacgatggagtttgttgtactgaatacctattgtaattctttccatcttttgctattagcttttctaacatgaaccatgttatagattaaaagagagatatccatt

SEQ ID NO: 25874 - DNA, 459 bp, Glycine max
  Intron number 2 from transcript Glyma13g07460.1 (locus Gly ma13g07460) derived from phytozome v7.0 (chr-ID Gm13; pos 7558871 to 7559329 reverse strand)
attcgctcgggattcctggtaaggttcttatcaatggctagctaggtttgaatttgaagtggttttttttggacgggaaatggtggagaatatgcgttgaatttgatttttatcgagtttattaagtgtgaaagtgggaactgtggtctaaaagatttagggagtgcttgggtgaacatttgcaaaattttgattttgaatgcaatagatttcgtaaaattggtttttgcaaatttgaatgtatgattaaaagttttgaattggcttgatgtgcttcctatcaacttgtattgtcttttatggtctggtttttattttccttttggtttgattttgttacccttttctttttaatcttcttccttaatccccattagaaaaagaaaaaggaaacaaaacaggagggtcagcagtggaagtgaaggaccaacctaatagttcaaagcagcagaagccaaa

SEQ ID NO: 25875 - DNA, 401 bp, Glycine max
  Intron number 1 from transcript Glyma16g30520.1 (locus Gly ma16g30520) derived from phytozome v7.0 (chr-ID Gm16; pos 34122346 to 34122746 reverse strand)
tgtgagttgaatcttccccgtgaggaccaaaagataaaaaaaattgtaaatataggaaccaaaataaatgtcttaaactatagggactaaaagaaaaattatcacaactataaggactaaaaaggtagttaaatcaaaataaaacaaactagtgcaaaataatggtggtgtggttagacacttttattcctaaatgtctcgttgtagacatatatacctctacatatgtgtgcattttgcaaccaccaccattagtggaataaaattttaaatgcaaacccttctatggtatatatcctatataggcattgttagtagtaaataccaaccgtgaaccagaaaattgtggattcaacctttttcgtcttccttcttcttcatggcagtgctatttgcaactc

SEQ ID NO: 25876 - DNA, 430 bp, Glycine max
  Intron number 2 from transcript Glyma15g39750.1 (locus Gly ma15g39750) derived from phytozome v7.0 (chr-ID Gm15; pos 46582727 to 46583156 reverse strand)
ttggtgattctcttcaggtacaacacaaagcatacaattggttcatactgaaaagttaaatgaaaaaaaatcatttcctttatgactttcttatttctttggataagtaaaaaaagaaagaagaataaatacaaactcttctttttaagtacccttttgaaaatgtgtttgtgcaaaaattttagttgacttgttaattgttacatttccactgggtcattcatctccctccttttatcatgaaaaaagattcaaaatgaaaattgaaaagcaagagcaaaaagttttgttttccacgttatgtcactatagaataatgttttattcaaaagaggctatatatatatcattgttatttattagtactataatattttcattgcatgccttttcattttgactttgttttttcgatgcatcaacataggtt

SEQ ID NO: 25877 - DNA, 738 bp, Glycine max
  Intron number 1 from transcript Glyma16g02620.1 (locus Gly ma16g02620) derived from phytozome v7.0 (chr-ID Gm16; pos 2193902 to 2194639)
ctcgcttttccgccacgactccgccaccgctaaaggtaactccgagtttcattttttaatggcttgaattactcatttggtccctgtacttgcacaattgtccctacacaagaattagaaactactcgtcttagttcttaaaatgcactgtttaagaaggtaaaatgaattgagcttctccctagaagttaaaatcaacctattatgaacttaaacttttatagaagctccctctttttttttttttttttatctttctccaaaggctccttataatttattttactttcttattttcttctcttataagaaagtgaagatttcagtgaccattcgaaggttgctttttgcatacgttttagttcagagctaactcaattacttagtttacatgctttttaaagtctttcatatggtatggagttaaagcctattaaacaggctgcccagtgtccacctttataagagttaatcgtaaaatggtgtcgatgtgtattatggagaggtttagatatatgaagaagttgccaaattttgattacttgttttgcttttcttgtttgatgaggtcttgttttcatctttggaggatatcttacctctgctcttgtttttaatatatttacagagaaaagagaaaattttacaataggatgagtcgctgtctcttttgttagttctacatattaaaaacatgatcttgtcactcatattcaggttctttttgttggagccaga

SEQ ID NO: 25878 - DNA, 719 bp, Glycine max
  Intron number 3 from transcript Glyma14g01950.1 (locus Gly ma14g01950) derived from phytozome v7.0 (chr-ID Gm14; pos 1140440 to 1141158)
tggtatgattgcattcacttcttctcatatcatgtactctatttaaccaattaagtatgcagctgggagaatgttgttgtatgtctcagaaatattcctgatttatggggtttttatgtctcagtaattgaaatcaaattcagtatcttgaatgtgtgtagttataaattatttggatgtacattgaacacctaggaattgcttgcagaaatccatgcattcccaagctaatttgaatatctattgtcaacctgagaatattttgatgttgaaaaggagatacttttcatagattctcttccttttggttcacagtttctttcattttggttatgaggagctatgacaagtgtatgacggcaaattctagcgtttctttggtaattccactccagcagtgtaattgaagtaccattagttggtctcactcatgtaacttctgtttcaaacccttaattattttgaaagtttcaagagaaaggaataactagatttcacaaccataatatcaatttagaaattttgtaaattatgatcataagtatgagctgtaccaacattacttctcattgctttgttgtttccctatttttcttgtcatttatgttttgttgatctacttttaactaagttatttgtgtcaaattgattaccttacagtccttcgtatgctgtatatcgcaggtgggtttcttccttggcaatcctggaaaagattc

SEQ ID NO: 25879 - DNA, 471 bp, Glycine max
  Intron number 1 from transcript Glyma13g35750.1 (locus Gly ma13g35750) derived from phytozome v7.0 (chr-ID Gm13; pos 37135851 to 37136321)
cagccaccggaaatccgttagagccagtcccgaaggtatcgtcactacaactgtattactatttatttatctattcattcatttgttttttgaaatttgaaattgaaaaataatcagaataagaaaaggagaactgaaactgatttaataaatgtttaacaaaacataagttcattaaatgattccgtagaatagtagtaagatgaaatttcaattctaataaaagtatatataaattttgatttataaagtacgagatgtaataaatgaagtgattagatataaatagagaagaagatgcaatcgtatcagcagtaatgcattggattttattagaactccgcaaagtgtttgaaatgtaacaaaaaaaaaagaatgatataaatagaggagaagaaaatattgttatatgaattgatgtatggttatggtgtagcaggagggaaggtggtggcgttgggagtggcgaag

SEQ ID NO: 25880 - DNA, 1009 bp, Glycine max
  Intron number 1 from transcript Glyma16g32150.1 (locus Gly ma16g32150) derived from phytozome v7.0 (chr-ID Gm16; pos 35329001 to 35330009)
agggagaatccgttatttggtccctcttcgtccacgtaagagctcaattaccggccttttctttttcagtggtttaattttttgtttgtgtttttgaattagttgttttgttggttttggctttgttttggtgctgaaatccggttaatttgatgaattgggtgtcggttttttgtgatctgcttttgtttttgattccgtggcatcaatttcgaactattctcttaatggattaagtgaatttttgtctttcatgtgtctccgtgaacattgagtgtgctaagtgaagtcaatttttcatttttgattaatgaacatacatagttagaatgtgtttttggtctctcaatttccggctaaaattggtcttagttcttataataggtaaaatcattgtattttttgacatgtggtgaattttgtctttctttatgaaacttaggattttagtgtgagctatgagggacgaaattcacccattatcggagataggaggataaaaattaagaccaatttgacaaaaaataaaaaatgagaacctagcacacagtttaccctaaattaaatgaatagctggatttgctgtcttctattacacaatcaacagcgtttttatttagccttttcaattttggatgcttgatttgctgttgatagtttaaaatcacccttatccttttaccctttagcacaaaataaaggcggtaattgattttgtctttggtgtatatgagaagaataagttattgacccactaagaaaaatattttattttaaagggcaaaagaaagatagtattattgataagaaaatgtggccgaagcacaagatgtgcattcaaaaccaccactaaggaaaataataacacctattttctagccttgatgactgggtttttcctttgttaagttgaagttctttggccaaactacttgctagtatgttggtatagagatttcgtacagatttattgatttaatttttgtttcatttttgaagcttaacaaag

SEQ ID NO: 25881 - DNA, 651 bp, Glycine max
  Intron number 1 from transcript Glyma13g19820.1 (locus Gly ma13g19820) derived from phytozome v7.0 (chr-ID Gm13; pos 23299422 to 23300072)
ctctgtacttcaccaccccatctcttccttttgctcaggtctgttccttctctccaacccaaatatgtcagatgtcactaataaatataaagggtttttctttgtgtgtggcagtgtaccattatcgtcctcctcgccgtttcccacttctgtgctccagacgaattggccatgacaattatgcctcaggtgactaccccatcattcaaatcaacaaaatttgtttgcttttttttactttctcttgtacccaccttgttcaaaatcttaattttcttgtcccacaacgttttcagctgctttctaattatgtatatcagcatagatagtcatttatgttagagttgttatcccatcttggacttggagactagcctagaatctctctctcaattcaatgtgcagaagtaaagaggatcagtgctcaacaaaatgatgacataggcaaagttgagaaatctcccactcaggaatctctgggaaatgagggttacaattcttccgtcagaactgtagccttatgggtgggaagatctctgctaactatgtttttactgctttcttttgttgtttagaatttagaattacattggtttttggttatggtttcttgtaggtgtgcactgcagtggcatttggtgttggtttggg

SEQ ID NO: 25882 - DNA, 738 bp, Glycine max
  Intron number 2 from transcript Glyma17g04430.1 (locus Gly ma17g04430) derived from phytozome v7.0 (chr-ID Gm17; pos 2974818 to 2975555 reverse strand)
agacttttaggctattgcattgaaggcactcacaggtagcatgttgttttgccattttatttgggttaaacatcatgatgtccacttgcctttttattctatctattttggaatcagcagagaggcaaagatgaattgtcatttgtcaccaattgtgcacgcatgcgtgtttaactgtttgtgtctgctgtcatcatcaattggtcatttgatggaaatagtttacaaagtttacaaaataccttttgtagtacattgtcaatctattaactgcaataaacggtgttgagaattatttttagcacagaatttattagttagtggtgtccatggttttattttagggatttgctaacccacactttgttttttaaaagtagtattttagaaagttataatttcgattttttaaaaatactcccaaagtatagatggttaaaatactccttctagaaaagaagtgtacattagcaaaaccccataagaatttgctaacaactttcttcttgatttcatcgtttgattggaataatttacaatcttacaaagtagtatcttgtaaatctattaaccgcaacaaatgatgttgagaatttttttccgcatagaatccattagtaaatagtgttcatggttttattttatatttgcatttacatactactttttgggtactgtttgtataaattggattcttgatccctggtgaattccctgtttatttcaggttgctggttt

SEQ ID NO: 25883 - DNA, 915 bp, Glycine max
  Intron number 1 from transcript Glyma15g41610.1 (locus Gly ma15g41610) derived from phytozome v7.0 (chr-ID Gm15; pos 48739423 to 48740337)
acatttataggtattgtttcattctttctcaccccatgtgaccatatttgtcttcaatttctcttctctgtgctgttttttctttcttatttggacaaaaaacaaaattcaaatacagtttctaggattgtgttaagacttaggaccatttttcaattaaacttgtcatttaatcttggcaaccattgtctttgttttggtaactaaatttggtcgtgattagcttgatataaaaacgaatttgataggaaaataatatcaaaagtaagggcccttgaacaattagctccagagttaaaataagtaatctcagtcgttaaagaaaaaatcaacagttgatattaggtgcatatgcataataaatcataaacatgttagaccattaactattaattcatcaacactgaaattagatacgttaccctctttaactttagaggagccaaatctcaaatgtaattgtttacactagtgtctgtctgtccacactttattgtttagaattggactttatatgcagttagtgcaattttcttctttttttttttatattgagtagttcaattaaagaaaattaattaagtgggaggttgaaacagaatagtggaatgatttgcaatatcagttaagggacaaaaagatccaagaaaatatagagaccaaaagagagtattgctatagtgtatgtttggtgagcttatacagagtaaaagtccaaaagaaagttgagagtaaaagatacaatagagttccttctccagaagtacgttgaacaccctccaatgaaattccaatagtaatccaaacatagctataattgttatagatgtaatgtatctgatttttatcctttgtctttttctgaatgctttagctttttaaggaggttttcattgaaatttggtcatttcaggg

SEQ ID NO: 25884 - DNA, 806 bp, Glycine max
  Intron number 1 from transcript Glyma13g31440.1 (locus Gly ma13g31440) derived from phytozome v7.0 (chr-ID Gm13; pos 33849893 to 33850698 reverse strand)
aactctttggccccgaccactccgcttttttcaaggtttccccttttccattcaaatatcgattttttcttttctgggttccttcccatttcttcaatttttatggttgcctgtggttttgggttctgggttcttgtcattcttattcttcaaccaatgttcacattatcaagtatttgctttattttcccaatttcatgtttttcttatctgtgtgtctgccaatttgcacacctccttgttattatttcactcttttctaatggatgccaactttccttcaattggtttgacaatgtgtgtatttgaaactgagccactactgaagaggaatctacattgatgtagtaatcatatgtatgtataccacttagatctcttgagaaaattcaagttgtacaaatctttcaagtttcaaaaataaagtgatgaagttgatatctttgcagtgtaaatttagactgtcaactaatctgaaatcatgataggtatcccttagtgtaaaagttaacaaacttatcatatacaatacaaccatttatgattggatcacaatgtaaaaaccttttaaactgttagtacataaactatttattaaaaaaaatggccgtgtactttattgttttattattaagtggtaatttatttgaagatatgtacattacattagattatgatatggatttgaaatgtattttaggtggatggataagtttctactaatctgggtagggtgtgttaatatagtgtttgaaatttgtgttgttgcagattagtggagttgttttgcttcagcttggtactgg

SEQ ID NO: 25885 - DNA, 809 bp, Glycine max
  Intron number 2 from transcript Glyma13g28170.1 (locus Gly ma13g28170) derived from phytozome v7.0 (chr-ID Gm13; pos 31233577 to 31234385 reverse strand)
aagtaagtgcttgctcattaactgtttgaaacatacaataatatttagttgtatcattatcattgatataattggggataatatcatggcacaatttgcatgatttaggtatctaggattcatcttccaaagcaatagggagattaatagccatgtaaaacatgggactgaagacgggtggatgaaatggaaaaagcactttatgtgtaatttgtgattacaaagtgccaccaaactcaaaagaaaacttctgctggataagtatcatcagtgctttattatagtgaaagttgcctattggacattgaagcagcaagaagagccaaagaagaaaaaaagcatagcagggattgaggtggatgagtgcagtgacatacaaaaatgggagtttttgaaagttagagtagcacctattaagaagaagctgacaaaagcttacccagggtggtttgatcatgtgaggagaggagtgttagaggcttgttgaaaaaactgtaagataatccagtgaagaggggtagaagaaaacaaacttgcatattcgcaaatttaatccaaaagtattatcaacgagtccaaattaattttggtaacatgtatgttggagtactgttggcagaaaatttgtgatgtgcctcaggcaggatacttctcatttctttttaataaatttcttacatcacagtagaaatgaaatgcttgtgtttgtacttcattgtgagtttgcatatgcatttcttctattttgctttgtttccatttttttatattatgaagattatttaacattcttggctgttttcagaagg

SEQ ID NO: 25886 - DNA, 642 bp, Glycine max
  Intron number 1 from transcript Glyma13g28170.1 (locus Gly ma13g28170) derived from phytozome v7.0 (chr-ID Gm13; pos 31234508 to 31235149 reverse strand)
gaaacaggtgactgcaggacaaatatgcatttcttaatttgtttggttagcatgcagttgatgcttcaaacttaaaagagttttattcaaacaacaaagttttcttctagacatttcagactttgctttgaagatgtgtgttttttttattttttattttctctcggttttaaacatattctttttaatttagaaaaagcactataatggtttaatgtaaataatatgtgtatttgtcttattattagaagatgtggttgatcgttttaaacttgcactttgatcaatttccaaagttggtttatattcacctttcttaccatcttactactataaaacgtataactagaagttaacacagtcccatttcaaaaccttttccttttcaactatgtctttataaatgtatacatgcaattagtttgatatggtgctgcattttcaatataacaacgccaatttcaaagcttttcttttttaaatatttattgactaaaaagtatattatcttacatttctttgtgcatatgaacaaatataatggatgatttacctcaaaaaataagaactgcagaagtaactaataagacttttatcaaatgtacttatcttgcttattttgtgcaatgtttatggcagtgg

SEQ ID NO: 25887 - DNA, 1023 bp, Glycine max
  Intron number 3 from transcript Glyma14g34870.1 (locus Gly ma14g34870) derived from phytozome v7.0 (chr-ID Gm14; pos 43586047 to 43587069)
ccacaccatcgacaaaggtgccgacaacaaacaaggtatctatcgtcactcatcaccttcggttccttttttttctttaccctaattaacaatcagatctacgattctgatgctacttttacatcagcttttacttaaatcttgatactccatgctctaaggttcagggttttagtcgaatagaaaaaaggatttgtaattattgtttattttaattaatggctatgtgatatactattgtgattttttcgttgtttaggttcgagagttactctgtattgatgttgagggaaacattatgcttgttgaggcaacatgggttactgcctcccaaaactatatgcaaagtaacaggagtttgaactttatttttaatttggaccacaaatagactttagtttggcttccttatcttaatgggagatacatgtgcaaagataaaaaaatcatatttagtttatgggcttgagatgatgaaaactatgttctgatttagttcatatttctcactagtcaagtaaacaaaattgttgcttatgaatagttctgtaacttcttcctctaccacaaacgattttataaaaaaaattcacaaaatgaaattgatgtcaatagtgacatatactgacaacttgtgtttgtggtaatatcaatttattctatttttttgtcaataagagggaagagtagattgacaacttgtgtttgtggtaatatcagtttattctattttttatttgagagagctaagcactgctgaaatgaaagtggatagtatataatcaaactgaagaatctactgattttatttatcagtaattacatgaatgagtaaaatgtaagtataattattataaatctgttgttctgcactgcagttaacctgaattagaatttcatcttggttttgttgtttattgaatttatcattgcctctctctgtctctcaactcatcattttgtgtttagacataccaaactttctcagcctacaccattgaagaaagtggcagaaaaattgga

SEQ ID NO: 25888 - DNA, 627 bp, Glycine max
  Intron number 3 from transcript Glyma13g42090.1 (locus Gly ma13g42090) derived from phytozome v7.0 (chr-ID Gm13; pos 42183313 to 42183939 reverse strand)
gaaggctgataagttgaagcaatcacttcctccaggttagttactcacatcacaactatttctgctgacactttttatagctatattatgtgattatggcacttggttttgagtgttttctcttttaattttgaaaaaaaaaaacagagtgaaaatacatttatttaaaatttagaaaacattttctctaaatatattttcaaaaacaggtccaaaactaaaaacaacaaatcaactttttctgtcttttccgaagagctgagaatgttgtggcacggtgacaccgtaaagtactttcttctcgataaatgatttctaaatcttgaaaatttgaaactgaaaattatttttaaaaaataaaaacagaaaataaacgctcaaagccacactaggtagctgaattacataaattggtatatttctacttttgattgtaagttggaataattcttcaaatgggaaagcaaaggaagattgtattgtggacaagaaaatgaaacaccttacattgcatgtctcaaagttttggatgatgtgcttgatgaggaagttcaaatgaatattttatgtcattgtcttataagtataattgtatatgattcatctttgcaggtttaagcgtgcagg

SEQ ID NO: 25889 - DNA, 667 bp, Glycine max
  Intron number 2 from transcript Glyma13g42090.1 (locus Gly ma13g42090) derived from phytozome v7.0 (chr-ID Gm13; pos 42184054 to 42184720 reverse strand)
cctcggaggagggaatcgcagcgaagtccactgtatttctttctattctgattatcttcacctattgttttagcattttgtagtattctatctgtgattgtttcgcattctacgatgtgaaaacgaatgctttcgcatttcaccctttcaatttttttaataatgatcagcctacgcctaacttggatttatcttggacttgttcgttttcatgagttccccagtggtaatgttgttgataagtacaattttgattgtgaagctgagacactgttttaattttaaattaatttgtaaaacattaattgctccaggtcaagccattttgctcgtgtaattctttcagcggtagagattagataccctttaatttgtaaaatgtttgatttggattaacatctcagaaactgagccgaatggcatcttgtgatccatgttgtggacttcacctaatgggataaggctttgttgttgtctttgtttgatttgaactgtgatttagtttagttatggtgaatttgactgtcattgtttctgtatgtttgtttgaattttgccttttctttgattttatactgtgttttggcggttgatgcttacgagttacgtgtggtgtgttgtgttttatgcagccgaagcaaattcacgagattaaggacttcctcct

SEQ ID NO: 25890 - DNA, 694 bp, Glycine max
  Intron number 1 from transcript Glyma15g16270.1 (locus Gly ma15g16270) derived from phytozome v7.0 (chr-ID Gm15; pos 12592613 to 12593306)
aactctcttacacaattcaggttcagtacaaacaggtaacgtgccatctctctcttcgtaaatttggaattctcaacaaaaaaaaaaagaaaattttctgatcgcaaccactgaagccaattgtgtgaacaaaaagcgagggaaatccagaggaaatggatcctaatcatcccatatttgaatccgattgcttctttatacgctgcgtttttatgtgtgcgtatatttgtacgtacttacgtatgtatttggcgaatttatcgtagaaggtttaatttgaagacgccagaactgcatgatgcaacgtttccgcagtttgtttgtattctacaaaagacttcaacttagttagcttttgacttttccttttaattttagtttccccaaacaaaagtttctgcttttgcgcattcacttttggcgttcaccagctttgtagttgtttagagttgaagtgtgtgtaagaattcttttcttgaacaacaacaaataaattgtggtgtgaataatatttttatacgtgtattggccttgcctgtttcgctgtgggcctgtggcttggatggttggatgggagaacaacattggttgttgagtatttatttcttttagtcttccttcctacaggagggtacttatatgtctcctttgcattccagttcaagtgggagctaacaaagaaagcccatcaagt

SEQ ID NO: 25891 - DNA, 1001 bp, Glycine max
  Intron number 1 from transcript Glyma14g13310.1 (locus Gly ma14g13310) derived from phytozome v7.0 (chr-ID Gm14; pos 12631279 to 12632279)
cctctgattgttgctcaggtgagacaaacatatatataatctgtgaagaatataatatctaattgcaattaaatactagaatatatagcagttacatatgtaaatgtaaaatatgtcgtcactgaagaaaattaacttgtttagggtctatgtttttttatcccatctgagttacctgattgattaatttttgccttttctaatttgtgtatcactccattgcgtccctgaaaagtactcttctccccagaattagttataaagaaatgttgggatttgtttttctttctgtaagtatgacagaagttaggatttgtccttgtagttgtataaaaacatggacatgttcccttcacactggacaataagcggggccgtaagatcttcttgtttctataatttatttgcttaatctttgttaattcttgtctttcttatcatttttgaggaaacctagcttccgagaaatagagaaacaagaaagaagaaaaataaaccctcttccttctgtgccctaagtctcttaactatgcagccaaatcacacctcacaactaagtagtatttatcacatgatcaacaatgatacttattaattaactcatgtgggtaggatttgatctccaaatttgtgttatgaaaaattatttgttgaaagaaattaatttctcaaaaatgatttagtccttcaataaattaggttaaattctcaaccgaatgctatgttgtattcacaatacttcgactgatcgatgtactttatttttttttcctactatatttttttttatctatttcgtcttattacataacatatcatctcacctgatacatctttcactcctctgccttctttttctatactagtgtatacacttaaggaggtataacgattatttctcttatcacattaaagttattagaaaaaaatattaaattgattaagtagacactttcccaaaataaatacactatttgataaacataggttactaaatttgg

SEQ ID NO: 25892 - DNA, 747 bp, Glycine max
  Intron number 3 from transcript Glyma13g05980.1 (locus Gly ma13g05980) derived from phytozome v7.0 (chr-ID Gm13; pos 6298191 to 6298937 reverse strand)
tttccggttagttacgttacgtgcctagtcttcatgattttcttgcttttccttcattttttttcatgctttactactcttgatgttcaaattacatcttagctggacattcagctgttcacctttgggtgattatatatgtattctctgagcctgatctattccagttgccaaaatcgtttcactttcatttgtgatggttaacaagaattgacactcaacgataaattatcagtgtggtctgacagtgattgatttttcatgtatagatgattataaatacttaatgcatttttaaaggggggaggcgatgctacaaacattcaaattatatgtgtggagggcgcacacttattgtaaaacatttttagacaaacatccaacagaaattcatcctatcacctcatcatgtcaatgaattggatgatgtactaaaagggtgaattcctattggatgtctgtgcaacaatgtttgacactaatagtgcttataaattaaagtgtatatttacatcattttggaagcttcagtttatattaactgttgataatctttttatttttactttttccattctctcgatatagatgcatgtagatgtagttgattttgatcctttgtggattcgggctttggatatttctgctaacttcaaattgtttactttcttttgtttctactgcagtaattaatgtgtatatatgcatgactttgataataattgtcattgggcatggacaggtgaa

SEQ ID NO: 25893 - DNA, 651 bp, Glycine max
  Intron number 3 from transcript Glyma13g20680.1 (locus Gly ma13g20680) derived from phytozome v7.0 (chr-ID Gm13; pos 24150438 to 24151088)
cttacttgaaacgtgagttaagttgccgttttctaagggtttgttgataagatggtttgatgattgctttagaagaaatggaaattaattatcttaggtctttgattggataaatttattaacaagcatttatgaaatgaattgagtgcataggagaatctcagttcgttttagaaggagtgtattaggagtgtttatggagaggctcatctaaacagttttaataaataattgatggagaagctcaacttattttcttctcctgcctataagtgtttatggagaagttcatcctaacaagacttttaattagtaatatgacttctctatttttactgcataggtgaagaaactaatctcttctttgaagttcaatcggcaggatatatattgtgtcgtgttcttttttttgttttgaatactaagcatgtaaaatggtgaccaagtgaggcttgcaatctatgaaaactaagcaagtgtttagtaataaattaaaattaaaacgagggagtcgtatttttaacttttcaaaagtgtatgaggaagctgcttaagtaattatttctctaaaaataagttaagtcaactatgcataagtccttttttacttttgcagcttatttccttgaggcatataggccagtgaggaag

SEQ ID NO: 25894 - DNA, 624 bp, Glycine max
  Intron number 1 from transcript Glyma16g08900.1 (locus Gly ma16g08900) derived from phytozome v7.0 (chr-ID Gm16; pos 8394862 to 8395485 reverse strand)
aagccctggaaaaaatcaaagaaggtacttctttttatcctttctttacatttttttttattaaatgagatatgaatatatgatcaattttacaacaaaacttaagtgatcctcaactatacatgcttttgttcttttggtgtggttctcaaagttagagttttgcaagactaagttgaatgatgaagtcaacacgagttattgaaagtctaatttttgattcatgagtgtacctgttggcgaggaattagcgactgatcagccgagaaaaatggttaaatatcaaagagttgacttcccatttttttcttcttaatttttaatgggtatgcagagtttttttatatgaaaaaatgggatgtgatcaattttataggctaaatgggatgatgtgatcaattttgaaacaaaacttaggcgctttaactatacatgctttttggcttttggcgtggttctcaaattagagtttaagtaggcattagtaattgagataaaattctaattttgattaaataatgcataattcttaatgattaatgggtatgcagggactttcgttatgaaaatcgggatgtgattaatttgtatttgttttccttttctgtttttgtttcagagttg

SEQ ID NO: 25895 - DNA, 941 bp, Glycine max
  Intron number 1 from transcript Glyma13g25380.1 (locus Gly ma13g25380) derived from phytozome v7.0 (chr-ID Gm13; pos 28628047 to 28628987)
cattttcacacccgaggtaattatattatattaattactattaaattttatttatttatttattattttctctttaagatttaatttttggttcaacctctaaaccgttacggatgacgggtcattattgactgactcattgacctatagtttttttttttattatagttactgttaaaatcctgttataaatgtatataaaataaaatgaatttatttagtcaatgaggtttttagactagactttttttgggtcccacgtcatgcttaataaatataataaatatttctaatgataaaaaaatatattttttttgaaaaaaaaaactgtgtttgttgtgtgttggattttgcaaacgtgttttgcggggaatgggtggttttcaagtgcaatttgttttgttaactttaatgaattagtagtattttactatgcttacatcatcacttgcatttgattgattgagttggcgcaaacctattgctcaatctgatgtgtgataataataactgacatttcataatggctaaacctctctgaaatgtttttttttttaatttatttattaggagaccccttctcttcttctttcatcacaaggcacatatatataaatcattaaatccaataataatgaaatgggtcatttaggtggcacaactagaagttgtgctattaaggcatgtgattatagctttttcattttgcattagttaaatcaattttgcatgctctttggttatttgatgaaacataagccaatgtttttccataggatttatttagttttcaacttttcatagttaaggccttggggactgctatgccctttcaactactctctcttcatgctttgctgcaaaacgtgaaggaaaatcatttttgatgaactttcattctgattgaggtatttcttttttgcaggtttgtaaagccaaat

SEQ ID NO: 25896 - DNA, 437 bp, Glycine max
  Intron number 1 from transcript Glyma15g14840.1 (locus Gly ma15g14840) derived from phytozome v7.0 (chr-ID Gm15; pos 11284403 to 11284839 reverse strand)
tttgagtgttttctttggctctactgcattttgaggtttctgaacttagtcatgaacattttttttttattccttgtttctgcatgcttatgcacaatatttatagttgctgtataagagttgctaactatatgtatgttggtattttattttgtcaatgaaatagtccttgttatgcaccatagatgtttctgcttctgcttgttctgttaacaatcagagttgattaacatgctttttgttcaattttgttttaaaatctaaaagcaccgcaccctctgttctctcttcctttgttttcttttttcctctaggatctttcccactcaaaaatgatggtggttcctttaaaataaaccattctgatagcggtattgtttactattttttcttcaacagcagcatcgggagaaaatctctcaaaggaccacgagcct

SEQ ID NO: 25897 - DNA, 514 bp, Glycine max
  Intron number 3 from transcript Glyma14g25810.1 (locus Gly ma14g25810) derived from phytozome v7.0 (chr-ID Gm14; pos 31318890 to 31319403 reverse strand)
ttaaaagaactcaaaataggtgggcatgcaagtttgattcatttctttttggtcattagactttatgtttcattagacttgtaaaatgtttttgatccctaataaatattcgatttttgcgtttgctccctaataaatttttactttgtgttgagtccctaataaattagcaaattttgtatttgttccttgataaattttttccatttattattagtcaggactaaaacaaaattcgctaatttattagggagtaaacacaaaattcgctaatttattagggattaaaacaaaatatcaaggaccaaaaacaaaagtgttcttttgttagggactcaacacaaagcaaaagtttattaggagcaaatataaaaatcgggtatttattagggatcaaaaacatatttaagccaataatttatattgtctggatttttccttcttctgttttttggtgatggggctgttaacatcatgataattttattgctaatcttattatgaagaaagcaat

SEQ ID NO: 25898 - DNA, 888 bp, Glycine max
  Intron number 1 from transcript Glyma16g26160.2 (locus Gly ma16g26160) derived from phytozome v7.0 (chr-ID Gm16; pos 30334394 to 30335281 reverse strand)
attcagaatcattttctcgccaacggtaccttcgcctttctttattttgatctctactttcggctttctgctatgttaaataaatgtttttttatatgtagaaatccaagagactgtcaataactcatacattctgtatattaatattaataactattattattattaggctaaaatattatttgttctctcatcttatttatttattttaccaggttcccttacatattagactaaattaatcttactaacggttgatgtagtatagactaaattaatgtttttacccccatcgatttatcatagaaaattggtgttaattttgttacatgtcatcaagttttgattaatatgggagtcataaggtggtttggtcattggtgattgtgggatgggaggggcataaggattggagtgataaggaggtcatgagttctaatcttccactaacataacatactaattgttaacatttgccattaaaaaaagtttgaattaataattgggctcaattagttgagcagtgtgcgtgagttgttattgtacttgagtaaacactaacttgatgttagaaagacaaactaaaattaaagtggaactttataaatttagagaaaaccaacagaattttcataaactgaaaaaataatcggagagaaaactatttctctattcttactgctagttttaatcttctgaaaatacttaataaagatctaaagttgtagactcgtagttgtgtcctatgagtgtaattagatatctgaaactatgatatatatagatacactccctgtgcttctggggagaatagtgtcagattagaacatgactttgtttgattttgttttaggtgcttcaagagtcagggattttcccccagagcaa

SEQ ID NO: 25899 - DNA, 967 bp, Glycine max
  Intron number 1 from transcript Glyma14g09860.1 (locus Gly ma14g09860) derived from phytozome v7.0 (chr-ID Gm14; pos 7928681 to 7929647)
actcacaccatcttctccactttcggcaaaataaggtctgtttcttatgtgattttacttaaaaatgattttgaatcgtttttgtgctgccgaattaaccttgtattttaaccttaaagtgaaaaaaaaaagaaaaaaagaagaaagaaacaaagaaaactatgtaagtaaccttccaatccaagtattagaaatcatgctaagtagtcctccaaattggtctttaaatgttagttaagtatatgaaattatcaatttacagactagactaatgaatattcgatacttgggggattaattatatcattttattactttaaggactacttagagcatgtttggttataagttgaaaaaagcaattatgggtgttgaatgtacttttggagagtaaactcattttagtaacatgtttggttacccccaaaagtgtgtttgcagatgaaaattttgtcttgaaactcagttttgcaaaagaaagacttgggttgcttttgcaaaattaagttttactcaaacttgtttgcaaactttaatctatacatgcacttacgggactgggcaatgctttaaggacaacattgattgtttattcttgtgcagcgtatgtgagactgagaattattgtatttaacttgggggtaaaatgcattttaggtctatttcgtcaaaactgattttagtccgtataggattttaaaaatggtgattttggtcttcatgtttctgaaatgaggttatttcatcctttaccatatacttcattttgacttgccagggatgaaacctaccacatttcagaaatacaaagatcagaactaccgtccttaaaatataaagactaaaatcagttttggtcaactaaatattttgggaactaaacacattttatccaaacatagctactgtgttactttcattaatctgattttactttaactgttttggttcttcaataggaatctta

SEQ ID NO: 25900 - DNA, 796 bp, Glycine max
  Intron number 1 from transcript Glyma15g12550.1 (locus Gly ma15g12550) derived from phytozome v7.0 (chr-ID Gm15; pos 9266667 to 9267462 reverse strand)
ttcaccccacaagtaaattctccttttttcttctgtttaccattcatccataaatgggatatttttctttcttctatatccgtccagattgtaaaaaaaaaaaatcatttttttttatatttgttcttcccttaaactcttgatgtttggagtgtctaaaagactaaaacaaaagtcaaaacgttttggttcgacaagtcctaggacccatgatgcctgagtgcattcattttggaaggtgaattatactataacttttttttaaaaaaaactttttcgagattgtaaaagaactcctggtgcagactagatgtttgatgcaagttcatgtagtggattatcaagttctgaagctcttttattttttgttttgttcgtttactactctggagttccatgctttcaccacccagtggtttttggtaatttgttagcatgtgtgggaatctaattgagtgtttctgtgactgtgaagcaatcaggattactttaaaggactatattcgcatcttctagttttttcttttgtccagttcaggaatcattagtcgtacccccttgctctcctcagttaattgtagacactaaaggctatacgatgttttgttgtcaatcatgttagatgtgctattttctctctattagcctggttctgaaattttgttgctttgaatatacgtgcttggctgttgtctgtttataggtaatgcttttgtggattctgtttttttcgtcagttgttaactgttcccttctccccgtgtttaggttccggtggttccgctacaaaaacctg

SEQ ID NO: 25901 - DNA, 537 bp, Glycine max
  Intron number 3 from transcript Glyma13g20730.1 (locus Gly ma13g20730) derived from phytozome v7.0 (chr-ID Gm13; pos 24203895 to 24204431 reverse strand)
gttccaattcctgtatgtttagcctcttttgcttctgtctctttattttttggacccgcccttcaatatatatacccctttaatggtcatttaagtatgaaatagcttatttattatgttccaatatgatattttttgtcaacttatggttataagcttctctctgacctatgttttctactcattacattaattggtatttacagtaagtcatgattgctttttaaattttaattgtgaactactgaagatttaatcctgcagtccacaagttttcatacacaatgatgaaagaagcagcttctggtttgaatcttctactctgatacatggtggtcagttttgggggagggggtggaaggaaaaatgagttttagaagtgctagatgttatttttgtttttgttatgatgaattttatctctttgttttcatcctactgcccaggccatgtagtatggttttagaaagttcttttcttttcatcagttgtatgatttaccatgcctaaaaattggtttttaccctcttttgtagc

SEQ ID NO: 25902 - DNA, 1022 bp, Glycine max
  Intron number 1 from transcript Glyma13g27390.1 (locus Gly ma13g27390) derived from phytozome v7.0 (chr-ID Gm13; pos 30583089 to 30584110 reverse strand)
ttactctgttaacaccactgtgagacccgatccaggtaatagaagcagccccatctgttatctgttataaaaacattttgagcattgttattatttccctgaaaaacctttaggtgtagggtatctgtactatattatttcctgtgtgttatctgatttaaaaacatttaaatgatccttacatgttttcaacatgttccatttggtagaatagaaaagatttagagatgtaaatgagtcaagttatgtaaatgaacaaaattatttgttaattaccttaggtcggcacaatattcagtcaaatttgtttgttaacttaaacttattattgaactcaattacttaaatgagttaaattcaaattttacaaatttgatactaatagcttgtgaatagttcgtttatgcataaatcatacaaaattaatattacataaattctacaatattatatcatatgtttaacacttatttatatttttaaattattatctactattaaaatattttaaattaataaagttgaaagatattttaataaaaaaaatttcaaattaaaaaattgagttataaatgaattaaacaagtaaaactgaaactttagttatttcaaataaaaaattcaagcttttaatctaactcatttaaataaatgaattaagagtcatcaatttttttcaccctgaaaaggataacactctctttataagtgttgcaaaaaaatttatacaaagaaaaaaagttaataaataaataaaagaatataataattaattttataaaattaattttactttattattcttttctttacttgaaacgatgcagcacaacaacattctaaaaaaatatttataggaatataaatagaaaaaaatagttagtattacatttaaaagatagaatgaaaatcttttttctttctaacacttgttataagatgaagagaattctattgatataatattcacaaaaccaagataatataattcttatttttgagaaaaaaagaacacaggaaag

SEQ ID NO: 25903 - DNA, 841 bp, Glycine max
  Intron number 1 from transcript Glyma13g26650.1 (locus Gly ma13g26650) derived from phytozome v7.0 (chr-ID Gm13; pos 29829940 to 29830780 reverse strand)
aaagtaactgatttttctggctggagtttcaatcggtacccccatctaaccatttttttttgtctcttcctgttttcatctgtctagttatatatatatatatatatatatatattgttagttagttcattaaatgttagttacctcttatagcaattagcaactctctattaatagcatgtaaacatactgatagcaccgtggactcaatgctaatcacaggcccaaaaggattattaagaggccacaaggatgggaataatttgttcactaaagcatcagaccattactcgaattctgttagtagtgggtagtattggaatcaatatctgttagtggctgtccccctagtgcttagccattctgttatgtttgtttcgctctttatcattctgttattgttgttcttatcctattagcaaatttaagcctataaatagtgatatatcaatgaaagggggcaagtattagcaagccaaaaccctgtcttcttacctttctttctggaggtatttcctggcctcgaatacaggaagccaatttcccttaagagccatcacatactcatttgcatattattcaatcaatcacacaatacttttcatggtactcctctcctcttctctattataatctttacggcgtatggctacaccatgttggtgttacctgcgtatattctcaaagatatgtatatcaaagtatcaagcacactatgaactaaaccttgcttgttataaatatcaggacatggatatgatgcatttaatagggctaacttcacctaaactcctttgattgcgcaggtccgagaaaacatatcaataccaggttattgaga

SEQ ID NO: 25904 - DNA, 725 bp, Glycine max
  Intron number 1 from transcript Glyma16g05550.1 (locus Gly ma16g05550) derived from phytozome v7.0 (chr-ID Gm16; pos 4856894 to 4857618)
aatcttccctgcttctctcctctctgtatccagtaagttgttccaaactttgtctctctttttattaataataaccattttattcccttcttccttcatttctcaacttgtatcattgtatgtgtgtgtgttttttcttttctcctcccatgatttgggtattttaattttaatattcttgaataaggcatatttgaattgaatccaccaatattaactgtcttttctgtcccacacatgtagatgctccaactgttttttttattaaccttctatttggccaaaccatttcaacatatttgagaatcccttgcaaaattacatttgagacaaaagtaattttgttaacagatcatgacctttgcttttgagtttattttgtttttatttctttgaatttgcattgaaacacgtgtcataacatttctaaggacaaaccaaacatgcacttaatagtcatgatgaaaactgtgttcagatgaggtttttttcattcccaaccccttttatcagagttgaattccatcacttttatgctgttaaaaaaaatgtgccaactatgctcatgtgaagtcccatcctttctcccattcattattacctcaacaagtccatatcataattaatgctccgtgagtgaatgagtcagtgtcttcatattatcactgcttgccagtgtcatggacttaagttgtgaaaatcaatgaatggttggtttgtgtagg

SEQ ID NO: 25905 - DNA, 984 bp, Glycine max
  Intron number 1 from transcript Glyma15g10900.1 (locus Gly ma15g10900) derived from phytozome v7.0 (chr-ID Gm15; pos 7946645 to 7947628)
gaacagcttgtcaacttcatcattcgcccacccaggcacaccatcttctctcctttttcctcgctctctctctgtgctgggatcaactttttcagtcaaagttctttttttcttcacattctcatctgggtgtttgcttatgcttcttattgattttagcataattgtaatcaccactgttctctttttctactaggaaagagcttgagcaagatattagtatattcaatgctttcatttcctttgcatctctatgagaatcatggaattatctttatattttgggggggggggggggggggggggggggtgtgtgcagtgtgctcattctgttaagttgatttgttatttgtttgcttggaaatttgagatctattcttaagctaccttaaaagtcttacttttctgtaatgtatcatgtaagtctttaatccttttcagggtacctataatgtaaatactgatagccacggcaaacttgttctgcaaatttcttccttttgtgcacaaatatatggaaatagtttttattttttaatttatacctacaatcactataactattgttttgtgtgttctgaaaatgagatccgcaaatcatgtatctgaatctcgacatcactagacatcgcccaaaaaaacaaaaaagagtaagaatggagatatcatgtaagggtaattaaaaatcttttcaagtgtcacaatgaaaaggcacatccttctaattttgaggatatcaggtgaagctgagtactttgacatatttttaattgtgcagttatatgtgatatataagcccttcacaaaatagctacattcttgaggtcatctttcttcaactatgtcataagatgaactggcatcgagttctgttatttgcatggttcattaatttttttttgcagtatttttgtttcaaatttaacataaactattgtgctattacgttatgattgtatccgttaccggcatgcagagctaaat

SEQ ID NO: 25906 - DNA, 734 bp, Glycine max
  Intron number 1 from transcript Glyma16g17430.1 (locus Gly ma16g17430) derived from phytozome v7.0 (chr-ID Gm16; pos 18899540 to 18900273 reverse strand)
tgataagtgagtaaaactaagattgaattttgttatatttatctacggtatgtaatggaggaagttaaatgttgggtgcaaaagagcatttccattttgagtgtttggccgaacttttacttttaggagaagaagagttaataataagcttggacaaatactatctaagtattactaacatagaaaataatattgtatgtaatttacagaaagataattttatgtatatattttttaaaatttttaatatatttattactttactaccagtatttttataataaagatgtattcttttttaattgacaaattatttagtttattaattttatttattcaaattaatttattcaatattattgaattccagtcaattacttgctaaaactgaagtctgaaggtttacaaattacaaaatgcattttaaagagaaaaataaaagcataaaatagatatatgaagtagaaaaatcaaataaatcatgtttacagagagttccaatttaatacaacgggctactcaatatgtcttcctctttggttactcttagtcttcgagacaatgggctaagaggaaacttgacagatggagtcctctgtttaccaaatcttcagcacctatatctttcaggaaactgggaccttaaaggccagtagcttccagaagttagttgcagcacaacttctcttggtttcttagatctttcagcttgtggtttccaagggtcaatccct

SEQ ID NO: 25907 - DNA, 609 bp, Glycine max
  Intron number 1 from transcript Glyma13g27090.2 (locus Gly ma13g27090) derived from phytozome v7.0 (chr-ID Gm13; pos 30258921 to 30259529)
tcaaggtaataaataatgaaatgaatgcccttcacttttctgatttgtgcaaccagaaactcagatttgaggatgttattgtattattatctgatctgagggaatgttgaattttgttatacaatgtatttatgttttggaaacaattaggtagttacataaatatggtttcagcttctttgttgtttgaatttgtatcctttctgagattggtgctacacaattcagataactcagctgatttggttatttttatgttttctattttgaattgtttgtgaaatttggagttcaatatgccccaaagagtcaactcctgaagttgtttaatgatcttgttctgcctacgaatgtgctaaccaaattggtgacacagaaaaattatagggtggcttgtgggagagagtaaaggaaataatggttctcttctacatatttttagattggatatttagaagaccacattaatgctggttttttaccttttctatttttcctgactgaatcttaaacttgacagttcctcctttgtgtcactttaatgactattaatctctctctcttccctttgcaggctagaattgttcaccccgataaaaatcctgggga

SEQ ID NO: 25908 - DNA, 509 bp, Glycine max
  Intron number 1 from transcript Glyma15g05080.1 (locus Gly ma15g05080) derived from phytozome v7.0 (chr-ID Gm15; pos 3647276 to 3647784 reverse strand)
cacgccaattacgttcaacaggtcttcttctcttttattttatttttatttacggcttttccattttaaatacgtccctgctgtttatgcgtaaaactccctggaattagaattgatatttatagaagaaatgcaacaacgcatgctcagacacatcgttctactcttcaacacttgaactccatttttgggaaatgcaaacctacttttcatgcattcaaaatctaaaacaactctaattctaccaccattttcatgagtgcacagtagactccagccctaatcatgagattacaaaacttatttgttcctatcctatgtgaggattttagtgttttgtttggtaacccaagaatccagtttacttcatagttcgtaattattcatggtttgctgcttgggttagaatcaacttcattttaaaaaaaataaaaaatctttggtttcttatatatttttcttctctgtgtgaagcctgggtgttcaagtgagctatccggagtagtgac

SEQ ID NO: 25909 - DNA, 905 bp, Glycine max
  Intron number 1 from transcript Glyma14g05760.1 (locus Gly ma14g05760) derived from phytozome v7.0 (chr-ID Gm14; pos 4170291 to 4171195)
agacacaaggtaatgcatattatatagctagctgcaattgttcctttctcaaatcaccaagattaaccattatccttccacttagtcttcatgtttctttaatttcttgttaatcctattcccctctcagtaaaacaattaaacattaattttgaaatttaaattatttcctaatctagtcgctgaggtagtgtggtggctatgtagtttccactttccatgcccgtacaatattgctttcttctttaatatattttggtcatgtacattgaagctatttgagatttctcaatacattgaagctatacaactctgctacttagggccatacttttctacatttgcagcaatagcagtgccactttaatacattacaaattatccaaactttaaaaattctccttaaatcttaagaataatttcccatgcatgcaactatatatattgtccaaggttgcagtgttggaaccgagaaacaaaatcctaacatcaaatttttgctattcatgagttttagtttcaaaagtcgttaccttaaggcgtgtttctcctccttttattgccaattgaaattatacggtatataagacattatatatttattttctacataatcaaaaataaattttatattacattattgcttgcgctctggcatatattggcattgttatataagtaatgcataccaccacaagaccccatttctaccataatatatttttttcgggtgctacaatgaatattaataatggtgttactgttgattaattttattatgcttagtagttatgcatgtaaatgtaacttttgaaaaaagaaaaagaaataaattaacaaatcaatgtcatatttaaaaatgttagtctattcctgtgcagcagaagaaccaaagacacagccag

SEQ ID NO: 25910 - DNA, 991 bp, Glycine max
  Intron number 2 from transcript Glyma15g40450.1 (locus Gly ma15g40450) derived from phytozome v7.0 (chr-ID Gm15; pos 47455034 to 47456024)
catctggcaggaaaggaaaggtttgtgcctcattaaatcttagtacatagttaaaaaaaaaatacgtttttttgtctaaactaggtatgagtcaagtaagtaatcttagtcattgatgagaaaatcaacacttgttcaatacatgcatgttttgttatgtaagtgcagaatgtagatcaataaatcattgattaacaattgaaatatttcacagacacacacacacacacaaaaaaaaatcaacaattaaaattacttgggctaagtttggttttcggatgagagaccttcatcgtctattcaaaaagtaaaaactgaaaaaggctattgtttgattttcagttggattcgattgttaaccgagttttaccacatctttgtcttgaaactcagtttgaaatagagaagaaaaggaagagttgctttcacaaacttgatttacaaaatggatttcattgtaatctaaatttgtaaactttaatccaaaaacacattacattttatcctggaaagtggtttcctctcgaggagctgaatctgttgttgagtggaggataggttctttggtttcagattcttgatagagacaaactcacagtagtagattaatatgataaaatgaaaagaaaatactaatttaaatttactgtcgtgcttgtaattaattgaacatgggtatcacttcatgttagagaataatataaaatcattcacacatctttttttttttcagtttaagcttttgaaattgttagttgattacataattatgttagagtgtttctgattgaggagtctaaagttcattccttattatttccattcttttaatgttgaatttcaagaagagacaaataattttcttttggcacaagaagagataaatagtttaaacctttgatattgttggcagtagttactatattattcttctaactttccaaacatcaattcagggaaagggtgtttaccagtttgtagacaaatacgg

SEQ ID NO: 25911 - DNA, 490 bp, Glycine max
  Intron number 1 from transcript Glyma15g35900.1 (locus Gly ma15g35900) derived from phytozome v7.0 (chr-ID Gm15; pos 40784544 to 40785033 reverse strand)
tacaagggagtatagttttctgtctcaattttatttgattttttcattttattcttttctcttagaactgcattgtagtagatgatttaagttgcatttctgatacttgatttgcaacttcaggtttagctaaactttgaaggtccatttatcccatatgcaaaagttatgtttaacacagtagacgattatctataaaaaacaataagcgtccaatgcatgtgcttaactctaaaattaaatactagtcctagactccaaacttgcggactaattgcatctatttctccatatgaacctaactgggttagtgaatcaattcaaattgacaaaaaattgtctggaagagtctaagtggttcaacaccctcaaaagacattaacttccacagtggttccatgtgacatgaatgtcttttttcttttatccattgtacaccaccaaaaagggacaagggtgcagcaccgtggaaggaaacaaagcacaaaaa

SEQ ID NO: 25912 - DNA, 671 bp, Glycine max
  Intron number 2 from transcript Glyma15g06280.2 (locus Gly ma15g06280) derived from phytozome v7.0 (chr-ID Gm15; pos 4424416 to 4425086 reverse strand)
gagcaaactcatttcggattgttcacggcattaaggttggggcccatctttctctgcttaccttgtttcaatggtgttgtattcgcttactgtttagtcttacgttaattttcatgtctgaattgttcgttcctagatagtgtaactatctgaaaacttccaagttccaatctttactttgtttctaagtttcacagttgatttgtaaatattgatccaacaacggtaaacgaaaatggttgtaaaccttgaatctcccctaaatattgaggaaaaaccgtatttaatggaggaaactgagggttctgaattctgatccctagcggatttgggttgaagattttgcagattcctcatgcttaattgcatattgatattgcaatcttctcttgtttgaaaactccaaaatacctattctataaatgagtctgatgctgtaattttctttctttgtaatctgtatatatggaccctgattcgaatatttgtctaactagattacagtttctgcagctatttcttaaaagtcagaacagttaattatttgaattattcttattgtgatgaaatccattggaggctcctttttttttctttcttcccctcacaaggcttctgtaacttgctctaatgtttgtaggagaaatcaaggtttcactttaaaggcctca

SEQ ID NO: 25913 - DNA, 491 bp, Glycine max
  Intron number 4 from transcript Glyma16g02780.1 (locus Gly ma16g02780) derived from phytozome v7.0 (chr-ID Gm16; pos 2380807 to 2381297)
catcatattatataataaaaaatgtaatttggggggactgtttgtcattttcactctttaagcttgttgttttctagagtgggaaatgttatgtcttgcttaaaactgctagagcttgggacaagttgaatatgattggtggtttctttgcacaaaatgttgagcaggtttgagatcgtaggtattaagttctacaaggatgggggatgatgttgaacctagtgtacagaatgaacaacaacttgttttgatttaggaaagtaagaattgagattcaacggactttaggttgtgtgaagattattctctttctgctccacatgttatctctatggcgtaggatttgaaaagcttgtgaaaatggacacggaaaggcctgtgttaggaaagcatttcttagcaacaatttattttatgtatagatcttgacctgtttagttgatctcttgattgtgtaaatgaagttattttactaattgtttatttaacag

SEQ ID NO: 25914 - DNA, 688 bp, Glycine max
  Intron number 2 from transcript Glyma17g02160.1 (locus Gly ma17g02160) derived from phytozome v7.0 (chr-ID Gm17; pos 1374515 to 1375202)
aagcaccaaatttgaggtatgggctaattctcaaatctcatgtctgttttttagtttatattttagtagtcttctaagttacaagtaatggatacatagtagtttgcctctcatgatatttgattctaactcctctttatttttggatgattcaggccttgtgccttctgatgataagatcaatgtgtatttcttgggaccaaatctgtgtttccttggatgcaattactatatagattaattaaaatttacagagattttgaaaaatatattttatattttgcccttttagccactagctcacaacctttgggttgtattgaatgttgataggttttttattttggtagagaaataatcaaagaatatctatttcaacatgttactgtaaattaaagagttatgattgattcatgaaagcaatgctatcttcataagtgatgtacctgattattttttttttttttttattgtgatgtctacctttttaatttattatttttaagattttgataaattatgccgccagtagaatttggacgtttctttctgctctctttgctctttgccatttctctcttttctccatttctgtgatgccaaatgtagtataccactgggaagtaatactgtttgttctatgtgatgttaaggaatattgcagacaaggttgcagctgctggttatt

SEQ ID NO: 25915 - DNA, 580 bp, Glycine max
  Intron number 1 from transcript Glyma14g03490.1 (locus Gly ma14g03490) derived from phytozome v7.0 (chr-ID Gm14; pos 2257158 to 2257737)
gcgtgcttgctgttcaggtcatacactataaaacaacttcataaacaaacctatattttgaaaatgtttacaagcatatgtaaactagtataatagaagacaggttagaaaactaaaagaattagttttctctttttattgagatgtcaaaaattatgttcgtcatgatttttttttttttatattctctaacaattttacattaaaatcttttttctttgagttttttagtaagtattacaagagtactggttagtcaaatttaatttaatttaatttttttataagatttaaatttaaaatgatggttattcctcaataaaaaagagaaaaaatatattaaaaataattaaaagagaatggaatattaatgataataatagttttataaaatattaaaaatttaagataaaattattaatattaattaatcttactaaattaaataattgaatctataatatataggattaaaggaaggaagtattataaacttttgtcttggttcttaaaggcacgtctcataagacatgtgagttttgcaggcaactgggcttaagtgtgggggtttagtagttgc

SEQ ID NO: 25916 - DNA, 729 bp, Glycine max
  Intron number 2 from transcript Glyma14g11330.1 (locus Gly ma14g11330) derived from phytozome v7.0 (chr-ID Gm14; pos 9836427 to 9837155 reverse strand)
gccctcactggagaaacgggtaaatactaaatgttgtttcttttgctgcaaagcaaacgttttcaagaataatattctattttagtgtcatatttaaaccattatattttattttagtgtcatatttcgtgtttaaccctatgtttggttcattggttgaagagaaaatacagataatgaaatattttttatttgattaaaaagaaaataaaaggaaaaaagaaaagaaagttgacttctagaaacaaaatttgaaattttttttcttttattttctttccaattcatgttttaaatttttctttctttccttattttatttcctttcctttcaatcaaacggaccataagtctcattttaaaagctcctgtgaattgatttcaagtttcctctaacccaactcactataatccacaatcaacatcggactcacttgtatcaggttgtattccattttactatctctagtgctttttcaagtgttttagtttggtcataactcataaccccattgtcattaatacataacaatttaggataaaaaaaaaagtcataaagaccattttcacctgctagataggatgtttgaaaagtcaagttgtacatttttaaaatttagaagagtattaaatgacataaacttaaatagtgttaacttttcttttctcaaaacgtgacacacaatgatattgattttttttgtataattttcaggaacatacgtgtat

SEQ ID NO: 25917 - DNA, 594 bp, Glycine max
  Intron number 3 from transcript Glyma15g03790.1 (locus Gly ma15g03790) derived from phytozome v7.0 (chr-ID Gm15; pos 2656584 to 2657177)
ggggattgcttttaaaagtcagttagtgtcataagctgcattagaattttttttgttttctgaattttggttattctgtttgttgaaggcagtgataatcattcattcattcgtcaatgatactagtgtataggctgggctaagaatgcctttctgaactcttacatatgaatttgccttgatggccatataattataagggtaaatattcctgaaagtgtgaggtgacgacaatttgatcctgaaagataaaaaatttcagattagttttcaaatgtataaaaagtgcaacaaattcatcttgctgttaaatttgtgagaacattttatcaccaagttataataatattcaaagatcaatttgacaccaagttgtaaagtttaggtgtcaatttgtctttaaattatctgcatgattaatttatagtatttttcatatttagggactaaatttgaattttctgtcattcatgaatcattttgtcattgcctcactttcaggcactaaatttgatgtttaccctaattataattcacttaataaactggcttgatttgatatcttacaacttattgcaggcttgccgttagcag

SEQ ID NO: 25918 - DNA, 809 bp, Glycine max
  Intron number 1 from transcript Glyma15g01720.2 (locus Gly ma15g01720) derived from phytozome v7.0 (chr-ID Gm15; pos 1142051 to 1142859 reverse strand)
cttttgctagattgctcgatcagattttgttttgggtaataatttgatcctgtataagctgatttcactgttgaattttttgtgtttgatgaatacttaaaaaaaaaaaaaacttcgcaatcgcaaccaagatatcttattgtggtgtgcttcttaggagttgcaaatttgtgtgtttgtttgtgtttgtggtatcatctggaaatctgacttgttggtttggagcttccaaaatgtatctattacagtttcttcaaccttttttttttttactaaattcgataatcctgatcattacccatcatttgtttgttccaaatttgttttgaagcattatgttatccaggatgtctttggaaaagcttttatttcatcatttgctaaaattgtcatgagattcatcattctaaatttatcacttcagatggaaatttagattcttgtattgctctttgtgcagcaaatatcacttttatttggaatggaaattaatactcactccgatattaactgagttgcaaaaatatcaatagatttgcagatttgttttcttttttgggctagaaaagcatttaacaatttgctaatatttgtaatagctctactgctcatcgttgccaaattttgcaagttccatttccttttataatatctgtgtacttggggaaaaaatagaaaaacaaaaactcttcgagtggctaaatcagtaagcaaatttttcatgctttgattagttgttgtgaactttggtcatgattcctattgtctgggaattaatacaatgctatttctttagctttttgaatttg

SEQ ID NO: 25919 - DNA, 509 bp, Glycine max
  Intron number 1 from transcript Glyma16g21340.1 (locus Gly ma16g21340) derived from phytozome v7.0 (chr-ID Gm16; pos 24105146 to 24105654)
tattgtaactcagacacttcattgctgtcacaaaggttgcctttttatttttatttttatctccactttttttttttttgaatttctcagcttagtttctggggtgcgtccatatcctcattttctggtcaatgcaagtgtaacgatgtacctgcaaatgggtgtttggttctttaaagtttgtgaattttgtggatcttatgtttgatgcttgaagctttttcattcctgggtctgtgtttatcttttcccttcatcattcttgtgtttttgatcaatttgactaatgggtctgatgattccatccttctttgcccttttatgtttgaagactatttttcagctttcaagaacaatcatgacaccttttctctttcgttttgagcttggattctcacataccagcaaggctctgttatttatttttatattgtgtgctcttttgacttatgtttggatctttgtgttatgcagtgaaagaacttgaaggagaaataagagccaaattt

SEQ ID NO: 25920 - DNA, 479 bp, Glycine max
  Intron number 3 from transcript Glyma16g21340.1 (locus Gly ma16g21340) derived from phytozome v7.0 (chr-ID Gm16; pos 24105957 to 24106435)
cttaaatctagtatatttactttttcaattatagggtattacaatctcatatcacaatcttctccagtagattgtaaagtatatttgatctaaaaaagtgatgtttcaaatcgcgaagaaattttacttgttaaccagtaaatcttattttccttccttaatacggttctacaacattcaaataatacttttaaagttataactcacacttgcttgaaactttatatcaactcttggaagtttcacctctaggcaagcatttatccactttcattgtatgcattcaaaacattatgcatgaattctgttcctattgacaatgatcaatcttactctttgcaacattttttttttgccttttccccttgaactgtgtggctaattttatgtcaagcaatgcaattttctgtttttccatgtgcaacattatccattttgtaacttggtaatgatttgtttgttgcagcacgccatcaact

SEQ ID NO: 25921 - DNA, 453 bp, Glycine max
  Intron number 2 from transcript Glyma16g26550.1 (locus Gly ma16g26550) derived from phytozome v7.0 (chr-ID Gm16; pos 30644555 to 30645007)
ttcctggcaagcatagcagatctgggttcttcaaggttagaaagctgactctctctttattttttttcctttgattgttgttttattttgtcttaattaaatgttgaaagatcagaagactggaagagttacattgtgctgtttattccccccaatagattggattttgtgaccccttattaaaattatcttaaaaaacatgatttttagtgcacaaattagtcttactttttatggtttgaatttgagccaattgggtttgtgttttcatattgaattttttctatttcttgctataccccatttatcagcttcattaattttactcatagatctccaaagttttagtagttaataacattgttgaaggtgtgaactttgatttgatgggtttgatttgtgtttggtggtgacacaggagtattgctgtcctgacacttggtgtgtagaaga

SEQ ID NO: 25922 - DNA, 650 bp, Glycine max
  Intron number 1 from transcript Glyma13g25930.1 (locus Gly ma13g25930) derived from phytozome v7.0 (chr-ID Gm13; pos 29161998 to 29162647 reverse strand)
gatttgggcagaccctcctctggtaagcattggagcctggggcactcttcaagaaccaatttcttgagagaggagaggtggcagagacctttgtagagacctctggtttacccacaacttgcagaattttaatttcttccatatgtattttgtgcatgactgcttgcttgtacctaatattatagagaactttgattttctaaatagtaatgctttggcatgattctatttttggatcattgtattttttagttagaaagtcttagaagaagaatcttggttatgttcctcgagtctgatgaaattcacatttttttactgcatctacattcgattagtttgtatgtgcagaattgcattgagattaagtacaatctttcatttttaaatcaccgtaagactggggaatattagtgttaaaatagttcttattatcatccaatgtcattctttaggtatactgtgatgtttataaaaataaaaagattaggaaaattataacaaacatttttgctaaaacaatcttgatatgttttctgaaatacatggatcccatttctttttgaattactgtcaaatatggattacaaatgatttcatgttctcttattttcatgtcataataggctgtcactcgggtaaagccctac

SEQ ID NO: 25923 - DNA, 824 bp, Glycine max
  Intron number 1 from transcript Glyma14g13150.1 (locus Gly ma14g13150) derived from phytozome v7.0 (chr-ID Gm14; pos 12365911 to 12366734 reverse strand)
tacgcgctgcttaacctcggcatcggaaacgacgcgtcggtttcttttccttcacttctctttttttttttgtttcgttttttctgttaacgttttttattttatttttgggatgaattattatgtggtgtcaatttctattaacattctttttttttggttagcttattcattaatgattgatacgtcgcttcgcctttgatcggctgattttttttttggcttttttttcttattttttttaatgtcgttttcgctcgtaaatccgttgattgctctctggccatttaattgttaaaacgacgggttcattttggtagtttttgatttttctgttttacatttccagtttgcatgtatcaaatatttttttattatattaatatacaaaatatagatgttctccggttaattttcagtactacaaatgatgttgccttttattgtttcttgaatttgttgaatatccttgactgtatctctccgtgattttttttcttgattttttaaaattttttttattcggataaaaggttttttggttaattttcagcattacaaatgatgttgtctttcgttgtttgttgtaactctctgattaacaataaaaatttgataattttttgtcatgttttttttaatgttttgggtgtattttcccatgtataattaaatgttttctggctgtttttcagtactacacatgatgatgttgcctttctctctgattaacaataaaagtttgatttattttttaatcttttttgggttttttttttttttacacaggaacaaagcggctattgtgaaaattgggtctgttg

SEQ ID NO: 25924 - DNA, 937 bp, Glycine max
  Intron number 1 from transcript Glyma13g40050.1 (locus Gly ma13g40050) derived from phytozome v7.0 (chr-ID Gm13; pos 40618801 to 40619737 reverse strand)
tttggaagctcgcatccctttctgcttcctcccccgtgagttttcacttccatcgcgccaattctgctgcatttaaaccaagcttcaattcttctctctctccctccataattcaagcatcacttagtttcattcgaatgccatttatttaccgttgctttccctttttaattaccaattgattaattaattcatttctaactaaccatgttactgattaattccgtttcctggatcgaccttctctgttccgagtttccgctcttatatacagtaactcataagcgaacctgttgcttatttttattttttcaatctgctgtttgtttttattgaatctactttagcggttcactttgttaggaggatctcaattagagacagttgatgtgttttagcaagttagttaatatatttttcccctataattacctctttgtattgccttttcagctacgggtattttgaatttgaaggttaggaattaggatgttaatacgtgcttgctaatcattgaaaaacagttgagttgagctttagttaaagcaaactcaatttagtgggaatttgtgaagaagagagcacaggattcatctggaaaattttccttacttttctcgatagatttgcattcaaagttactatcagtttgtgacaagttgctttactttcaagactacagtgtttctttttacaattatatataaggatgcatgcttacagtggaattttatgattgaatgccctgtaattgatggctggaagttttaagaggacaactgaattggtaaccaaagtctcaagtagcttaaagcttgcgtagcttattttcttgcttcctctccgtggtcctttgtaatagttggtatgaagtgcttttatatgtcgatggtgttatgcaggtggaggcaatattagacaaggagaatttcacttt

SEQ ID NO: 25925 - DNA, 909 bp, Glycine max
  Intron number 1 from transcript Glyma13g03990.1 (locus Gly ma13g03990) derived from phytozome v7.0 (chr-ID Gm13; pos 4211078 to 4211986 reverse strand)
tttcttcctccaatttctctggttagtttctcttcaatttaatcatttttatctggggccctttcttatttggttttatttgatgccaccatgtgtgtttcccttcatttgtgcactaatcatgtaacctggtttaaatttgactttttggtggttgtgtatgatgagtgttttcactttttctctttagtttctgaagtatataactgttgttcatgagatgtaacacttcaagattataggctgttcgatttatttgttgttgtctaatccttgggattaaaaaatgaagattctgaggttgccttgcattgaggttgcaaagtatggtgtacaattttacagtttaggagatactttatttggaatcatggttttaaattgtagtcagcaaccgcaattgcagctgcaatgtaaaggtttttttactcactatgaccacatttgcagctgtatcggccgcattttcctccaatttttcataatgtcatggattgacgaaattgcaactgtgactattgagtctatgactgctattcaaaaccatgcttggaattaattaaaatcccttccatttgctttgttgtcaagaataaggcatcaacgaataaggttattacatgttttgacgaaggcaaggaaatttatacttcagagttctgacaagttagtggagccatgtgtgtcaattttttatgtgatattgttaaagcttatactttgttgtctatgttaattgcaaattataagcactagcattgctccataacttctttgtcaattttaggataagatatttccttacactagcattacaagcttttagaaagttaatctcatagctgcttttaacttgcttttcatctaataacaggaagtaagaagcctgcaagtaagccaaagcagtat

SEQ ID NO: 25926 - DNA, 986 bp, Glycine max; identical to SEQ ID NO: 25201
  Intron number 1 from transcript Glyma16g17640.1 (locus Gly ma16g17640) derived from phytozome v7.0 (chr-ID Gm16; pos 19197228 to 19198213)

SEQ ID NO: 25927 - DNA, 400 bp, Glycine max
  Intron number 1 from transcript Glyma13g19100.1 (locus Gly ma13g19100) derived from phytozome v7.0 (chr-ID Gm13; pos 22711776 to 22712175)
gttgttcgtagctcggtaagtttcttctcttttcttgtaaggatctgactcctctagagtgagcaaatcgatacataagaaagcaatcatcagcgacgactgagactacttactttacaccagcttactccagaggagtagacttttggacaaaacttagatacagtactttttttaagtgtttctgaggatgttgtccaattagaattggagttttaccttgttatgcgtatcgtctaggtgaaacttcaattataataagaaagcatagccagaaacacttaactgcttataagttttttttcctacatttttttttaatgttttcaatataaagagagaggggaattttgagggtggtgattaaatggggttgttctgtttttgatttggcaggttc

SEQ ID NO: 25928 - DNA, 592 bp, Glycine max
  Intron number 1 from transcript Glyma13g10490.1 (locus Gly ma13g10490) derived from phytozome v7.0 (chr-ID Gm13; pos 12353940 to 12354531 reverse strand)
tgcatcttcaactctgcaacctcggaattctgtttgtgagtaactcaatcttacgttcgttgttttctcatcatgaaattggctgtcgttatatttattattatttctgctgagtgaaggtgattaaaacttaaaatataagactttgactttgataatgattagtttgtctccttttggtttctaattgctcgttcaggattgtatgagttgagtactacttcattattgaatagggaagtttaagttatggacacaagaagttaggagtatcttattgagtttagtgtttgttattagctctgtggtgtcataaatctgatgctaaggatataagattttgcaattataagaaattaattgttaatcagtttttgaaaaataatacgtaaaaaatgaagaaaaactcttgtttcaagttttgcttgtagactatgtagatgtagataaactgtctatgttcgtttactcatttaatggaattctagaataatataaaaatcttattcaaaaagcatgaccttctggtagttaaatatttcacttggagtttggttcaaaattgttttgtattaatctaactctttgcaga

SEQ ID NO: 25929 - DNA, 807 bp, Glycine max
  Intron number 1 from transcript Glyma13g10650.1 (locus Gly ma13g10650) derived from phytozome v7.0 (chr-ID Gm13; pos 12629433 to 12630239 reverse strand)
agctcaggccagagtactacaggtgaagtccctgcatagatattgtccatgctttatactcaaaacatgccatgcttaaactgtaattagaatcatggttttaaactttaatcgcaactcatgattccaattttaaaaaatcacactatacttcaaaagaaatcatatacggttgagatgatttaaattctcttcaacgggctgcaccttcatgtcttgttttttttcctgtcgagagtagttgtgactcgtaatttaacaccatgtttagcataaagtattaacaaacaaaaaaacatcttttaggaatatgttttagtacctctaggatggtattttttgtttatattcacaggtatttttttatagaaggattggtttgctaaaattgtgatacaagttttggccaatctatttactttttggtaattgatctctgcaaaatcgggatctcggtcttcttcagtttgcatagcaaatggttgctagcaatttgagtttcttaaagaatgagaattaaacctcacaatgacttgagatattttcttgttgctaattcattttgtaattttttttagatactaattcatcttgttctatggaagtcacaactcaccgcatacatttcagaacctaaactccttcagaaattatattcctatgcttataaattgaggcttcaattcctttagctagcaatttgaaatcgtttatttctattatgcaagtggctatactaatatgatgctagcttcaaattctttcaatgtagcgtatcctccaccgtcatctgcacctgctcaacca

SEQ ID NO: 25930 - DNA, 909 bp, Glycine max
  Intron number 1 from transcript Glyma14g09710.1 (locus Gly ma14g09710) derived from phytozome v7.0 (chr-ID Gm14; pos 7773849 to 7774757)
gttttctggtatatatcttctttcctttattatcatttgttgtaactctttatttcatttgaggaaattagatctcttgcaataatgtaaatatcttcaaatattttgttattatcaccatgaaaaacaagcttatcggtttaaaaggcacatggggtgtttttaatattgtgttcccctttgaattttatttgtttttgtttttttactttagatttctttgaagagataaggatgcatgcatgcattagtgatggcagcttccaatccacaaactcttggaaaaaaatcgcattctttgtttttttttcttccttttgtgtatgattttctgtggttgacaagttgtttatgttgttattctgttgattctatttctcacagccaacactactatgttgagacttgagacaactcagtgatgttcaaccgcaaacatgagtccttaaattgtacgaataatttaacatgtgctatagcacggtgaaatgcatttttttttacttctcaagtttgcatctattctaaaattattgctcgggagaaaacggcaacatgcttttaagttttcaacatacacctgatacggttggaatttttatatcagccaagtataccatgcatccatgttagcttcttggaaagttagtagatttactctaaaaattaactcgattcttgaattggaaattaattatctttcacagttcatactagttagtaaaagtgactgatggttgatttccccttcagttttcccatatttgataatgtgtacggtatttttcaaccaaaatattgctctattgtttagattgtttagaatctgatgccttgatgtatttaacctgtcacttttttaataccatctcagatttgattgctaccaactgtggtgataaagctaca

SEQ ID NO: 25931 - DNA, 889 bp, Glycine max
  Intron number 2 from transcript Glyma16g01930.1 (locus Gly ma16g01930) derived from phytozome v7.0 (chr-ID Gm16; pos 1434987 to 1435875)
aaagccaggttggtttgctttattcagcaaattctaacactgcttggaaataataatctctctactagattttttttgttcactatagtatgtattttttaagctttgatattagagggccatttttatattagaattaaaaaagtaactctaggctatagtacatagtcaagatttaatttcaagtaactacttaaaacagacatgacttttaaaaatcttacatgatttgtaaatttaaccgacaatttatgataaaatttaatgaacatttagtcttcttatcctctcatgaaaagaaaaaaaagaatcttagaggatgagattccttatttcctatcctattggtcgttctggctttagaaggtcattgttattggattctttgtctgaatcccataactttttttttttgtcatactattcatggctcaattttctccacttggtcttgcttgatgacaaaggtggcatggaagaacttatttgggcttatgaaagtgactcatgaacctctttttagcttatttcctataaattttgcttggaagcttatcaaaacagccttttttgagttttattctgatgaggttctgcataaagcttatcgataacctcttatatgacttattgggtaagcgtttaattaaatctttcatctaagcactcaaaattcatcatcaggtttcaatccactgctatcaatttcttctgtataattctttataagaaaatgaacatttattttgccgtagaatttttttgctgttaatagaactgttcaggttcaggaaataagtttctgatttgagttggcctttgttttgtgagatttgtatcaaataaatgctgattatcctaaaaaaattgtgcagaggacttttgtttt

SEQ ID NO: 25932 - DNA, 281 bp, Glycine max
  Intron number 2 from transcript Glyma15g11720.1 (locus Gly ma15g11720) derived from phytozome v7.0 (chr-ID Gm15; pos 8640202 to 8640482)
aaatttgcagagcaacaaagtcaagcctcttatcggtatctattgtttacttattctctcaatttcgttcaattaaagagtttaaaaatacttctttcatttagaaacacgagcacactttttctaattggtgatttttgagaattttgttttgtgaagatgtgttcttatttacaacattattaatttgggttcactgttcaggcgaggtgagaattcttatacgttttgtttgatgattcacagctgctgtgcccaaccttgcttgtgtggaaactgtg

SEQ ID NO: 25933 - DNA, 457 bp, Glycine max
  Intron number 2 from transcript Glyma13g43560.1 (locus Gly ma13g43560) derived from phytozome v7.0 (chr-ID Gm13; pos 43205205 to 43205661 reverse strand)
tgcattcgtttgacaccgagcttcttcctcctgaggttgttattttctacaacggaagaactttcatttgattgctgtgctttgttgttctcaagttattatttagtcctgtgaataacagtcacattgcatctgttcaaaaggtcacggctatagtaattttcaatttctttgagtctctaacccttgaaagtgttcacactatgcaaaatttgaattgatgttgtggaaaattgtacgtgcgacaggactttgtgttttttaatttattcattcatttctgtccatatgatgtgaggagcaaaagcattttctcaatctagattttatgagaattgtattcttaagttgatcatataggcttataaaatctttagttaatctgttttgaactagttgtaagtagatgcacatgaaaagatggcttaaatttgtttaaatttgtcgatcctgctag

SEQ ID NO: 25934 - DNA, 1041 bp, Glycine max
  Intron number 1 from transcript Glyma13g20960.1 (locus Gly ma13g20960) derived from phytozome v7.0 (chr-ID Gm13; pos 24450220 to 24451260)
aatcggcgacgcccacgccctccgtctcgctcttggtctctctctctctctctctcttcaatttactgtaataatggatcactgacctgcccttgctataccctaccctagtatatattacttctgccaagttcaatccaaaccctagcaaactagagaattaggtttatctatatcttctgttagaaaattgattgacggatagttactaataagggtgatataaatatttgtcaccctctgtcaaattgtatgaaaagaatttgagtgtcttaaaataaaaataccatattttcattaagcttttataaaaaggtctacatccacgattttgggattttagggttgatgtggctgcaattgccggctgcattgacagcatttattcgcaatatcaacaattgagataaattgtgaccgtgactacagtttaaaaccttgattttcatggactttgaatctgatatgatcctctgtctggtacattagcagtaaaaatttaattttttttttaagatttatgtacagcgtgtttggtttcacgtctctcagatgcagtttttcactcttagaagctagtatttatggcttctaccagtgagtttggataacatacaaaatcaatttgacagcacaggagaatcaattctaacccagaaaaccatggtgataccatgaaaaagtttaagcaactatttgttactttacctattataaaaaataattgattatttctcaccatgaagttaatccaaacacactagcaataccatagaaacatctattcagcaaggaaagttaattgatttttctcaccttgaagatgttccaaacacttttttttagtgaatttgacgtaatttctttcttctcaacatgttttcaaatacacatttaatttgtagagaatgattaaaaatgactatgatttgatttgtttgatatctaaatacattctcactggcatactgggactgggtgcccttttttttatgcttaccctcatgctatttactgcagataacttgactggtagtattg

SEQ ID NO: 25935 - DNA, 839 bp, Glycine max
  Intron number 1 from transcript Glyma15g05930.1 (locus Gly ma15g05930) derived from phytozome v7.0 (chr-ID Gm15; pos 4222961 to 4223799)
gtgtgcctacttggttccttcaagatttcattcaagtaattaatgcctttgatttgcttttctttcttttgggttgccatattctagatgtttgcttcgtgttcaatggaaaatatatgatgaataattaggacactatttgagatgatatatccaccctcttagagtatgtttggaaatcagctgaaaaattacttttgagataaatgtactttgatcaaaggatcatgtcccttttttcttttattttacttttattcgttggatctatattggaatgcttgtcataacaatttcaattgcaaatcaaacatgcatataaaaacggtcatcacgatttcgacagcaacgtcaagattttttgtgtttgtgactgaatcttgacgcctttgtgaccgtgattcgactgcaatatattgtggccacatcaattgcatttgtttgcaatttcttacaatatcaaggatcgaaacgaaaatgtaaccacagtttaaagccttggatatatcgtatatgatatatgctagaagatacccataaaaatgtgaatcctgcattagcattcaactctgggtggttgtatacgatctcttttgatttgtagtttacattcttttatgtatatcaaaatttacttgaaagttgaaaattggcctcagatatgaagtttgattgtcttgtactagtccttatggcgtgaacttaatactgcactctctctttgtcatgtgaagcaatcagtttttattcaaggctcatctgggtatcaatattcaccgattttggacgttacacctctacttttcaatcatgtttgtgtttattactttggacaggtg

SEQ ID NO: 25936 - DNA, 542 bp, Glycine max
  Intron number 1 from transcript Glyma16g27940.1 (locus Gly ma16g27940) derived from phytozome v7.0 (chr-ID Gm16; pos 31880567 to 31881108)
agaaaggggttcattttgctgattctctagctgtacctttctctgtctctttgttgtttcttctgtcaaattttttgctgggtttcaagggaaagggaaatttgtgcgttctttgtttagattctgtgcgtaaagggaattaaaaattctttcttttgatttttctctattgtctcgtaagatttagaggtacaattttaatagggtgcttcgatttttttattttttttgtgtagccgacctaattgatttatttttatattgtataaataagttgtgatttctgtgttggcatagctcagtttattgggggtgtcgtggtttcaagagatagattaggggtaattgttttgatgtatgaatcataagggaacataaaaaagagaaagtgttgattgaggtgatttttgaagaagggggtttaatctggtatctgtaaatggtctttgtatgataaattttccggaatggtccttttctcttgcaaaattttaatcggattgtttatgcaggctgctaagattctcgcaaacttgattgtg

SEQ ID NO: 25937 - DNA, 787 bp, Glycine max
  Intron number 4 from transcript Glyma14g17070.1 (locus Gly ma14g17070) derived from phytozome v7.0 (chr-ID Gm14; pos 18599909 to 18600695 reverse strand)
tgacaacgtaagaatcagtgattgtatgtaacttattgaataatatagaattattttttcctactaattttattttacttttgtggggatggcactgttgaaatatcatagatttgtcaaatatgttgaaatttcctcttttatttttgatccttccctttcccacttttcttaaaaatacaggaaaatgcccaaagaacaattatcttgggaatgatgttcatgttgctagcatgtaaaatatagttgttttttggctgctgtagattcttcctgcaaaatgcatatttgatttttgtttcctctgacaatgtatttgatattaccaaatgacactattgattatctttttttgtactaaattggctgttacatttgtctttaagtaccgtttggtattgatgataaaattaatggtactggttgttcagaatccttttctcgttgtcggtcaaaagctaagatgcattggcactgatatggacagaggacatgacagtgacacagacgcagcagcacaacaaaatttgatgtgtccatgtctattttgtagtgtcctgttgtgtagtgtctaacacgaagtgtttggcatgtttctaacacggcctttcttgaagtgtctgtgcttcatatgtcagaagtgaatctggtattttatgatcaaatgatcccaaataatttacttatatcttctacattcatattagatatgtatgtgaccagtagttgttgtgtttatgactgttacatattttttaattttatcttttctttgcaggtgttcgca

SEQ ID NO: 25938 - DNA, 891 bp, Glycine max
  Intron number 1 from transcript Glyma14g17070.1 (locus Gly ma14g17070) derived from phytozome v7.0 (chr-ID Gm14; pos 18601463 to 18602353 reverse strand)
tgcaacctctttttcttttccttcttctgtgaaaggtaatcattcattcatcctactagaaaataaaatatactgaaattatcaattaacatatcactaattcttgttgaaaattaatttcataaaaaaatattctataaattatttgatttcatatagtattttcttcttcttcttcctttttttttttttttagtgattctcgatcttacaggtagcgtcacaacagtattctctctgccttgatataatgattttaggatcatattttcgtatttgattaattttattattaattttttgtttattgaatcttacgtgtgcttcaaatttcattgtgccttcgtttctccgttgattttttttttttttttttgatttggctgtttggaatttctagtgttcttttaagctctttgtgatatttatgtaatttgattttttcttctttgtggtgtgcaatgaataatggtgatgaagaaatgaacttatggtaatgtgtttgcaaagacacaaatttagccactgtttcgtgtaaaattttctgcgaaaatttaggttcattcgtttttaaatgatatttgctacgtaatttgttatgtaacaaaatgtgatttcattggtagtatatgcaatgaaccagtattgtcctgtgctgtactttgcattttttttagtttcattgctagcatactaataattggtgttggatcatgagttaaaaagatgaaactaatataactgtttgttgatatagtttggttcaattgtgctgttaattagagttaaaaaaaatggatgtggaaatactgtcttagctcatcttttcattttactcaaggaatttagtttcctgtcccttttttaggggttaggttttataattgtaca

SEQ ID NO: 25939 - DNA, 779 bp, Glycine max
  Intron number 1 from transcript Glyma14g31390.1 (locus Gly ma14g31390) derived from phytozome v7.0 (chr-ID Gm14; pos 38166957 to 38167735 reverse strand)
tcaagcgggtacgtatgccttaattatcttaacatcaatcacatattcaaattctagatactttccttgattttatctatatgataacaattcatttcttacctttatttagtgcactagtttgcattctggacttcgttttacacccaaatgtccttcacatagacaattttaattaattgaactacctctataagtagtttttttgaggatttttttttattatgcaatgtttgattatctcttgtgtatttttcaatttagcttttcttacaaaaaaggttatctataagcggattacaaaagtgtacttgaactaggaagttgcaaaaagtttttatgtattagctagtagacaaatctaaaagcaataaggaaaataatcaataggcataccaacacaggataacacctaaagagaaaaagagacaaaaatataatatgataactgatagaaagtgagagataaagagtaataataggtgtttctcttcaatacccttagatatgtattcttgaaaaattccttctaggcaacttatatgtatatgtaacatctttcatttttttttttatcacattttatcatactatatcacctattatatctataattttctttttttattctctctctctcactaagtgttgaatagaatattgagtgtctaaatgtatttttgctatgtatattgtgattttctgtagtggtacttgaggctaattttttcctcctatatatagggagaccaagcatcaataattggaggtgtgattga

SEQ ID NO: 25940 - DNA, 956 bp, Glycine max
  Intron number 1 from transcript Glyma13g36430.1 (locus Gly ma13g36430) derived from phytozome v7.0 (chr-ID Gm13; pos 37719194 to 37720149 reverse strand)
ttcccgttactcgatttaagatcaaggtaaaaaaaaattcttcccttttttgggtttaatatatttttccctatttttaatatgtgtgtctttgttcattggtgaataggaaggttgatggaaattggtgttggtcttttatgagcaatgcatgtgaatttgaggttttgtgaatgctttttgtgatttaagatacacacacatggctgttctttctttctaagctatattgagcttgctaagtgaataaactggaattgttcatttgggggatagctgatgattttagataattgaaaatcatacatgagggtaatgatggattgttgacctttactaagttctcaacaatggctttgatgttggtatcttttgcttgttatgtatttcaaattcagtgatgtcaagtatcaattttaatgaaggaaacttgattcacttacggcaacttattgtacagaaattacatatcataaatgtgaaattgaatgtaaacgttattgattatatatgattgtctctagttgtgtggatataatcctgatattagttgcatgaattagaagcacttaatgagttatataatcaagtagttcagtgaaacactcattatattaagatttccatttttgtttttttttttttctgttataaataacgcagcatatggactgcttattaagtgcttgattgctcagttacataagtaacttataagagttctaaatctgagtatggataaaatacactttgtaatttatgatagcttttgtcttttttgtgattatttttggttgtggttttttgataaaaaatgaaagaaagaaaattgtacgccttcagctgagaactttcacatttagttgaatttttaatctagtaacacttatataatgttcatttactttaacttcttgttatatggtccaggctggcaaaacactaagtgcaagaaa

SEQ ID NO: 25941 - DNA, 916 bp, Glycine max
  Intron number 1 from transcript Glyma14g37660.1 (locus Gly ma14g37660) derived from phytozome v7.0 (chr-ID Gm14; pos 46972208 to 46973123 reverse strand)
caactcgtccgagtcattcccgttttacgctgccggtatgtgagttaattgatttgttacatgtttagctgttacttttcagtttttaatttctagttctcgtttctgacctagaaattgcttctattaatgaagtgagcttctcttataaactaaaatcaacttatgcacttcagctttgagagaagttaaatgagtactagcaaattgatgttggaaagaatagaagcaatttgtgagtgaaatataagataattgctcgcgattattgatgtttgtaagaacggaagcaaatcaactcattagtgttaactggttttgcacaattgcatttcgcacagaatgagtgaaatgttgcaagaaaagatgatgtttgaattgcattctaggctttctgtgggtgtgatttttaaatttaaaaacgtgtatatatgaattgtgagtattgcttagcaacattggatgttgttgattttaactgctccttttggttcttcctttttttgttagtttattgggctatactcatttatagagttttaagacttggggactgcacagattacagggttttgtttaaatgggcagaatgaattttgcgattgtgtgtgtgtgtgtgattgtgttcctttagaaattaatttcgtttgaagcatcatacagtgatatatgaagaacagagtttatagttgattgtagtaagaccaagagatcagaaattgatgtctatgtgatgatgacaagaaccatgggcagtatagggctactagaaccagccatagtatatactcttaaacatttatgtgttattgatttgggctttatactgttttgtaggcaaatccaacaattgctttggcttgtacttgttggcttcacgtttaatgttggtttcatttttttatcaggctttgta

SEQ ID NO: 25942 - DNA, 915 bp, Glycine max
  Intron number 1 from transcript Glyma15g37490.2 (locus Gly ma15g37490) derived from phytozome v7.0 (chr-ID Gm15; pos 43351623 to 43352537 reverse strand)
tctctctctctctctctcactcttacaaagcaaaggtgcatttttttctcttttttttttttgtctttactattgtatttcattcagttttgcaattattctgaatacccttttgagtttttctggtagtattgccgttacttcttcaaatttagcgttgacccatttttcattatcttggttttgattcaccactttgctgggattggtgtttctatgtgtaatttgatccaattccttgaaaatcaccatgcaccctttattattgttgttgttattttcccaaaaaaaaaagaatttttttacctaccaatattgattctgggaatcctcaatgggaaataaaaggaatgaaaatgaaaatggaatcttggttgcttctgtttctgtttgttactttaggtaatgttagttaaatgtggctctttacccttttttttgtagtgtttcccaagttttgaatttttatcctgaacagtgtcttttcttcattttcaagatttttatgctttattacatgcagtgctaaaattctatcctttctgcttatctagcgtgttttcttctttatattggctgctaagagcagtgaaatcttaagaggtagtaattgaagtggttgattaggaccacataatgtaatatgttgcaatcgcctgttggtgtaagtaaattgatggatttgtttcaaaatctctggttgaattataatctgatctgaccatttaaacattgatcctacttttatgaagttgcaatctgatttgttctttaacttgtcttagtttggtaattggatgcgttgaatgaaacttcgttagttcttctgctgaagaagtgagaaacatgtattctgatgaagaggtgtttgtttattcagagtagagtttgttcattgaagaactgagggaggtt

SEQ ID NO: 25943 - DNA, 413 bp, Glycine max
  Intron number 1 from transcript Glyma13g05610.1 (locus Gly ma13g05610) derived from phytozome v7.0 (chr-ID Gm13; pos 5963222 to 5963634)
acccacttcccgattcccacaggatcattgtcaaggtaacttcgtcattgaatcaccgccaaacccttgttttgacagtgaaaatgcagcattttcccaaggttttaaattgcggtcgcagtttctatcgcgttcttgatattgcgggaaattgcagacaatgcagctaatacgaggttgtagacacccccaaaaaacttgactttgcaataaataaataaaaaaacttgcactttccaaaatagaaggaagaaaattgaatcttgtgaaaagcattgaatcttaaatgggacagtcgtacaatgtttcttaatcgtttgtgatttgttatgaggcgtcctgtggtttgttatctctgtgggattgactttgagattgtgtttgtgtgtgtgtttgccaggtgacgtcgcctc

SEQ ID NO: 25944 - DNA, 359 bp, Glycine max
  Intron number 1 from transcript Glyma13g17770.1 (locus Gly ma13g17770) derived from phytozome v7.0 (chr-ID Gm13; pos 21490807 to 21491165 reverse strand)
aacatctgcaagggatcaaaagaagtctcaaacaggtgtgtttacacactacaattcttcaacttactcttcttttttatttttctgcacaaacaaaaacattattataattaattgagtaaatgatggtaattttttttattaactacggtggtttaactttcaaaaaagattttatactatcatttaatcactagtcactactcaaagcgttattatataactgttaaaataattttataaaagtaaaaaaaaaaattctttattaattaaaattttacatttttcatagactgaattctaatgtattgatgagatgatatggtggtatggggtttgcagagcaagagaggcaagta

SEQ ID NO: 25945 - DNA, 947 bp, Glycine max
  Intron number 1 from transcript Glyma15g39350.1 (locus Gly ma15g39350) derived from phytozome v7.0 (chr-ID Gm15; pos 45959272 to 45960218)
tccgccgtactacccggggtaccaagccgttcccggtatggctcttcccttctgagttctcttcattttttttaatgaaatttttggttaatttaatttaaattatgggtttgatttgaacttggaaatgaaaggtgcgaaatttcgtgtctaggatgatgttttgtgtgatgggttggatcaaagattggaactttcgagatgggtttggctttgttgagttctgtttggtttgacctgcaatagagtgataggtcaactgcgtgtctgtgtgcaattttggggtttgaggaaaagtttctgttcttgggtttacttgattgttgtgagtgagtttttttggtttgtttttcttttctcagtatgtttgattgatggaggttgagaatgattgtgagtgtgtgagtgtggtgatgggagtgatttggaaaatgttgttggcagtttgatgttgtagaatccaatggatttggtggctgttgatggtgattcagggttttggattaatcactggtttgtctgtgattatttattatcccacatcatggttttaagctttctacatgttgcctatatatgatcaaagtggtgggattaggttacaggatcatttggcaggttgatagactgcttggagaactagatctacactgtttgataattttacaattctgattgagacttgtatatgctctttcactaagagtcatgttggtgttatgcaatccatgtttttacattaaaatgaagtaataacaaatcatgcagcacttgcttggtgaaagcaaagctggttatattaggagatgattatgagcagttggattttgtatttgagaatctgatggatgttagtttgataatgacatctctttgtagtgtaacgggctaaattttccagcctgcaagattttgatatggtttcctctgtgatattgattcaggtt

SEQ ID NO: 25946 - DNA, 970 bp, Glycine max
  Intron number 1 from transcript Glyma15g06520.1 (locus Gly ma15g06520) derived from phytozome v7.0 (chr-ID Gm15; pos 4610394 to 4611363 reverse strand)
ttgctgcttcttggcttctcatcattacaacgcaggttagtgctcaccacccttctccttctcttactaattattatatcattattttttaattacctacatgtactcttctaaattataaaagcatatactagtattaattatctacggattccgcttcacccactagttccacctttcgtttcttctggtccttttcatgatcatatataatgatgaaaaatgtttgatctgacacctaaaaatctatttaacacttattgagaaatataatatgttaaaaagaaagaaatagacagaattaggagctattggtgggatgttaaaataaatggtatcattaccatatattattctgtaatgattatcattcttacattattttacttaaaacagtccctggtttgttgctttactgtgtttcttttttctaattttattattcctcatattctccctccaagcccggcttttggtgatattttcaactcgtaatttattttgttgatatttttattttcgaggtggattgttttattgatatttcagaattactatgtaacaattcaaaagttcctgtatataatagaatatttatatttccttttaaaaaataggaacttatacttatataattatcatgttatgtaaaataacatacataaatttctaatgaatttggagttaaatatattttatcctaactaatgaggtcagctgttgtataaattgtaaatatttaattatataggtgttttataatttatattccttttcaagttttataatcaagatgaaaagacgggtgaagtaatacagtcaacaagtatattattataattatttttgtgaggcaactagtatatttttattagacacgaaattgtaattttcaattgaactggctgcagcctgcaatttgtgatagtaattaactccttgatcgtaccgtgtctgcaggtgctaggat

SEQ ID NO: 25947 - DNA, 777 bp, Glycine max
  Intron number 3 from transcript Glyma14g35840.1 (locus Gly ma14g35840) derived from phytozome v7.0 (chr-ID Gm14; pos 44986769 to 44987545)
tacgacaagcctactctctagtcattcagggtgaaatacagcatcaaatgacatcataatctacagagaatttctccatagccactacaatccaaagtcattcaaacaaattcactagaggcgggaattgtgagcattgcaacagagggggtcatacaattgacaattgtcgaactctaaagttccactgctagttctgcaacaaaagagaacacaccgaagatagatgcaaatttaaaaatgggacatggggttcaatcacaacaacgacgatataggtcttgaggcactacacctaagtctttgtctactgctaatgtagtagactcttcccagcttacacatgggctatctactaagcaacttcaacaaattgcttgcgcattaagtatgatgtctgcagatgatacttctctggtaataaagatgcttatgcaaatgttgcaggtctgtctcttttctaatgcctcgtctaattttgttttcactaagccttggattttggacagtggggctattgatcacatcacatttgattccacacttttcactcaaacagaatccccacttatacctattgtcaacctacccactggatcttctgttccagtcacatctatcggagccatgccattcaattcaaatataaccttagataaagtcttatgtgttccttcctttcggttaaatttgatgtatgttagcaaactcaccactagtctgaattattgtgccattttgtttcctacattctgtgttttgcaggacttggctacg

SEQ ID NO: 25948 - DNA, 832 bp, Glycine max
  Intron number 2 from transcript Glyma15g27040.2 (locus Gly ma15g27040) derived from phytozome v7.0 (chr-ID Gm15; pos 29332536 to 29333367)
gcgagccatttccacaacttgtggtcacctattatgtatccacatacaaacaattttttactgagtttctctattttaatagaatatgatcaacttagttcatatcaaattaggttgaattttcttcacattttatgtggtttccttaacacagttaaaaggcacagatgatgccaataagatactcagcaatgatggagcatgtcctatttgtgatcaagtcctttcaaagaggtatggatatgatagggatctgtttgattgaacttgtgattttgttactcacctgatataatactgattatagcggtcaattaatggaactaatcattgctcagcaatcagtactaatcattgtcaattttttaagtctcatagttgatgtgttcttgtctaagactctaaagttaaatgtttctcctcttgtcagtctcatgaaacccgtggacgtcaatcccaatgatgaatgggtcaatgtatgtaaacattctcccatgcaataataactacatagtacatgcacataagatactctctaaaatttgatgaatttcatgctcttttccttttctttattctcactagttttgttgccaattattgtgatgtcttttgtgcagatggccatggcaggggtatctccacagatatgtatcctttatgtccattgtgtagaggtagaactgcatagaaatagaaagctaaggttatatatgttaatccttctacactatctagcagtctgtttattataaatgaagttcatattctgaaatttatgaaattaagagggtacattagaccttgtgtgtttacctgagcaaatttagtg

SEQ ID NO: 25949 - DNA, 711 bp, Glycine max
  Intron number 2 from transcript Glyma13g11260.1 (locus Gly ma13g11260) derived from phytozome v7.0 (chr-ID Gm13; pos 13661854 to 13662564 reverse strand)
ctgatttacgtacgttaatgtaataaatttacaatctttaaggaagtaggatgagatatttgttataagcttcacttcctaggtagtgacctcaaaagattattgtcaatatgatgttttgtgagacttttctggtagtcagaagaagcttttcatggttaagagtgataaccaacgattcataagtttgttgtatcttaactttgtttttaattgtctcaaatttcttcattttttttaaaactaattcctctctgtgttctttctactgaagttgaaatcctacaagtgttgtgactgtttaggaattagaatctctctagtctctattgccttcttttgttagagattttctctaagtttgtgttatggatttgtaacaactatcatggattgaagatagagagactattgtgattatctctgtctttggttgctgaatccattgaaagataactcttactttaagattatatttggctgggattattatctttctagatgtttattatgtatctgagttgtatgaatgtgttcattaaacaagcagatataagttgtgagtctgtatatatttgaatattttatttaaactccattcttttgtctgttacacgttatacattattttctaatactatatttgaaatcaatgttaagtttgttattttctaatgattattacatttcataggtcccgtagcggaacat

SEQ ID NO: 25950 - DNA, 1042 bp, Glycine max
  Intron number 2 from transcript Glyma13g44910.1 (locus Gly ma13g44910) derived from phytozome v7.0 (chr-ID Gm13; pos 44231337 to 44232378 reverse strand)
cttagtaaggtacctttactttcttccttcaccttaactttttttttttttttttttatcttatacaaaccatcaaaccattacaattcctatttcctcaccctgcattgtgcaatttctctccttttttcaattgttatcgtcactactaccaccaccaccgatggatcaaaatgggcttatcaccacgggctagttcaattcaaatgttatattaatgcaatgagtatattattatatccatactatttaataattaatatattaaataaatttttaataagagatttataattcttgaaactttagatattattatatctagatagtagaactgaaatcctcccattctcacaatctcaccttattttcttgttattttctttattatttctcagtcacacacacatattggcgttggtgtgtttttttttttaattaaaaaaatattaataagattattcttgaaagcatttattaaagaaataaaaattaaaataatatatattatatttaaaatatatatttataaaattatatccatcactataatattttttaccaaataaatgactattaaattgctttttaacaatctaataattattatattaatttttcgaaaaaattgtcaccataatgatgaatacgatgatattttaagtttttaaagaagtaatttgatataaatttaattttgagaaactattttgctgataaaacttttaaaagactaatataatgaaattttaaacaaaactagcttaggtttttggcctttctagattgtaatggaaattacgtgtgttgtggcattcttattgacaatgtgagaaagcattatctagtcatatattttgagtatgccatctgttatatttgataaactcaattctattttcatttttgtcctttcaatagttactttttgttatgtttctgcatgttttgtttgtgattccttttaaattctgtaagcataacatgccatttttcttcatttgcagggtaaaaccttgggatctgctggcatttcatcaac

SEQ ID NO: 25951 - DNA, 530 bp, Glycine max
  Intron number 1 from transcript Glyma13g44560.1 (locus Gly ma13g44560) derived from phytozome v7.0 (chr-ID Gm13; pos 43961746 to 43962275 reverse strand)
ttcacatccgtctttccaatctaaatccctcctcggtacgtacgtctttgttcccttcttcattttttttttatcctcaagtgttactcctttaattttgttcgaaatgttagtttggagaattcaaattcaccacttctctcctctttcttcttcttttatgttaaattaataagattttgtgtgagtccacaaaggaaaaaaatgtttgattaacaaagtttcttttattttaaacaatatctaaattaaaatttcatcttgatataattttttgatgtataataacgacacagaaagttagaaacctaatatctcatgtagattactcaccactagatcgatcctaatcggttcttctcgatataatatttatgtatgaaaaaattactaatagttttaatggtgcgaatgtttagggtttggagatgatttcctcgtaaaaatatttgtagtagatgatgatcatgcacattgtttacggtggcagggaaagtaatatttactgatctaaacttttcattacacag

SEQ ID NO: 25952 - DNA, 937 bp, Glycine max
  Intron number 2 from transcript Glyma13g30320.1 (locus Gly ma13g30320) derived from phytozome v7.0 (chr-ID Gm13; pos 33001715 to 33002651)
gagtcattgttgtgtctcctaaatagtgtaagtatagcttatcaataatacctttttgctttttgactaaatgaaatactaataatatatcttttaaaccctttaaaaaaaaaaaacatcctcttttaaatagttttattttattaactaaaatttattaaaaaatcacaaatttatacaaatatatttaaagaaagagtgctctgttccaatatgcatggatccggttcctttaatttgctgtctaattaacttcgtgatggcaattcaataaaatgattattttttaaaaggtgaaatactacctagcttaattcaccttttaattccaatattattaactgtttgaaatgaaagggaaacctaaagaattttacttgtgatattttactggggactggtttgaattttaggattattcttttataaactaaaatatgtcaattcacgtggtatgcttttttacaccctatctaatttactctccattcagggtaaaactgagagacaaacacgactatatatttcttgtttttaataatagaagaggagaaaaaagatttaagatgtaagtgttttgttataaaagactatatttataaggttatatttttttgaacaatagataaaagaaatataaaaagcttcagccatgagccaactcacagcatatctacaagtctgacgtatacaagaaggatcaacgtcgttataggagttttataaattaatttagccagctgaattaattggtacatataaataaattgcaatttaaaattaaaattataacatatttaaggactaattggcatatttaccctttaatcatgctgcaaatacgtatgttggggacccaatgtttttggtcaattgcatgatcattccaactattatttcaggttgctcgtcctgaagacattacagccagatatac

SEQ ID NO: 25953 - DNA, 810 bp, Glycine max
  Intron number 2 from transcript Glyma15g00990.1 (locus Gly ma15g00990) derived from phytozome v7.0 (chr-ID Gm15; pos 598585 to 599394 reverse strand)
gatcgcaagtaggactatactttgcttttttattctctgttcatcttaccaaatcagcttcgatttatgggtattcttgatcattctaggtttgattactattgatgtgttctttgtaatggttaatataagtctccaaatattgtagccagttgatatcttagtgtcgtattgagatctactttctttgacagattgaaacatctcaaaaaaaaaaaaaaaatcttatggaatcttaaatgactctagttgtgatggctttatcatgtaacactgataaggatcaggttatgagagatttgtgtggaagattttttttttctcaatcaaattaggtatagaaaggaaaaataatctacatccggtatctcctctggctctgtttttttctattgcagcaatccttcaatgcaagtacaaaagacttgtaatgattggtgactggacataaaacaactttatctcttcgctgccttcttggtatttttttccccttaatttactactgagctatgatggttattgctaatggatggttcttgacttataagtaaagatttaaccttataatgcaatttataaaacaaatggtcaaaagtttcagcgtctaatgctgcaaaaacctctgataaaaacattttagctggtacctgtaaaatgaacctttttgtaaaatttgctgatggctggcacagtaaccttttttcctttttccaatatctattcgtgatggctgcttgcaattctatgtatgttgatctgtgtacatatgcagattgcagtgaaaagattgaaagtttggagcaacaa

SEQ ID NO: 25954 - DNA, 385 bp, Glycine max
  Intron number 2 from transcript Glyma13g36010.1 (locus Gly ma13g36010) derived from phytozome v7.0 (chr-ID Gm13; pos 37370841 to 37371225 reverse strand)
gattggaatcaagcatctttgttgtaagtgcatgcaatttgtgtcaagtcaaacacaatcaaacaacccacaaaaaaaaaaaaagaaagagaaaaagaagatattttgatctcttttgtttttctttgataacccttatacataatatttctaaaaatctagtctttctgtgttcgaataatatcgtatgatctatgtatgtaagacaaacattaggaaagccttttattgttgagatttttttttgataactttgcaattcagcatgatacaatagagtaaatagttgatcaatcttcatgggattaggttctgactagtttttcttgtgtttgttttgatggtgatagaagaggagagaagggtacggagaacagtttccggt

SEQ ID NO: 25955 - DNA, 718 bp, Glycine max
  Intron number 1 from transcript Glyma14g00810.1 (locus Gly ma14g00810) derived from phytozome v7.0 (chr-ID Gm14; pos 415432 to 416149)
ggaaggtcacccctgctacccggcagatagatcatgtgagcaactcacccccctctttttttttcatgatcatcacacattgggtttgcttttgaatttgattagaagtttcttaattgtggttgtgggcatcaccctttatttgacaggtgcttgcaggtgtgtggatcattttcaaatgaatttgatgcaggaattactttgtctagactttacattgtgttacttgtgaaaagattttcagacaaaattttgctgcagatttagatggatgattgtgggtgtgtttttttgtttttcttccaacgagcaaaacttattatttatgaatgatttggagagttaaggaagatctaagacttgaagcatttcttatccctatgtttgtaacctttacaatcataggttctgttagccatattgacgtatcccatttaaataatttatatgttcttgagtgcacggaatttaggttaggaaaaacgaagctttgagtaaatgctgattagaaagaaattgtaaattgggtggtatttgatacggtttgacatcagggtgtttgatgtgatccttaaaatggtgattggttcttgatttttgttcgagaataatttgaacttgtctacatgttacattgttcattatatatatttattctgcttctaataattctataagcatttttgcaggatctacccagaaccttccctggtcaccc

SEQ ID NO: 25956 - DNA, 728 bp, Glycine max
  Intron number 3 from transcript Glyma13g28610.1 (locus Gly ma13g28610) derived from phytozome v7.0 (chr-ID Gm13; pos 31610920 to 31611647)
aagcaaatttgcttcacgaagaaggttgtctgattttatttattgttgacttgctgaatcaaccgttttttaatacaatgcatgggtattccttacttactagatagtagttaatgaaatttcataatttatttagtttaatgtgtttttactcattttcaattgatagaagaatgaaggtgctgattgtcacatgctgaaaatgaataagtctctgtttggaaaaacttctcaataagcacttatagaagaaggaaataagaaggtaaaatgaagcaagcttctcttatgagtcaaaattagcttttggagaagctaaatgaaagacctctgaccttctacaaataagcttatgtataagctaattttaacttgtgggaacaatttatgttgttttaccttctctttttttttgtctcttataagtgcttattgagaagtttatcctaacaggacctaaatataaatcttttattttattttacttttttttgggggggggggggggttggagtgcttggtccgtttggtactctgtataatgattgaacaagcatgtttagttttcaggatttttgtttgtggggtttacctttctattattaccttatttgaatttcatgattataatttctaatttgttttccttttccagttttttgtctgggtacaatcttcattttcttttgtggatttttaaaatgctgcttcacatttatatcacagat

SEQ ID NO: 25957 - DNA, 221 bp, Glycine max
  Intron number 1 from transcript Glyma14g35400.1 (locus Gly ma14g35400) derived from phytozome v7.0 (chr-ID Gm14; pos 44346909 to 44347129 reverse strand)
tcaaaaatttgttaggtgtgttaacgtctgtttgtatatatatcattaatcttatcctcgttcatgtgcacacttgttaattaatttgtttgtcttcatcattttcttgattcctaagtcctaaccactacagttattattagcttgcatgtatagtatgcaaataaatttaaggaccaattcatatgtttgagttaaattttgcagacaaaattgaagct

SEQ ID NO: 25958 - DNA, 881 bp, Glycine max
  Intron number 3 from transcript Glyma15g29520.1 (locus Gly ma15g29520) derived from phytozome v7.0 (chr-ID Gm15; pos 32280556 to 32281436)
gttacaggaacaacaaagccaacccgtaaaataaggtggatgtctgattttgatggttttgaattttcccatcctgagtattctatacaaggatcgggtcttttgtatactcactgcagcatgcatgtagctgcaacttatgtgcatccatattctttttacttcttccttttattttgtaattattttgaattttatcccatttattgttcttagtattttgaatttgtcttttttgtaaaagttgtctgtttgtgtttttatctcttaaattgtttttggaatgtttgtttgaaattttagatttgtgcattcaggtgttatattgcctccccaagttcccatttttctgttaatgttcagaaccttgaaacaatttctaactaaagagcttaacctataaatatattcttctttttcctttttgcaagtgctaattgatttgttgaagagtgaataacagggaacaagttcagaggccatatatgtgtgtgcgcataaattttataccatcataaatatagaggtcatagatgctaaaatattcctcaaagaaatagaataattgaatgttgggaaagttaatatcatgagcaaacaacaaacaattcagagaggcatattcaagtcctgccaagcattgttataaatataatgttttttcggaagtcaaatgacataattctaggtggtcgttctagattccaacatgcttagtaaggttttattttagtaacaaaaggcattagccactggactgtgaccaacttttagcaaacacagctgatgcttacaccagtcgcgtgaatcaatgtatgattaccatttttttctctcatgttgtagatctgagcaagataaagaacctaaccaagaagctg

SEQ ID NO: 25959 - DNA, 692 bp, Glycine max
  Intron number 2 from transcript Glyma15g15200.1 (locus Gly ma15g15200) derived from phytozome v7.0 (chr-ID Gm15; pos 11629335 to 11630026)
gcaggtgggtctctcttggatacttttgcatccattccctcctttattatcgccattgatcataagttcgatggtagatattaatattacaacatatttcatgtccataaaaataaaataccattttcaatctggacgttcaagattttttttcttcttcaaatgatcacttttctgtagagttgttgaaattgactttgctcgtctacaaaccatcgagtggggtcgagcatttatataataagctcaaagcatatcaggttaatttggttaggctagataggtcagactgaacctaaaaaattgaggctcaaaaactactagacctatttggctgcttggtgtcattttattatttttctttgtaaaatttaaataaaatttaagttaaaaaaataaaagggtcaatttggttcaagcaaggcaacaaaagtgtggcccgtgagagatttgggtactagcccgtcttggctcgcatttcacatcttgatctagtctaatccgttttgatagttctaattttaaaattcaagctaacaaaaaaaaattaatcattggtttagaataagtttcaccatatttatttagtgttatctaccaattctccatatgtatgtgatatgccttaaatataacacacgcttgtagttttttaacttcataaacataatttcttttttttttcctagcag

SEQ ID NO: 25960 - DNA, 891 bp, Glycine max
  Intron number 2 from transcript Glyma14g39280.1 (locus Gly ma14g39280) derived from phytozome v7.0 (chr-ID Gm14; pos 48385504 to 48386394 reverse strand)
aacttcgcatgtcttcttgctactttatagtttattttattctactttatcacttacttgaaaaaggttaagcaagttaacaaagcatatgtgaagattcaatcaggattagttcctttctataggtgttacaattgtatcctccaatctgaataggcatccatatcacacttacaccttaatttcaaatatgcaatcatacatttgtaaattggatggttttgaatgttcatattcagcaatcagctttcttgtttatctgaatttttactagataagtctgaaaagacaaaatctaggatagttggatcaaaataattatagcatttaaccattacattttgttaacgaatctgtcataagtcaaatcatcataaattccgatacaactaaaacacaacacaattttgtttgtatttttgagtatgggcttatatatggccactgctatgctgcccatttgttgttaccaatagcttttactggatatagaacctattttgccttcaacaagagttgtgccacaaattagtgcttttttcttttacatttggctggccaaacaaatcacaagcaccaagtaaaaatgtttttcaagcagtgaaagttcattttcaaggcacatgaatcacaagacatggtgcatggatgagtatctagtaatctttttcagtatcaatcaaatgcacatattagtaatattgactcaagaattttttttttgttttgatgattgctaaacttgaactgatggattttcatggcttacctaattgcaggatgaaataaacatctcagtgcaagctcagaaatagatcttattctgaatactcagtggttaatttccatttctattttgtaaataatttctaacataagcatagctaaatc

SEQ ID NO: 25961 - DNA, 724 bp, Glycine max
  Intron number 1 from transcript Glyma14g39280.1 (locus Gly ma14g39280) derived from phytozome v7.0 (chr-ID Gm14; pos 48386467 to 48387190 reverse strand)
tgcaacacttcttgcactgtcatctgtgtacttaagtaagtactggttgtcttattttacttttccacttttgcttttctcaactctttcttgagtttaagataagtctgaatcactgaataaagcaaatggtttgtggaatttactttcaaacttcatctcatgccatcagtgctgcctcgttttgtcaccaccaaaatcttcttctcttgctagaggctccaaagtagttttcttctgtaaagtgtaaactatcacaagtaggccttttctttgtctctatactgtgtgtttgtttatacagagtgaaaatccaggtagatttagttttaaaattgggagggacaaagatgaaacaactcaaaccagtgtgtgcatgtaattgtttgttttggatatgttgatgttgttcgatctatatattaatgtttttgattttctctgtcttgtgtgctgattggtggccttaattgtctctaaaccttgacttgcactaacaaactgatggagttcaagtttaacttgggtgttgtgttctctctctccctctctcatcaagggactgagaagcacttatgtcgttcaattttctaattcaatgagtccttggacatatattatcagaaagaatctccatagcagattcaacattaatttcagattagatgtagtatgttactaattatagttaacaataacaggaatttcatttcctggatcgttg

SEQ ID NO: 25962 - DNA, 634 bp, Glycine max
  Intron number 1 from transcript Glyma13g04640.1 (locus Gly ma13g04640) derived from phytozome v7.0 (chr-ID Gm13; pos 4943697 to 4944330 reverse strand)
ccgccaccggaatcccttcgttgttcgagcccaaggtacgcttcattccaatgctgtgctttctcttcgttttttacgcaatttcttccgatccgattttcaacgccccagttaggtgttggtgttgcttcccaattcttctcttatctttctttgtaagtttcatcattgtgtgtgtcatcaacaaggtgtttgtggaaatgctcttaagtcctgacatttggagtgttttttgactacgattaattttgtaactcgtcaattgggttttggggttgaggttcgtgtttgtcaaatttgaaaactttttcgattttgacagaacttgtatcaggtagaataaaaggttgtcacttgtcagctgcacatgcattgcatgtgtgtagagcgtagactgtggaggtgtttatagaaataataaattaatttaattcattttcttttccaaaaagaaaaaataaagtttgagaaactatgaccccgtggtttatttgtttaatttttttttttttgaaggtcagttttctgtttgtaatggttgtgcttttaatttgaggatttgatatcattgcagttcaatagtaatatttttcttgttctttcagcggaaccttcagataaatccgttgaaatt

SEQ ID NO: 25963 - DNA, 221 bp, Glycine max
  Intron number 1 from transcript Glyma15g16150.2 (locus Gly ma15g16150) derived from phytozome v7.0 (chr-ID Gm15; pos 12465899 to 12466119 reverse strand)
tccctcatcctccaactcatttcaccgtttcccaggtttttgtcttctttttattttcaacattgtttttcatcaacaaatgttagtggttaattattaaatttttttgttagcgggaattcaaggacttctctcccctttctttcatatgggtttgtatcaaaatttgtttttttttttcttttattttgactctggtgaaatcttgttctagtttggac

SEQ ID NO: 25964 - DNA, 559 bp, Glycine max
  Intron number 2 from transcript Glyma16g28400.1 (locus Gly ma16g28400) derived from phytozome v7.0 (chr-ID Gm16; pos 32352582 to 32353140)
aacaagaggcaaaagaggtaaaaaaaatatataatatcaaatcttagaaattagttactcttgatacacagtttaaaaatttacacagttattatcaactaattagaaatcacaataagtatatctatatcttatgtatgtttttagtctctcaagtttacacagttgtttttttagtccctcaaataaaaatgtaagttttagtctttgaaattcgaaaaatattctttttagttactcttctcaaataaaaatttgtatcttttagtctctcaaactctgatagagtgactaaaggagtattttttaatttgaaaaactaaaaaatataattttctttagagaattagaaaagacatacacttagttttatggattaaaaacataattaaactttttaaagtaattattgacaagacaaccgattccaagtacatgacaccccattgacatgatagtgtaaaaaacctttatacttttctttttacaattacatgctaggagctaaagaattcctaggattttctttttctttgataacttttattttctcatagat

SEQ ID NO: 25965 - DNA, 587 bp, Glycine max
  Intron number 3 from transcript Glyma15g17870.1 (locus Gly ma15g17870) derived from phytozome v7.0 (chr-ID Gm15; pos 14348079 to 14348665)
tcttgtcattgacaatccactttcacagaatccaggtaattctaaatttttctcactctatttcagcataggtggagttaaatcattaacctaattatggatccctgattcagccaatgtagtttctagtatgtttgatatctgtgctgctaatttacactatattcaaccttctcttagttggcttatctagagcttcatcgtgtggcagtggtatccgtttagttgttgccaccggattatatacctattgcttttttctaaggatacgtaaatgaaagtttattttgttatggaggaatataacggcatgccctgcttattttatagaaattcaatttgtgtgaaggttaagataagaataattgcctagtggcactcacccattggttatggtaatggtaataatgaatttaaaagaagaaaattgtcatatattatgttgccattttgttggaattctgtcatgtgaatttctaacggttagcaatctttgtcactttacggtacggacaacttaactttatccgtgttaaatataatttggcctttatatgcagatagtacgtggggtcgctttttccgca

SEQ ID NO: 25966 - DNA, 582 bp, Glycine max
  Intron number 1 from transcript Glyma15g11980.1 (locus Gly ma15g11980) derived from phytozome v7.0 (chr-ID Gm15; pos 8875263 to 8875844)
agggtgcatctgttgtcatctcttctcgcaaacaggttaattaattgatgggtgtctgcccttcaatttcccattttccacacccttttctttttcttgtcaagcttaaatcaattaatcaagggcagaatatttttttctttcttgttttaagttgatttttttttgttctgtttggtagtttaatttagtttggtgtgttagattcatctcttgttggcacttggctactcttgcaactttgatttgtgtccaactcaattccaaaagttatctggttaatgaaatgattattgctctcatttatatatactactttaatcatatcactagtccgtgtggaatctccagtagccacccctttgaaagtcctgtatagttggatcagaggagttattttatttaatagctccatattgtcttggaagaaaggagaggaaaacggtgatgattggtgataaaagagcattttgttaaaaagaaagacttatttttatgattttaatgtgttttgcttttgacacttcttacagatatttgttcattactggattattttatttgtctaattactgcagcaaa

SEQ ID NO: 25967 - DNA, 849 bp, Glycine max
  Intron number 2 from transcript Glyma15g11980.1 (locus Gly ma15g11980) derived from phytozome v7.0 (chr-ID Gm15; pos 8875923 to 8876771)
aacaaaggaaaaatttgatagacaaaactttacaggtggggtttcagacattctttggatacacttgtgagtttttattggttttgaaaccatcttatccaagctcaatacaagtctcctgaagatttcatcctgcaagcctgagaagttcaatccttgtttttgttcatttatcattcggctaccgaaactcttctgttactgctatctgaccactgatgagtcatttttctattagtctaaagtctgtttcgataaactctagagagaaaaaaaatgtaataagtctctctcataaattaaaattaacatatatttataagttaaaattaactttagagagaaattaaatgaaaaaacttaaataaaagttgaagtacatgagttgattttaacttaacagaaaattttaatttattttatcttattttcttttgtgtcagtgttcgtaaagtttatccaaacatatcctaaatctaattagctccattttgatttgttatcttcatctggtggctagatagggaatttagctgggttttcttgggtccagggtattggttggtggtgttctattacaagtcacgttttgcaaattctttaatggtgttctagtgttctaaagatgtggttaacattctggtttgctggtgtcacgagagattctcactggacctttgtaaaagtttggtatttctcacttttttgtagtaaacattaaacaagtgttgcctgagagaatttgtaaagttccatatcaagaaagacaaacacacaattttttctcatgacaaggtcatgcaaaaatctaacgtaaaatgaccaattccctggttttgctacagaagt

SEQ ID NO: 25968 - DNA, 315 bp, Glycine max
  Intron number 2 from transcript Glyma13g10690.1 (locus Gly ma13g10690) derived from phytozome v7.0 (chr-ID Gm13; pos 12733429 to 12733743 reverse strand)
tcagggagagaagaggaagaccatcaacgacgattgtaataggactgtaacagtgttaaagaaagaagagggtgctttcatcatgttgttttttcatctctgactttgcaatagctaaagtagcttcctctagatatgctcaattatatttatttttgaattttttaatttttgaattctgttgtcatagtaccttgtcttctattttacaaatacattattgttgaaacttgagaaagcatgtacaatactatgtgttgtgtttctaatgcactcatgcttatggatttttcttttgctcttataggtacggtt

SEQ ID NO: 25969 - DNA, 472 bp, Glycine max
  Intron number 3 from transcript Glyma14g07020.1 (locus Gly ma14g07020) derived from phytozome v7.0 (chr-ID Gm14; pos 5202492 to 5202963 reverse strand)
aggtaatgtgccttccttattctattctagaacatgacttacttaattcatcttctagttgatgagttcagaatttaaggtcacatcaaaacctcatttcttgaatgcaagctaagctaattaattcggattgtaactgatgataccaacctttaattaaaagttctctttttatataaaattgtaaaatctgtacttggctagtttatttaaacttatttatggaagaaattgcttattttaataaaataatttttttattattattttaatgtatttgtttaaatttcttctgtttaaaaaatgttttctgtttattttaaaaaataaatcttatttgtttcttaaaaaaaacacctacataaaaaagagacttatttaaagttacctttttaagtttaaacaaacttactttaatctctttgtttcatgcttagggaatctctataaatacatttgaccttaagggaga

SEQ ID NO: 25970 - DNA, 753 bp, Glycine max
  Intron number 3 from transcript Glyma16g25320.1 (locus Gly ma16g25320) derived from phytozome v7.0 (chr-ID Gm16; pos 29253428 to 29254180)
gtggtcaactagctgaatactttggacgtaaaggggtattatactattaccaatatgttttctttgttttgttttgttgtggtgcgtgtctctgtgtattattccaattttaaaggttttcatcccctcatgtgacatttttgagttgttaaatctcctagaacagataggtactttaagcaataaaaaagacataaaaattttatggtggagattttttcactggaaaaaattgaaagtaaaaatttcaattgagaaagttcattcttcccaattttaaaaatttataattttcttgtcttctccgtaaactttagctcaatatattggttacaaagacactttatttttgtaactagctataaaacattaattaactaaatttcattcaatatattctcttttcaagttaggcaagatcaattaaaatgatgtggtataattgataaatgattatgttttttaaatatgcaactaagaatttgatccccaagtctctatatataaaaataacatctgttgagagctaagagctgtactccttaaatgattttcaatattttcaaggattaattcttaactcttaggcaagagataggtttacacaaaagttaagtgaaaggaaatgtaatcacctttagactaggaaaaattcattaatataaaaaaatggaattttaatttttggactttattattttggcatgttgaattgcagtcattaatagtcgcagcaattccaaatatattcgg

SEQ ID NO: 25971 - DNA, 501 bp, Glycine max
  Intron number 3 from transcript Glyma15g11310.1 (locus Gly ma15g11310) derived from phytozome v7.0 (chr-ID Gm15; pos 8302330 to 8302830)
gaatttctccgaagtggagcatatcatcctcaaatgtatgtatgcctctctcatttgtttatttttcatgtttggttgcttcaaaagacaagaccgccaacaaacatgtccctctctttgtgtttttctatgcttatttatccaacctctctctttttcaatgtactccattttcctcccttcttttccattttcaaatttatcttgacattttcctcctatggtttctgttcctaacaagaccacaaatttcatccaaggataaacatactcacacaaccatccatgaattatcgttttaatgaaagaaaaaaaaatcacacaactatctactcggttcttttgcataactgttgctggattttgctttttattctaattcctttatgcctaattcccttttgtttattcatatttacctttgttcgtgcttacactgatgttaattatgttgttgaaaatacagataaccgttccctaaaagaagttttcaagctgttc

SEQ ID NO: 25972 - DNA, 660 bp, Glycine max
  Intron number 2 from transcript Glyma15g39070.1 (locus Gly ma15g39070) derived from phytozome v7.0 (chr-ID Gm15; pos 45634378 to 45635037)
atttgctaactctcaataaaaatcttcagtcggtgagtaatgcttttgctaactctcaataaaaatttcatttagtatgaatgatttgtaactgtcactgtcccatctcatcaactcgcgttgttgttatatttatggtgagtgaaattgccttcagcaaaccagaaaagtatactattttgaatggaaggcaacatggggcttaggcacttgaatgatgctacttctttgttctgcgatttgacacatgttgttcttttctctttgtttttgttaacctttattgaattgcctgtttcaattctgtttgataacatgtttctttgtatcttgatacagtttacaaattacaatgtttctggattaatgttgttgaattttatttaattgttaatgagattggataattttttttaaaagccattctaagttgtttttattgtgaagtcactactcacttgttattcctttttcttttgtaagaatatttatccagtcaactggtgccaactccttatcattcacattgccttccgaaccttcttgctttttagattcttttgctttgcaaacggtgatgactagatttttgttgcctaacttttaatgtatctgatgaagattctttgatagattgttggagcagaaaatcctgttttg

SEQ ID NO: 25973 - DNA, 716 bp, Glycine max
  Intron number 2 from transcript Glyma13g03790.1 (locus Gly ma13g03790) derived from phytozome v7.0 (chr-ID Gm13; pos 3893690 to 3894405)
tgttttggagcttgtgagcgttgaccttgatcaaagtaagtttatttattttttataaaaaaattctttaaaacctaactatattataaaagtttcaaatatagtgttagttaaaatgcttttaaaaaaaattcaaagaaacggatccaaaattttagttacgaaacaagatcagcaatgatattttcaacccttaatacgttttacactaaccataattttttcacatttcattttttaaattcacctcatacccttctttttctctttcttcttttctataaaaattttacttttatattatacaattgagtaattccgaaaaatcaatgtacctcaactctatgatagcacatttcttccgcaaaatacgtattgttttaggttgttttacccatataaaaaagttaataattaaataaaaaagaataataattttactaaattgatcttattaaatagatgaaagataaacagtattagtattacaataaaaactaaagtgaaacttcttagaaatattagtgaaaaaaataatattatattcaaaagttaacataacatttattttgagataagtttttttaatgtgatacttattttgggagagaggaaagtaataaaatttatctgatctcatttttgtactcttgaaattttactctctttatatgagtgaagaaacaaacttggagaaaaagacaatcaaaggtcat

SEQ ID NO: 25974 - DNA, 377 bp, Glycine max
  Intron number 3 from transcript Glyma13g39240.1 (locus Gly ma13g39240) derived from phytozome v7.0 (chr-ID Gm13; pos 39910087 to 39910463)
aggagggttgaacttggttttgacagttttgtcgagtaagttaactttatctgggtctttgaagagagtaacttttttattttggtcattgaaagatttttagatcattttgatttggtcctcgaaatgttattacatcaacttgtcctcaaatgatgtttttcttttttctgcatcaaaatagtcaaaatacttaatgttgtcatactgtgataaaataatgatttgggggccattttgatgtagctgatgcttgggagcaccaaattggtagtattctgaaatctttcaaggactaaattggcttttgctgtatttgaaaatgtcaatgtcattatatatctaatgttctgtttttggatgtatgcaggtgtggg

SEQ ID NO: 25975 - DNA, 746 bp, Glycine max
  Intron number 1 from transcript Glyma14g36780.1 (locus Gly ma14g36780) derived from phytozome v7.0 (chr-ID Gm14; pos 46074609 to 46075354 reverse strand)
tcgcttgcacttccttgggccgtcaagccctcaaggtcccttttttgttctgccttttctcattgagatttgtataaaggaatgatgaaatgatattatgtttgataaaatgatgtaaaatagaactttcatagaatgtgttttattttgttccgtataattggttggagtttgagaccaagtgttcatttgatttctgtgtgtttgggtgagagtttgcaaaatcgatttttgaattaaaattgtttctgaataaaattgattttggagttaagcgatttatgtttgggtgttttaatcctaaaagttaaaagaaaactcgataaacacaaaactatttaaagttgctttaactcaaaatcaactaactcatgatcaattcttcaatgtgggaccaaacatgtgaacatttgtgctagatgatatctcaacgtgattttggatgatacaacgtgaaaccaaacacataaagttggaaagaattgattttgataaagttgattatgcatttgaaatgtgtttaaattaacctcaataacatattttacattgaaatgtgtgcagtgtaagaaagtaattcccggtgttaaacaaataggctatctaaataatgaaattatagctttattgtattttactccatttgtttcattcaattacattccactcactgttactctgttagacatgtaaacatagtcttattccatattatgctgtgggatattcatgtgacaggaccaact

SEQ ID NO: 25976 - DNA, 313 bp, Glycine max
  Intron number 2 from transcript Glyma13g17500.1 (locus Gly ma13g17500) derived from phytozome v7.0 (chr-ID Gm13; pos 21282492 to 21282804)
ataaagcatctaatacattaagaaactactgtcaggttagtcaatttgtttttgtaatttcatcgaagaagttttcattaagcaaataactcatgctgtttttccaatgacaaaatgtaatctctgattaccattttattattagtattattttggattcaaatttctgcactgactgctttgctgatgtaatatatccatcaagtatcgaggtaaggtttttcaggatatgagcctttactgcttttatcttatgtgaaatacttttctgttggcaggtggccaaatccaatcctgagaagtccattccttt

SEQ ID NO: 25977 - DNA, 763 bp, Glycine max
  Intron number 1 from transcript Glyma13g28590.1 (locus Gly ma13g28590) derived from phytozome v7.0 (chr-ID Gm13; pos 31582091 to 31582853 reverse strand)
cccctcgtctctctttccaatcgagctctggtatataaaaatctcctttctcgctcttttcatttcacttgcttcttttgtaaacctgttttaagggaaaactcgtttgattaattaattaatgttgtgttgttgagttgtttaggcaagggagatagtttgatgttattgttatttgaattgcatttccatgccttcatttagttttctgagacataatatgatgtattcaccttcacaattcatagacgattgaactttttattgaaggggtgctccgactctaatttcccttcaacaccctaccttttatctattttatgcagctaaatgctcttggtattgggttttggctatcatcgaagatttattttacgtaattgccctagattttacagaaccaactcgtattctaaatttgctgtatatgttgaattgaagctgagtttttatgttttttattttattttttaattatttgtttttaaaatctttttgaccattcttcttactttttggtcaaactgtcctgcaacaaccgagtcctcccttagagataaagtatttcattgcttgtgagtttcagctgtacatggtagcgacataatggatttatgattgacttcattattttttgctttatggctgaaaactaaagtattttgtggtttcttctaattatattatattgcctggactcattcaattcttgttggatacaaaaacaggtacccggtaccaggatctccaacccaagttcagt

SEQ ID NO: 25978 - DNA, 771 bp, Glycine max
  Intron number 1 from transcript Glyma15g21890.2 (locus Gly ma15g21890) derived from phytozome v7.0 (chr-ID Gm15; pos 20281769 to 20282539 reverse strand)
atctctctctctctttcttagtgcctccttgccaggtgctgccactctctctttctctctcttcatccttctgttgggttggttgtggagtgttgttttctgttgtgcacgtgttgtcattttttaccctcgccacagatctgaagtgttcaagtttggattttgtgcttctgggttggtttgttttgccttttcctcaactgggtcgaccgtgtttaactgaatttgtctctcggaaaccgtgtttttgtctgaattagaagcctgatctacaaattttggcattctagtttctccaattgtgctggaattccgtctggggttttagatctggagaaattgatgtgtagcttgtgacaatttgtggaagaatttttattttttttcttgatttgcggagatgtggtagtttccaagtaagggttctgggggttttgtgctagatttgaccaatgatcaaacttagaacttgaacttgaactttttttattggctaaggttaattgttagtttattgttaacgggattcagcagatcttagttgttaattgttagcttcttcttttttttttttggttagtgggagatttgatcccactatttcttcccatcctttcttccttcaccactttgaacttgaacttagttgggggacttggctgagttagactgttatgtttaaattgtagtcatggtggtgtttttggctgtgaatttgctcatatgtgctaattatgtgttcttgtttgatgttactctacagaagttaaa

SEQ ID NO: 25979 - DNA, 832 bp, Glycine max
  Intron number 1 from transcript Glyma13g31460.1 (locus Gly ma13g31460) derived from phytozome v7.0 (chr-ID Gm13; pos 33865754 to 33866585 reverse strand)
gccgtcctcgtccgccacctcccacccaccgccaggtaccatttccattcatctaaatctatgcgctggcaccgcgtacgtgtttatgtggctatcttaattctgccttttattttctttgacttattaaaatataaaactgaagaaaaaaacagaatgccggccctatttttcttatatagaattaaattcaaattaatgtgattttcttttttacctttgacttctcgttctatattgtaacaatcaccttttacaaaatcggaggagaaagtagtaatcatgcaatacaacatataaaatttgtggtcaaattaaaaaataaatactccaattatgataaagtattagttgaataaaacttaattgcaaattttttgaggtgcttttattgttctttttcaatcagaattgggtggtcaaatgaagatttgcttgagtaaaaactccaattattctgattaacaataagaagaaaaatatcaattagccaactacattctcgtacatattagtattgtatagaaaacgataaagtaatagcattttttgcacatctagtgttgtatgctgaatagagcataggacaggggaaaattgttgcgtatttcggaattatgatggtctctctacatggcatatgaacatatgattgttattaattattttttatgaattgaaaaattcaaatgtgttagttggtagagattgattgagactataaaaacatggtgatatatggaactatcaaataatttttcacctatgtagtgtgatgatttttgggttgtaatgtatctggtaattgtttgcagtttactggaggctatag

SEQ ID NO: 25980 - DNA, 968 bp, Glycine max
  Intron number 1 from transcript Glyma13g19530.1 (locus Gly ma13g19530) derived from phytozome v7.0 (chr-ID Gm13; pos 23012660 to 23013627 reverse strand)
gtatgtttctcttgattgcatggaatttttgtttgctgctgcatatgcttttgtggtccattttttttaatgacaaccgaaattttgtgtggtgctagtaggtacaaagatttagcattaaatttttgtttttatttccattattaacctgagtaaaaagtgtccaaggtctagtaaggaaagtgtgtgtaatggttaggaagtttaccattatgttctagttacaaatactatgctaaaggagttaattatatatttttgttgcatgattcactaaacattaatcaccaagtcactgtagtggaagatctctatattttttgatagaaaaattttaactatgatgattctgccttcttttgtttttaattacatgcatttttttttatctttagccaatgttatgctctactgcaaatttttacatagctggccccgtgccaggataaaagagggtggtgcgaagcagttttcagctaacctaaaacttactcagtattaatgttttttttttttgtaatttcatttgttagtggcaattagctatatgtggaatttgtgataaaatttatggctacttgattaggaaatttggtttaagtaatttcatattcattgcatgttaatctcaagctacatgagagtgttttcgtgtgatcagttcatgcaaagacgttttgggttcagatctattgcctgtagtcataatttaggaggttcttagaatatgtgatttagattgtagagatttaagagaaggaagtgttttgttttttcatggtacttattcttattggcactggtatttgtgaatgtttttccctattggtgataagatgcatgctaaagtttgttccatctatagttcagatttagcggcaagttttttttttcattgaaattctttagtaggggcatctttctaaagagtttttttgtgacagtctttccacaatcaagcattttgg

SEQ ID NO: 25981 - DNA, 601 bp, Glycine max
  Intron number 1 from transcript Glyma16g33830.1 (locus Gly ma16g33830) derived from phytozome v7.0 (chr-ID Gm16; pos 36598602 to 36599202)
agaagtaagattcttcatctctttattcctgtcattaaacacagtggttttcaatgtatctatcagtcttcaattttttaggatagtgcttctcatttcaatcttaaaatgattatatgatactgaataattttaatcagatcatcaaaatttatgccattatactctgtaggaattaggaggagggggagggcagttgaatagatgacttacatgagagaaaatgttttcacctttttttttctgtctatagagtcatagatgttttgccattataagaagcaggtttgttagttgaacacatgcatgatttgattttggtcttcttacaggatacaagaactggttagaggccatataccaattgaatcttcaacttatggggacccaacaaaactggattcaattaacctacgagatcttcaccctagatcttggtaagtgatctacatgtcaattatgtttttcgtgaaaaagaaaatgtgattgtatctgccttaagatcaaataaccagaaataagcattatcttgacttaatttcgagtgatatttcaaatggtagtagcactaagaccacctgatttccaggttctcagttgc

SEQ ID NO: 25982 - DNA, 896 bp, Glycine max
  Intron number 2 from transcript Glyma16g33830.1 (locus Gly ma16g33830) derived from phytozome v7.0 (chr-ID Gm16; pos 36599358 to 36600253)
cccaggtatgagttttcttgcttattattcatccatgcattgagatgaacctttcaattggtcaaccaaaacctttcgagacgagtcaattgcatataatattttgactcgtttacattattctgtttatgtggctgatttcaagataattggaaattttattagtatattcaatcatgtaaatcactgtttatttggaggcagtctttgccaggggtgggggaaattaataatgtaaaaggtgaatcttctaatccccaccagtggtgaaaagatgaacttttgcagtttgctaaaagagaagacaagggagaagttatttacattgggaatataattggaagatgttggtggaagtatgttgttgaatgaagttgttcaaattatacttagtttgtttgctctgattatggctctgtttagataaacttttcaataaaaaacctacagacaggaaaagaaaataagataaaatggactaaactgttttcataagttaaaatcaatttatggcctcaacttttataacagttctctcatttaacttcagagactgagatgcataaattgatttatatttatggaaataagtttgatttattttgcttttttttttcttcttctataaatgtttatgtagaaaagtttattcaaacagaacatattaagaagtttaaaataccatccatctaatttggtttgctattatttttacacgagtaagtttttaggtgaaagaaagaaggtcattatattatgtcttcaaaccattgtgattgtaataacgcttcattacaagtcactgatttccttgcaaggaaacttttgataggtaatgtacatattattttagtcttactaacaattaagcacttgatgtgatatgaaaagggtga

SEQ ID NO: 25983 - DNA, 886 bp, Glycine max
  Intron number 2 from transcript Glyma13g26300.1 (locus Gly ma13g26300) derived from phytozome v7.0 (chr-ID Gm13; pos 29521433 to 29522318)
aagtcgcagagcctttgccaaagggcgaaagtcaagtacgtctttgtttcttatctcggcacaagtgatggtttttcttgttaccgtttgtttaggtttgagctttgttggtttagtttatggaggggaattgaatatggacatgtagaggtagtttggtagggtcattttggcattgttttcggattgaaattgtagttccagctgtgcaactcttataataattaataaattaataaatgtcaacattttagtattttgagtaataaacatgctctattctctttaatttttttattcattttaagtgttctgattttgattttctgttgtgaatggattttcttggtgctattacgtgttttttttatgggaatttagcctaaatttcaagcaccaaacaaaaattctagggtggatttagttgagacatttctgaaacactgaatggcagttctgaagatgaagaataagagaaagttgggatagtttcttgaatttcacagcatttttgtatgaatcagatgcatgtgatttttctagggttgttggtggaatttgcttattgaattgagtttgcagtctgtgaaaatgaaatgtttaagtaatgagggtttgtaaagttttatgattgtaagtacaaacctacgaggcatgcaattctctttactggttggaaattgcaatcagcgaactccaaggatcaagctgttagattttgaaattgatatgggttttttctgattgaaacatgttgatatttgatagcttgcctgaacaattttctttgttgaactattgtagtgtgcagaacttttaatgtctaactattatcatgcattataaatgttgattttaatggtcattggtttatacattttagagg

SEQ ID NO: 25984 - DNA, 885 bp, Glycine max
  Intron number 1 from transcript Glyma15g22470.1 (locus Gly ma15g22470) derived from phytozome v7.0 (chr-ID Gm15; pos 21079843 to 21080727)
ttccaacatcaagtcaatacagtgtgctgcacaaggtgtctaatacatccttgtcctctttgccatcaacatagtaccaacaactttgtaattggctacattatccatcacaacttggacaatattctcttcaccaacttcttaaataatctcatctatcatctcaaatatcttctccgttgtttttgagacagtagatgcattagtggacttcaaaaacacagtgcccttccgactattcacaaaataattcagtattatcctcctcctcttgttagtttaactatcagtcattaaagtgcaccttgttttcttccatgaaactctatgtgcttccaaatattctttcaaataccttactctaattccatggtaagagggctttttaagcctcagaccgtgttttgctaccaattcaatcatttgggcaaatgcttcactccttgccacattgaaaggaatggtattaaggtagagaagccttgcaacagttttgtatgctacctctttgtcattcttcttgaatttaaaatcaacattgggttgtttgagtattaccctcttaaaaatattttgagagcttcaatcatcaatacttttcctttttttccatcaatttccacaacctcctcctcatccttatctcttccaagacttgatttcttcatcaaatttttctcaaaattaagaacaaattatattgccatcttctactattttactcaagcaaccaaaacttgggcctggaaattgtactgatgaaggttgaaaatggtttaaggtaatatctcaaataagacaatttagatgttattcaattatatttaaatagtaaattttgacattagacatattatctttttgtgaagtgtctaggagcttcag

SEQ ID NO: 25985 - DNA, 683 bp, Glycine max
  Intron number 1 from transcript Glyma15g25690.2 (locus Gly ma15g25690) derived from phytozome v7.0 (chr-ID Gm15; pos 27228639 to 27229321)
gaggtttgctttcttcttactattttcttaattaaattagatatttagtgttgcagcatgttaagtctctgtaaagtggggtggtgaagtcattaatattcaataagaaaatcaaggaaaagtcactttttggaagtgtaatacacggatgatgtcaagtgtcacgacaagtgtgatttctcaaacacttcagcaaaattatctatcaaatttttctatgattgatattttcatcagaattttttttaattatctttaatgaaatatttgttttatatttatttttcattcataggacatcatatcttccttatttaaatcaacatgtaatcgttttataagaaaaaaatggtattattattattgtaagtcacaaatatatagtaaaagtaatggttaatttatattaacaaataattaagtgtattcctgaattcaatggaagttcattagaactaaacataactcgtgatttggagaactagctagaatgaaagtgactttttcctttccgtcatgctaaatcttagtttaatgtaataattggacatttggaccacctgcttcatatttaatttagtgaatatctattcgtaccaagcaggcaaaaagctttttaaatcgtcaaaattaaatcagttttagtttgtgatcaaattatctcattttgcatgcagtgaaac

SEQ ID NO: 25986 - DNA, 946 bp, Glycine max
  Intron number 4 from transcript Glyma13g44740.1 (locus Gly ma13g44740) derived from phytozome v7.0 (chr-ID Gm13; pos 44126101 to 44127046 reverse strand)
tctggcaaacacaacaagttttccatcacaaaagcgtaagtactatatgtatgtacgtatgtgacagtaataatacattgtcctatgtatgcttcattccagaatcaaatcaattaaaaagaggctggcaagaaacttaatcgggtacacgcgatttcaatccgctacgtttaccattattgctcaatgggaataaaatcttcaagtactaagctaacttggctcgctcttctgttctatcattcaattcaattattgaacagtggcaagcaacaactacaaattcggtgttgagataatgtctaaagaaggacggaaaatgaatggacaaacaatttctaaaatgaatgctatattttcctacgatatcttcttatctagtgctagtggcccagagacaaggaaatttcttgagttttagctagggagcccatgtgttaaaaataataatacattcatattttgaggcggttaaatctcctccattatttaactacgcctcacctctgctcattttagtcatcttaattaatactttataaaaataatttaataaaataattattatatatatttaatatcttaaaaatatttaatatttttcgctgaataaaaatggggagattagcaaaatatatcattgaaggattttagaattattcaatttgaaactactattgtgtggatatcatagattgcaaattaaatactaatagctagacaccattctcgtagcagaagtcctctatcgagatggcttctaaagtggaagcttctaattgcatccaacatttacattgaaatagacatgagaaatattacatggtttccttttcaccattcaagtaagttattgactagattttctacgaattctttaattgaatattgtggtggagcttcgtttgcagtgattccggaagaaaagtggaagatccagagttgt

SEQ ID NO: 25987 - DNA, 787 bp, Glycine max
  Intron number 2 from transcript Glyma16g07090.1 (locus Gly ma16g07090) derived from phytozome v7.0 (chr-ID Gm16; pos 6386877 to 6387663 reverse strand)
aataattcctggctttggcttctctccgtcttcaagtatgttgttgtccctgcttctttggttaattgtttttgtttcatgctgcttggtcttcaatttaattccatagaatatatgcatgtatgtacttttggtattataccatatgttatttgtttttctgctggagatttgatattttttattcttaatctgtttatggtactaatttatggagctcccatgtggtaattttctcagtgctttcttgagaccatcctaattcatctcaaactggcatgctatttacacaacaggagaaagcttatttctcttttatcaataatttaggagatgacgtgctcattctcagcaaatattttctgtttattttaaatttaggtaggaaggtgcatatgaaattgatgctttgactgaaagtatttcagttctaatttcggagcccttctgaaatattgatcttatatataccagatgctgagtatcacctatcatatgagaaccttttattatttactattttgcgaccactttgatggtggacaattgcattctttcctgtgatgtgcttcttaccactatggactcagcttattgtattatgttagtgaaaagcttaggatcttcttctgtgtcttgaactaactcagacccacccttgctatagtgccacagtctatgttgtgtattattagaaaatatcaggttgccttagtcttttggatgtgattaattctcttctaactttttgtttacattgttaagctgcagcacaattcaagtagtt

SEQ ID NO: 25988 - DNA, 912 bp, Glycine max
  Intron number 2 from transcript Glyma16g03620.1 (locus Gly ma16g03620) derived from phytozome v7.0 (chr-ID Gm16; pos 3040152 to 3041063 reverse strand)
gcagaaggccttgaaaacagtttcaactctttcaggtactaaataatttttttcttttttataatttagccttcaattatcttgaaaaatgaattatttagaatcagtcaagaagacagtagtaaagggctgcacgtctcttataccgccgtcttcagtatttttgccttagatactttaatatctaaattttttggttcttctctgaatgttcaaatcaagggaatgaaagataacaaaaaaaaattgacactaagatctctatgcgttcttaagtttctcatgtatatttatttattctaattatttaatattatggataaattttttaatatttggggtattctggaatagaatgttaccttaaatcttacctggaaaaactaagacgagacgatccacccaattttctctccctttaggacaaagcaagcttaacacgaaacattagtctaaaattacttgatattgagtaataactaataagttaaatttattttctatagttcaaactgatcaactttgctccaattttaatcaagacaaaggtgtgtatacatgtcaacaaattctccaaagtttatatataaaaaattgcaattccttttgatatttgtgagagaatagaacttctgatataccaatacaaaaagcagttatatatatactttcattgaacaatttacattataatttgcatctaatatgattgacatggattaaactcttcaagttgtttcctggccaagagagttattgtttgataatttgtttcctattggattggcatcattcacatatgaagttctagttgataatttgttctaagaaaaatatttgttctgcttgagattttatcctttgaaagagaaaaagtcctaataacaagcttgtgcaacatcttaggaattg

SEQ ID NO: 25989 - DNA, 797 bp, Glycine max
  Intron number 1 from transcript Glyma13g32590.1 (locus Gly ma13g32590) derived from phytozome v7.0 (chr-ID Gm13; pos 34719881 to 34720677 reverse strand)
aacgtgcaattcaaccctcttgcagccacaaattggtactttttgctgcatccatcatcatcttcttttcaattatacaccattgaattgaaataccatcatgtacatgcttttgctttagttcactttttgtgtgatcatggttccccaatgtggtgagatgagacaggcaacattgtttttactgttttctgcattttagggatccaacgttaatgataatttgactgctaccttctattccctaaaacctgtttgggattgggattgggaattttggattcaattttgaaatggaaaaagcttttcttcagggttttgcacttaacaacaacaagccgtttaatatattaaaagactgaatggtacttgtggttgtaaccacaagattttaggttctttgattaatattttgcattgatagggcctctggaacttagcaacgtctgtaatgtgtgaattcatagttttgtttgttttggtttaatttttcatttgatccctatacttcgtctttatgttttagtccctacacctagaaattacttgttttagtctctatactcgcaccttttaattcgttgacagatattataattagaaagtgtgtgtagggaccaattgagtaattaaacctttcaatttttgctttttcctgcttatttggtgtcttaccccttcccagtacaaagcagctcagcatcctatagttgttttcgttatttttgtgtatgttattcattcaattaaagtctcattcctgttctttcttttgggtaatatggtcagccactcaa

SEQ ID NO: 25990 - DNA, 889 bp, Glycine max
  Intron number 1 from transcript Glyma15g12760.2 (locus Gly ma15g12760) derived from phytozome v7.0 (chr-ID Gm15; pos 9431473 to 9432361 reverse strand)
aagctacgaagctgtgttctgatccttcaaattaggtactcttttgttctcttcctactttcccctcttccaattcttcccttcccaacctgggttttctccataacccttcaagtttaactctttttccatttgggtctctctctcctccttcggatctgcttctgattccactttaaaccgctattccttcatcaagatctatttttttaattcaattctctcaggatcactctcttgcacctgcttctggtaattttccgccaccaccccaatacctttttttatctctccaaaaatctccaatttttgctggcaagtttgactcatactttactcttctcttggtcttcgaagtccacccttatgtgtttttgtgtttttgggttgattcttgacttgttggtgttccagctctgttgagctttactaatcggatcatgctatgcatgcgactttgctagggatataaaatatatatgctttttatttgcttcatgggtcttaggtttttgtcaactttctgttcatgaataatttggcatgtggtttaccactctggtggagtctaaggtctttggttggttaagtatcttgtttgtgttttggttatgtgatgatggacttttgttgtatcagtgggagggactgttttggttttacttattgatggatctatttatctgttgttgaatgtgagacaattttattgtgatgttatttattgatgtttgaagtgtttgcttagtggattggttgatgaatttctgtcaacatgttattcttaaactgagaatgtttttttttcccattttgtggggagatggctgactacttgtttgtgatgttgatgcctttcataggttgtttgctttttttggggagttaa

SEQ ID NO: 25991 - DNA, 798 bp, Glycine max
  Intron number 1 from transcript Glyma15g22280.1 (locus Gly ma15g22280) derived from phytozome v7.0 (chr-ID Gm15; pos 20908282 to 20909079)
attcttctttgcatttccaagttgagccaggtttacttttttagacttttgtttaatagaattgaatgatgcataggtacttaggtaggtaggtgttaagggaattaaaattaactacccttgtaaatcacttgaaggattccgctgttttaagagcaaaagaaaaatatgcttagaattcagatttgagttttaaaactagtttataaagaatggattgatcccaactaatttggccatattactaatttatgtaagatctttaacacacacgtctcacatcgaaaattggacataagtttgcaagaatgaacatctatggaatgactccataaatcctcatgataaaatttaagaaatttaaaaattttaagtcgaaaatcaaagttaaagaaattcatctttaacaggtggaagcatcaagataatgtgtctaaaaacaatacttttttctttatttcatagtgagaacaaaattatgtttcttctagacacattttctataggtcttccaacaattggtaagatatactttaatatcgtctcacaattttagtttgaacttaactccatcttaaaaattaatttataggataaaagttatcctctatttacatacactattttatccatgtggctagactagtcaaggtgggttctcgaacaaacaccattgttttggaaaatggtaggtgcagatcattttatccattctagtttatacctaggttactttggtttttaatgtgccacataataatgcttgatagttgatactattttcctaatgaagggaac

SEQ ID NO: 25992 - DNA, 666 bp, Glycine max
  Intron number 2 from transcript Glyma14g10630.1 (locus Gly ma14g10630) derived from phytozome v7.0 (chr-ID Gm14; pos 8840133 to 8840798)
aaccacttcaattatttaattattttgaaggtcgacatctatttcttctctttatcttgctctcctaaatggagcagctgacaaagtcagagccaaaattggatctctctagatatgcataatattattttattgagggctgtctaaatttcatatggcaggatctttaaagataatatttttggttatgaacatgctaggcagcatcaagcatttttcttatgaccaggatggccagcattttgtttagtgtgagggattaccctaataaatgcaggagaatcacactgaactgaaggttgtatttaactgagcacataactcatagcttctctccaggatctctgcattcgtttgcttaaattttggaatattttgggtcatgaacatattagctctttgtttctactgttttcattttgatttaatgaatttaagattatttgcagcttataccatgaatcacagtggatgatgtacattatttctgtattatttataaatgagatattgctgactagaacctcataatgaatgggcttgtttttgtatttttaattgtttttggtattcttttcccatctgtccaatttgatacacgtcataaacttcaataatcgagtgtgaaagtcacaggtggaggctatacaggcttgtggaggccag

SEQ ID NO: 25993 - DNA, 619 bp, Glycine max
  Intron number 3 from transcript Glyma14g37680.1 (locus Gly ma14g37680) derived from phytozome v7.0 (chr-ID Gm14; pos 46991088 to 46991706)
cttgtgcgccttcttcaaggtaatgataggtggctaatcaattgctttttttttttttttttgcaaacattactgcagaagtgtctttgatgttaatgggaatttttaattgctgtgtgaatcagggaagtcctaaaaaccaaagtatccaagagccaccggcaagaagagttaagagtagattgcatgattttttttagccatgtgaaaaggggtcgagagagaccaagaaagacatctaaggaaattattaaaagggatcttatgatgaatagtataataaaaaatttgacttttaactgagcccattgactgtcaagcaatctatgtagctgacttcatctagtaagataaagttatttttgttgttaccaaagtatgcaagaatgttggtcatggtggagattcttttttataagctctgctaatggatagtacgtttgtttgattttgctataatcttttcataagtattttgcgctccaccaagtgttaattgttgttgatccaaatactaatgttgaacagtttataaattattcccaacttataattttttggggggttactgagaatttgtgatatttactatgttgtgttgcaggctgcgctgaaacat

SEQ ID NO: 25994 - DNA, 543 bp, Glycine max
  Intron number 2 from transcript Glyma17g02440.1 (locus Gly ma17g02440) derived from phytozome v7.0 (chr-ID Gm17; pos 1578954 to 1579496 reverse strand)
ctaacgtcggtggatatcttccaataatagaacaggtatctatattcttgtcctaaattatgtaacttatctccagagatctaattgttattagaatttataatgattgagaataaaaatattaaaaaaaaaggttaaattatttcgttcatgattcttactttgaaagtgatttttgtagttattataatttatagtttaaaagtgtttttagtccttataatttacattttaattattttttaatttttgtaatttaaaaattataaaaattaaaaaaggtaaaaatcataaaactataagaattaaaaaaattactttcaaaattacataaactgaaagagaattaaaatgtaaattataaggactaaaaagattattttcaaactataaaaattaaaaaggaactataagaatcaaatgaagaatttaaccaaaaagaaatataataattatagattaataaatttaaattaataaataaaacatattagaaaaaatatttaatgatattaatgtgtgaattgattactgaatcaggga

SEQ ID NO: 25995 - DNA, 624 bp, Glycine max
  Intron number 1 from transcript Glyma17g04410.3 (locus Gly ma17g04410) derived from phytozome v7.0 (chr-ID Gm17; pos 2963125 to 2963748)
ccctttagtggttttggaagagcctaagtatttttcttctctttcattttattttatcatgttgctgcaaagttactgacaaagggcttgttagttcatctctaaattttgtttccttgtcttgtctatagtttttttaatggtgcaatttatgtttgtgttcctagtgctttatttcttttgaaaaattaaaatgactatttagtttatacgatcgaaggggaaaaagatgaaaaaaaatactatgtcaatttataatttgctttccatattctcatcatgtgaaattctgaacaatgttataacgatcaatgttgtaattaagtttctgtccggaaaagcaaatgatcattgatcaaaagttttgagttgatcataaatgccgaaaaggtgattccacagtgtgagaacttcaaaattcttctagaagtatgttaagacattgtatatacactagcatgagataacagcctaaccacatttgcataggtggtggttgattggttcttttcttttgtttatgtttggtgttgtttatcctcagagaaagtgtgcctagtcttattgatacttctttcagtgacttaaccggttatattgaaacttacctccagatagaggttc

SEQ ID NO: 25996 - DNA, 720 bp, Glycine max
  Intron number 1 from transcript Glyma13g19330.1 (locus Gly ma13g19330) derived from phytozome v7.0 (chr-ID Gm13; pos 22886472 to 22887191 reverse strand)
aaccccatcaacaccgtctttggtaagatccccctgcttcaaatttagtattgtacggacacggtcttttttatgacatgtttttttttcacgttgatgttgctgttgttggtgtttttttttcgtgtttgacttggaatagatcggtgtttttttagttgttcttttttttttggtaattttttgtcctgtttggttttagtttgctgatgtaagtgccttttgcatttcttctccggggtgtttgatatggttttgatgtatacaaataaggaaagctgaataccttttttaaccctgatatcatcctctttaagaaatttttatgcattaaactagttgttaagtgaaagcatgatgatattcttattaaataaattaataaataaactagttgttaagttcgtttccctaaaatactgcaattgaattgacattgacttgcagatcaggttgttttagtatttgttcagtgcctttttctctcagaagatgttggtttgtatttgttaagtgaaagcatactgttgtcattattaagtaaaacagttagggttttgactatatattgactgttttgactaagtagattgaattgtcattgaggttgttttagcatttgttcagtgccttttctctcaggatagatgttggtttgtatttgttaatgtgaattattataggattgcatatttatatttttctttgtgcctcttgcag

SEQ ID NO: 25997 - DNA, 638 bp, Glycine max
  Intron number 1 from transcript Glyma13g41800.1 (locus Gly ma13g41800) derived from phytozome v7.0 (chr-ID Gm13; pos 42010732 to 42011369 reverse strand)
gagatcgcgcacttgaccaatatcaccgctacaaggtacgatccgaattccgaatggtgctaggaagtaggaaatcaacttaaattgcttttaatttctcgtgttaattttatataccaggtaaaagaaatatacactaattgctataacagcttttaattgcttatattgccataaaaaaagttgttcacctgctatataattttggcaatcatatatttcatgtgttaattgcttttaatagtacgtgttaattttttcgtacagctttaataacgttaactgctttcaaattggttttgccatatatatgttaagttttaaattgttttttttttaatttgatagataaactaaattatataagggaagttaattttaataactatagatcactgtattgttttgatcattaggtcattgtattgttaaaaagaagatcataccaaacaaattattgttgatttatgtgttaaatttttgttctgtattttttttttctgttcctgactgtaatataactatcaaattgaaagaaaaattaacttatacactgtaaattataattgtttcttttgaattttattattttttaacttactgaacatatatatacatcacaggaagacgttcagatc

SEQ ID NO: 25998 - DNA, 785 bp, Glycine max
  Intron number 1 from transcript Glyma14g00850.1 (locus Gly ma14g00850) derived from phytozome v7.0 (chr-ID Gm14; pos 445431 to 446215)
gccactgttgaggtaactctactaaaatacttgctactctactctaactcacatggttgctcagttcagaacccgcaaataaattcccttatgttaattttaatttggaatcaatttcttttattttcagtttgatctcaaccatatccttgcttcgtttttttttaatttttttttatcatcatacccttgcttctctgttatcttagacaggaagttattcatttctttagcttcaatactccaactgtcattttttttcctgaaattcttgtcacctaattaattaaattcagtaaaatgacagcaggcacttggcatcttatcaatatatatatagctttgtcaaaaagagttcgtatacttgttttcctcagaaaattgtatagaaaagtacaaagtagctgaatgcaaatttcaattagtttgtcatcagacacagaagccacacgaattatatgccttttccatcagtcatatttgttcgagtattaaaagacgtattaaatctatattaatctgacagctttgaaattttatccttatataatatatattgctacaactatgagaagtgatacattaaccaatagttacaaagtaaagaagagtaagaagtgtttaaattaaaccgcatgtccaccaccttattaagtttttatctcagcagagttctagttggaattctaataaacaaaatatgaattttcatccgaatatgtctttgtctgttggaatacgaaattgtaggttgtgtcagcaaaggtttccctcccagaggacac

SEQ ID NO: 25999 - DNA, 661 bp, Glycine max
  Intron number 1 from transcript Glyma15g02660.1 (locus Gly ma15g02660) derived from phytozome v7.0 (chr-ID Gm15; pos 1804638 to 1805298)
ccttggaacactctcgtaagcttttgatttgcttcaaatatatgtttctcattgtcagttgttctatgccctatttttttttcttttcttttcaagaaaacatatttaaagatgtcaagtcacactgtataacacatccttttatacaattttttttgttagttaaaatttattacataaagcaaaattttgtgagtctcatgatattaaatgaaattttcataatgatttgttagtcttttcatgctaatttgattacaggttttttttgtgggattgtatcccacattttgtttcaaccgagttctataggaataaaattggtcttccaaattatatgttcaaatagtttgtttcttcatgggtttggtgcatgttctcccatgattttgtatttgtctttgttttattttaatgaatttcttgggattcttctaataggcatcatgttgatagtgtcaacctcattgagatcatgcccacatttgtctatttgaatggtctcccttttggttaaaaaatcataatgatgttactttcaataagctctacataacaataaaaaatgtattagaaagaatgtgtcattgacacttcacaacattttttttagtttcttattatttgcattttggtttggttttggctttaataggataag

SEQ ID NO: 26000 - DNA, 461 bp, Glycine max
  Intron number 1 from transcript Glyma13g17860.1 (locus Gly ma13g17860) derived from phytozome v7.0 (chr-ID Gm13; pos 21556300 to 21556760 reverse strand)
atcttcaacaaaacctcacctcggtacattttttttctttctcttttttatattgcttgctgttcagaattatgagttattccattgtcttatttagataaatttctgcacaataattatacgaagagaaattgagaagattggaaaaattgaacattttgataaattaaaattaacttaggcacgttatcttctggaaattaaattagagaattctgtaaaagttgattttgatgggagaagcttaatttttgtatttcttttcttatatagaaaagttgtactcctaaagttgattttgattagagaagcttattttttgtatttcttttcttatgttgaaaagttgtactcctgatgttttgcaatctgacaacgataccagtaataatgataataatttaagtttttcgtggcaaaaataaaattgaagctaagtttgttgttgttttgtgtgcagg

SEQ ID NO: 26001 - DNA, 303 bp, Glycine max
  Intron number 1 from transcript Glyma16g23580.1 (locus Gly ma16g23580) derived from phytozome v7.0 (chr-ID Gm16; pos 27403249 to 27403551 reverse strand)
gagaagaaatccaccgccaaactccaagactccaggtactactactcttttcaattcaattccctccgtttcagatccctttccccttcgattactagggattaaccaagaaaactacgtgttataaggagaaggcaaggagggagaggtcaggggttcgaatcctctgctaacgaatactaacaactaacatttgcaatcaaagaagaaaaataacaaaaaacgacgtcgtttcaaatcgaaccctgattttgtgtcgttttcgcaggtcggtgaggaagatagtgaatctggacgaccaca

SEQ ID NO: 26002 - DNA, 645 bp, Glycine max
  Intron number 1 from transcript Glyma16g18370.1 (locus Gly ma16g18370) derived from phytozome v7.0 (chr-ID Gm16; pos 20121966 to 20122610 reverse strand)
gtcgaattcgaggtcgataagattcctgcctctgggtcagttaccaattcttcttctttctataggattgattctgttcaatctttttatcgaaaaaaaaaggaaaaacgaacatttggggttattattcatacgatagcagaacaattgttggttaatttcaagattgcgaaaagatgaaaaattattagtgcaacaaacaaacatgtgattataaagattgatataaacctgacaatgacttgagactctagttttttatgctagatcaagttagggggtctgctatctctgtattaggaacatatgcttgtttattttgaagttgattgaggtccatatgaaatatttttatttcatttggcatcaagcaactcttttgtttggtattttctagtttaaatcaatgttgaagctattccctttatctgaattatatatttttttagcattaggttcagaatttcgatgtcattgtaaactacctggagtatttcttagcttttttgaggcagagctattcaattcaagaaatatataaatataaatattttgtgtcagtgtttaattcctctatttatttcagtcagttgtatactatgtttgatataatgatgattttgttgttaattttgttcagaaatc

SEQ ID NO: 26003 - DNA, 961 bp, Glycine max
  Intron number 1 from transcript Glyma14g08330.1 (locus Gly ma14g08330) derived from phytozome v7.0 (chr-ID Gm14; pos 6352392 to 6353352 reverse strand)
cgctgacactcacctgcccccaaacgagttggaaggtgagtgagtatttttgttcgctcactcttccttgattattgatgttcatttgtttttgtgttttgcattggtaaggctttgtttgggttactattactcatgacaatgagtggaatggaatattattcaatggaataaaataaagttacctcactattattttgaaatttttataatgaattggaggaaagtttctatataactgtttgagaagtgaatggaatagtattgggttgaatgggacaggttctgtaactgattgattctattttcctccattccatgtctttctatgaatccaaacatatcataagagttacatctaacttcatggtttttaatgtcagaggtcctgtttggataaacttcttcataaatacttacagtagaagaaataaattaagcttttcccataatttagttgagtgcacttcagctgttggagaagttagatgagagtactcgtataaaatttaagtgctttagttgattttagcttatgggataaacttaagggcatgtttggctaaccttctttagaagcacttctaagagaaaaaaataagaagaataaaatgtgatgaacttctacataagctaagatgagctaatggagaatctcatttcactttttttctttttattttcttctcctaggagtgcttctaaagaagcttacccaaacgggccctttggttttaccttcttattttcttctcctataggtgcttatgcaaaagtttatgcaagcagagctaaagtctagatacctgttttttgtggtggctaactattatattgagtttcttctgtcattggcacaatgttggaatcttttttagttagattttgtggaggtggctggtgaataaaaacttactgcatgaatgtaattctttgatttctcagattcgcttagtgtgca

SEQ ID NO: 26004 - DNA, 986 bp, Glycine max
  Intron number 1 from transcript Glyma15g11560.1 (locus Gly ma15g11560) derived from phytozome v7.0 (chr-ID Gm15; pos 8517873 to 8518858)
atcacaaccagtgaccccagtaagtgtcaacacctgaaatttcttctagtctttattggttaatttagagcttttatatttgttgcgaattgcgattataatgtgcgggttgctagtggcttcattggcaatatggaattttaatgattgagattagatttggctagattcttgtgagtgaaggggttcggattttcatctggttattatggctttaaaatccaacttgttttacccgattagcttgttttatgatccaacagtctatgataaagagaaggctagtgaatcataaggatttctactaacgattagaaaagggggaaatttgagctgcggggaggcaatgatttctgttatgaaaagcatttgtgtgtggcacccacatagtgcaaaggctctttgacttgactctacttttacgtgagaaaattcaattaaaaagagttgagattgcaattccttgttgagttggtgaaccataaaccttcctatgactgtgccgtttggtttaggattgggacagagttgaattggttaaattgattatgaaaaagctgagagaaaaactacgttggaacatatgttttcattagtattttttagaaagtgaaagaattaattctctatgccacaataaatgcggtgttaataggatgctggcttgtctgtgtctgaggtcccctgtttggccgtttaccctgacaattgcagagattctgtttcatgtttctggattaccttcatatactagtcactttcttgctgttcagggtacaactttttcacagtttcttacataattcttgctggcaaacccaagtatatcaagtatacaatgcaagcatattttctccatatctatgtaaatattgcattatatgtctttctctttgttgtctattcctagtgttgagtgtaacaattgtgattaatatattttttttaaccattcttgtggggaatacctttgcaggtcacggtaa

SEQ ID NO: 26005 - DNA, 1002 bp, Glycine max
  Intron number 5 from transcript Glyma16g03840.1 (locus Gly ma16g03840) derived from phytozome v7.0 (chr-ID Gm16; pos 3208459 to 3209460 reverse strand)
ttatttgcaaaacaaaattcggaattagcttccaggtatataaatagcttctgtttggcagtttaattaaattttgtctttattcttgtccttaatgtattctgattctgtgctcaatttagttgaagtcttgaagaacaataataacagtgcattttctttatgactaattgaattgtttttaccttgtctgatgcaactgtgtaaatgcagcagggcataagtcagcttctgtgatatgtttagattgctttgtgggcttagatttcacgcataattgttcttggtggctgttagaatattagggctatttttttggttgtgcacctttacaaatgctttatggatccattataacagactgaaagattggtactatgattatctgttcgttaatataattttggtccttttggatgatcacatgattagattatcaggaaaaatactcaaagtttaagcatttagtattctgaccccaattataaatgtttagaccaggaaaaataaggatggaacctaggaatcaactggccgaccccttgttagttaaggatggactatgctaataaagctgtttatttaactaagtaattacctacctacctaactaataggtatattcctaaccaggatgctgaaggaattagttagttggttaattagttttgggttgggatttcaggcacttgaattcctgggaagtacctaacggtacatcattcttgctcttcttgaccctggatactaatggattcagagttggaggagggcatcaaaaacagatttcctcattttgtttgtgctaactgtatattctcaacctgtatccctattagtatttagtatttacattaaagtatatcttcagtctgcttgtacatgcacttgttcattcattttcaaaataccatagtcgcttgcattctgcccttatgtgtgtgtgtgtactttctgaatcatttggatgtggtgattgtttagggattgtactctacttac

SEQ ID NO: 26006 - DNA, 397 bp, Glycine max
  Intron number 1 from transcript Glyma15g13000.1 (locus Gly ma15g13000) derived from phytozome v7.0 (chr-ID Gm15; pos 9682359 to 9682755 reverse strand)
tcttgcactagcatcctctcttgttgaatttcaaggcatgtatttcaatggcttgttaattatctagttcttaactcttctcttcataagttacaatctagttcccttttctgtatagaggcttgtattttattttatttttttaaaatttactagaatattacatttacctgtgatacttaaattaaagaaagcaatttgagtttcattttcaatattataatgaaattctgaataccaaggagagtttgactcggttaattaaggtgcatgagctattataaactcttaatacttattttcgattccttcatatataaacaaaaacgaatgaaattctgaatttgtgcaggtatttatgtatattaaccttgcaaacagtccaattttgcagata

SEQ ID NO: 26007 - DNA, 1009 bp, Glycine max
  Intron number 1 from transcript Glyma15g39210.1 (locus Gly ma15g39210) derived from phytozome v7.0 (chr-ID Gm15; pos 45813131 to 45814139)
actgtgctgttggggtaatcacatatctcaatctctctttaaatttggcaatgtgtttcctatgcttgtttcttgcttacttggaataaggtacacttgaattggccacatgcatattgattcatgcatcacggatcactttaatttgctaggtgtcatttgatacatatgatggaccattagaaaaaatagagtgtttagtgtttatttggagataaatattcctatttgatttggatcattttgactgttgtagccaaacatggttgaaatccagcatttaaaatacattctcattataaatttttttgcactgtaatctaattacaaataattttagatatgacttttaaagtaattattattaaatcacaatcttaccaaacatgatcagttatgattagactagaattaaaatatacaaggataagatgacaatttgaggtagaatatgatctgtcacatgaccatctttataagatgttcgtaataactgtaatgttgttgggaccagaacttacttctggtttgaaaataggatcacatgcagatcttggtctcttcattgtgtggatgatgacaatcaaaacttacttgaaacacataaaataaataaccggaccatgaccatttgcacttttatttcttcaacatcattaaccttccattcctcactatttttctcctcacttttacactatttttgagtacttattttacttcatagaaaaaaaaaatacttttattatctaaaatgaagtgaattacattgtagtaatattagtcaacacatatataagtataacacattattagttaatagttaacacatgtaaatagatgacaacttaaaaaaattcagagtgcgagattctagttaaactcctaactatattaacctatattatgatttaacattttaagattgtaattagaaatgttgattgaagtgaatgtgacatgaaacactttgtttgatacacttcaattgatcaaatacaatgcaggg

SEQ ID NO: 26008 - DNA, 785 bp, Glycine max
  Intron number 2 from transcript Glyma15g02560.1 (locus Gly ma15g02560) derived from phytozome v7.0 (chr-ID Gm15; pos 1751945 to 1752729 reverse strand)
agatacgagtatgatttttgacatttatttggggggtccattactccatataatttatgcataaagaacgtgctgttttacttttttttttaaatgttttgttgaagtattgctcttcaaataatttagaatatggagagttacactgcttccagtttgccatctcgactagaacataagatttgactcctctaacatgattggtttcccttaaagagaaaagtgagacatttcagcctttaatgagaaagttaatagaatagaaaatttttaacaaatttatgatttgttatgcatgcacttgtaataccaacagttgatttttttgttagccattgagattcccttagtttttcatccaagattgtgactcttctgatggttatgtacttttgctgtttacaatttctgccttttcatttttattgtaatcatgtcaaagtcaaacgttggcaaactgctaccagctatgactgctcattatgccaactttgtatgtaacaaactttcaatcatcctatcacccggcttgcaactttaatcttaaaaacataatgcatctgtgtgtaacaaaaacataatctagaagaagactggaaaagaaatggaaaaggaaaatagttggccactatatcatctactatcccaagacagatacttcagcttactactttttttattaattgtgctgttctattgttttagtcctcttatggatcgttgatatgattccttaatttgtctctatagggaactgttgttcttgtttttcaaccagcagaaga

SEQ ID NO: 26009 - DNA, 345 bp, Glycine max
  Intron number 1 from transcript Glyma13g07130.1 (locus Gly ma13g07130) derived from phytozome v7.0 (chr-ID Gm13; pos 7300673 to 7301017)
tttccactccaaaggtactccccttcatactttctatgatcagtattgtaattctctacaagcagttaaatctgcattccactaattttcagcagatacagctaaagggttttataataattgaaataaacaagggagaaaagaaaacccaagtcagaaaatttgtacagaggcaaacttagatttctagatttaattgtgaaatggtatttaaccaaatggggtttgtgattttgttgttacctttgattattggcgttatactttccagttccactgtttagtagtataacttggttatgacttatcacgtgttcttgtgttgttaacttcagttggaaagca

SEQ ID NO: 26010 - DNA, 867 bp, Glycine max
  Intron number 1 from transcript Glyma13g39050.1 (locus Gly ma13g39050) derived from phytozome v7.0 (chr-ID Gm13; pos 39770800 to 39771666)
tagatattgccgccagcaactgctttttttgttaggtattttcatatttacttctacacagcttttttgtttatatatgcgaattttcgattacgttgttctattctactcattactcaaactgatcaagttgacagtaggcagtacacacaaaaacctttgttggttcttctagataactcctcagcataaaattttgatttgactccaaacttgttaacatcaacgaggtggatatatagatcttggatcccatcaactatccctctaatgttcaaccatttcaacgcttccgaccaccctttaattttgatcccgtcattctatatatgtaacattttggtttgtctataattccctcaattttagttccacaagagatttttacattttcttttgaagcttaattgcctctcttgaagaactgtttcaattggttcaacttgatttcgatcttaaggaacctgacatctctttctggttagttttcacacgcactatttcactttacacttgttttgatgggtggattcaaggttttaacaacagaaattttggctgctacgttaaaattttgggtggtcggggatcacaattgtgaccacatcgaccgcatttggcgctaacgggccaaaaccacagctgcaatttaaatcttccgttggattaaaataaaaatgacttgctaattgctatctccatctctcgatcggttgctatttataatcagacgactatttagtgcgtaattgatttagcttgatgttaaaaatactgttcacaacaatgaattctgaaaaaaagaaatctattatttcttgaaaatgaacagatctcaaagactgagttagaggaagagttactttg

SEQ ID NO: 26011 - DNA, 923 bp, Glycine max
  Intron number 1 from transcript Glyma16g25490.1 (locus Gly ma16g25490) derived from phytozome v7.0 (chr-ID Gm16; pos 29507568 to 29508490 reverse strand)
ttatccagatccttctcaaggaaaaggtaacaattgtctaaaacattattttttataaggaccatgttaattagtgcgtttaagatattgattaaagaattaaaataaaaaaatgtttattatgaaagttataaaagagtataataaaaatcataaaaaatataattttgctcattctatttttaatttcttaatcaatcaatgcattaaagatattggttatcaatatgccttttaataattctacttatctattggaaacatacgagcattgacaacctaagcacttagaggagttaatttttgtcacttaactatacatacagatgatcaatattgctttagttaataaatataatatgattaaaagaaatgtttgtctaaacttaatatatagaggtggaatatattatgctaaatagttataaagaaatattagtaatacacttttaaaacattttttaacatattttttattattaacgaaattcattaaaaattataatttttttagtgctattttttatttctttcataatttgataatttcaattaatagtgaagtttgtgtctaattagtgctcttcttagtcatatttaatgaacaattaacaaatataaaagctatagtatagtacacgaaaactataatgctcatcatatatatttgacattatacactcttacatgacattacgaatgactgttttgtcatttattaaaagaaaatcgttttggaagaacttagaacaatgaactttgatagttaatccttaaacttgtttgtacttcggaacaagaactttctttattaacactataatattgtttcaaagaattttggattttttcccctttagctaactggctacaaaataatttgcacagcgagtaactattacaacagtgggcaacaccctctc

SEQ ID NO: 26012 - DNA, 727 bp, Glycine max
  Intron number 1 from transcript Glyma13g05380.1 (locus Gly ma13g05380) derived from phytozome v7.0 (chr-ID Gm13; pos 5702498 to 5703224)
gaacttccacaagagacaggaaaccgaagtggtgagtgagtgctcctcgcctacctccaatggaacttaatcagagctagcttcgtcataatgtttatacctcaacaattatgctgctacactccatatcatatcccttgtaatatattttgtggaatttgcttttgcttgttattaattaagaattggggttttaattaattaagcatactactgaactagtatgaatgaatattctagaattgttatatatagtaattctagagtggtaatgtatggtgatgattttgaggttgatgtgtgtaaagagaaaaagggcaatcacaagttgtttttgtgatgatgagtgtgcaaagttttgaccatcttctcttcttacatgtttggtttaattaacttgttttgaagaaataattgcttgttttttttgtaaaaagaaaaattaattatttctgagaaatagtgtttccaaacatgtaagtaattactcggttaaactaggcttttattgttgctttgtttatttatgagcttatgtatgtaagttgtgttatggattttgctttgtagctacacaatgtagcagttgtgatcagtttgaaatttgatgaggaaaattggtattggttttggttttgccttaattaatttttttgtcttttcgtggcatgctgattttgattcctttccagatcatatcatttgaggattccacgctataccaaac

SEQ ID NO: 26013 - DNA, 942 bp, Glycine max
  Intron number 1 from transcript Glyma14g04550.1 (locus Gly ma14g04550) derived from phytozome v7.0 (chr-ID Gm14; pos 3125944 to 3126885)
tcatcacacgagaaaacccacgtctggatcttctggtaaggttcccctcatgaagaaaaaattcccgttttcattattcagttacttcttgattgctgcttggtctataaaattctggcctttttgtttttgttgtgtgttttttctttttttgttggtactatttttacactatgatttgctatgttttagtctttttcttagccttctgatcttcagttgatatatatatgtgtgtgtgtgtgtgtgtgtgggtgtgtgtatatatgtatgtattctttgctgactgttgctatttatagtgttttggggtttctgagtgattggtttggccttaaatcctttgttgatggctggtttgatttgtttcctcatctgttttgggaaagaaaattttgaaacctttcagtcgtcatatgtttgatgatgggttgatgagcgatgttttcattttttaaataatcgttgaaccatggcatgtgcttttggtgcttgtattttgactattttcatttttaaatttttgggtgatttggatctattcaatcagaataatcctgatccagtaactgttttgatgaatggtgttttagggggaaaacgagaattttgagatttcatttagtgatatgatgcgtcgatgctttgaaattattgatgtatttgtattgtagctatgcaatataggtgataaggcaactttagattttgctttttagcctatatccaatatggctggatgagaatgaaagaaaaaatgtgctggtgaaaatcgggtggctagtgaatctcatacaagatattgatatagattttatgcttttgaatgttgatattcgcttcatctggaaagtatcatttgatctttgcaccgtctcaattgttccctgtttttgacttttggcaggtgtaaaggccattagaagccttttagaaattttc

SEQ ID NO: 26014 - DNA, 521 bp, Glycine max
  Intron number 1 from transcript Glyma13g20970.1 (locus Gly ma13g20970) derived from phytozome v7.0 (chr-ID Gm13; pos 24458282 to 24458802 reverse strand)
ctccaactctgctgaagatattgctcccacaattggtaattcattgctgcttccaaaaaattgttctttctctctcatgcttgttactgcaaaagtttttttttggacaaaaccatgaagagaatacttttaaaaaataaataaataaataatatgaaaaattgtgaagttctcatgtgggtttcaattgtgctgttgtggaccactcatgaacgttttgagaagatgtttaattctatgtactatatatgttcttgtttgtctgttatgattggatcagtggtcctcagttattgaatttgcttgatactttggttataagatgtcattcagtacaaaataactgttctattgttttgttcctgctatgccgttgaaattgaccttgaggttttgaattgataatttgatggtcatgctgttttttaatcagatattagttctgatgtgatgtgatgtggtgctatttgttcttatcttttgttgttctatgttatgtaggtgttgattttaagatcaag

SEQ ID NO: 26015 - DNA, 667 bp, Glycine max
  Intron number 1 from transcript Glyma14g09890.1 (locus Gly ma14g09890) derived from phytozome v7.0 (chr-ID Gm14; pos 7946152 to 7946818 reverse strand)
cgactccggcccgcccattgcagggcctgtggaaggtgttttattgctcaaaattgttgtattttgtgctcaattcaattgtgttctcagtggtgatttgattattgatgtcattaactagtttggctttgtcatggttttttgagtcatgataatcaaactgctaaatgttgaattgagcaacagaaatagtcatgatcaaaatgttgatagatctcaattttggtggtttttgggctctccacaactggaattatagctgcattagccacgtttgtctgcaatgtgaaggatagcaacaaaaccactgctgcaatttagaacattgactatggttgttgaaaattgggaagttgctagatgttgagaaagatgggaaaatttgatctttgtcgtctcttaattagacaatgtggaaagataagtggatttggattggaagatcttgtgcatctatatattattgatttcatttcaatgtagatcagcaaccatctgtctgtgttggttgcattttgagtgaaccttggatatactcctaaatttgcctttatctttttaaatctattatgattttggagatgagtgatggtggagttttttcttgtggttgtatgatggttcattggatgttttactgtcattgttgcagggaatttgcggtgac

SEQ ID NO: 26016 - DNA, 504 bp, Glycine max
  Intron number 3 from transcript Glyma16g01660.1 (locus Gly ma16g01660) derived from phytozome v7.0 (chr-ID Gm16; pos 1244061 to 1244564 reverse strand)
ttcaagactctaagcatcggaagacacttgctgaggttagtctcgaatctactttgtttgtgttatactataatttgcaaccaaatgtgtggatcatctgacattgaagttgttttagtttaactactcgagttcgagcctaagtacgtagttgcattaaatactccattttgccacctatagttgtcttatctaataatctagtttgagtagaattgtctcctgtagagcataccatgtggtctaaaaaaattgcaattattttctattgtaaaccttatgaaattaggggaggggggaagaggggcaaatatattaccctagtgatatttgggaaatttttgttttctttttggtttttctatttggaagaatgaggttcttctatgacttgctatctagctaggcctgaatgaatgatcagttggaaagtttgagttgagatgatatgttgaatttttgtgcatttgtttttgtttccttttcagctagagaaaggtgtgg

SEQ ID NO: 26017 - DNA, 713 bp, Glycine max
  Intron number 1 from transcript Glyma13g17560.1 (locus Gly ma13g17560) derived from phytozome v7.0 (chr-ID Gm13; pos 21327145 to 21327857 reverse strand)
gctggaccactttcagatctgcaactctaggtaaaccctttatggatggaattattaatgtaactgacatgccttatcttataactttatgaattgatcactttgatttgtgtactgaatatgccaaatgtctttgctttgtgttggtggcactgactaatttgttatagtttcagtttggataagcttttagcttatgagagcttttttaactgtaaaacttttaagaattttttatcacaagaatgttgaactttgttaagtttaatgatacctgtagagaagtgagagcttatgaaaatggttgaggtgcataggtttattataattaagaaaaaactttagatacagtattttaggtgtttctaatgtagctgtccaatcagaattgaagtcttatcttaataatccgtataataaagatttacattaaaaccaatataagttacctaggtgaaaatttcaattctgatcggaaaacaacacctaagcaattgcattttaagttgtcttttaattaataagagaaatttaatttacttcatcttcttttcacctgaccagaagtctattcaaattgactcttagcaacatgattttttttcttcatgttattgttgatttgctcaaaatggcaattgcatcatgaccattgtctcttttttctttttttttcagcggtctctggtgagggctttctggcacgtgatata

SEQ ID NO: 26018 - DNA, 314 bp, Glycine max
  Intron number 1 from transcript Glyma17g02740.1 (locus Gly ma17g02740) derived from phytozome v7.0 (chr-ID Gm17; pos 1804775 to 1805088)
ctagcaaaaataggctgaaggtgagtcctggtattcagaaggtgaatttgtttctttaagtctttagaaaggaattattttcttatacatgtactgagttaaaacaaaggaagaaattttgcctttgctctttattgtttttgcccgagtgctcttgtcaagaagtcattataatatttttttagcattttgtcaatgtatacttaggtattgaaaaaagtttggttaacttggtcaggcattatggattctatttcttaacttataattgttttttgaatttcaatgatttgcagaagagaaaattggctgac

SEQ ID NO: 26019 - DNA, 537 bp, Glycine max
  Intron number 1 from transcript Glyma15g21990.1 (locus Gly ma15g21990) derived from phytozome v7.0 (chr-ID Gm15; pos 20572874 to 20573410)
gtcaaagctgataaactgtctgttcatcttctctctctcatttccccctatgtattatggaaccttttttttttgccttttctcttcaattcaatgccacaatctaacactcaaattatactgtcgattttgctgcaactaggtttaattcttctgttgtgtgggttttccatgttgatcgtagcggaatgtataatatataacaaaataaaattgataaagcatacaattttgttttaacatgatttgtcctaatgatgcgatctaaatactgttggatcatactggtcacggaattggggttgaccaaactacttgatggactacattactttgatgtcattttttgtttttgtttttcagtagtgtgagggaatcttcagtgtatttgcttaatgttctcaatatgatttaactgtggttaagccaattgggcatattagttgtgctgtttctctttccattagctatgggttttgccttatatttcttttcactgcagaacaagactcagtctcacgaggtggagtgcggatt

SEQ ID NO: 26020 - DNA, 813 bp, Glycine max
  Intron number 2 from transcript Glyma14g17040.1 (locus Gly ma14g17040) derived from phytozome v7.0 (chr-ID Gm14; pos 18556044 to 18556856 reverse strand)
caggttcgttccgaaactttatatgtatacccttcatttacttgtggcgtgtttggataatcttctccataagcacttgtaggggaaaacaattggaagagacaacaggaaagaaaagtgaaataagcttctccataacctgaaatcggcatatgcattagttaaaaataagtttttggagaagctaatatgaaagatcttctacaaattagctttatgcataagctaattttaacttatgattcatttaacttctctgtaagcacttataagagaaggaaatacaaaggaaattgaattgaacttttcttgtaagctaaaatcaacttatacatatagacatttggagaagttagatgagaaaactaatataaaagttaagtacataaaattgattttattatacattatagtttgtgattaaatgacattgttcaaaccatggtagtttgtgattagatcacaatgtgaaaaccatttgcgcaatcaacgcatacactatttattcttatgaattctaagtggttcaatgaaagagaaatgagaggtacagatttttatattcattgactgccgacagcatttagttacagttgtatcagacagttagagaggtagccaatcctcaaaaatttggttaggataaataattctacatacgctaatatctctaatacggaccctaatttaaaactatgatatgattgtatctagtggcactagaatttgtggttgagtattttgaatctttgacaaagtcgtgattaagagcacttattttatttttttttgttttttttttggtttaggtag

SEQ ID NO: 26021 - DNA, 680 bp, Glycine max
  Intron number 1 from transcript Glyma14g07670.1 (locus Gly ma14g07670) derived from phytozome v7.0 (chr-ID Gm14; pos 5796695 to 5797374 reverse strand)
caatgtaagtctaaaattattttcatctgaagcagtgagttgaaaaccaaaacctatctatccttcccaatcttcgaccatggaaaatgcagtgcttattttgaattctattcaatctctagtttcgtgttaggaatgcttagtttgtgatgcattgatcttgaaattaagggaaattatgaatttatgatttcatatgcacatccagtctgcattcttgtcctgtgtaacctgtttatgcgttttatatgttgtgtatattttgggcgttgccatggtattttagactgaaatctgattcatgcttaaatatcatatttaagttgtcattgtcaataaataagctgttgatgttttgaggatttttgaaaacttgagttagttcggatttgttgaggcttaattctttgttgtttatgtggatccatttttctacttacttctgtgatggaaaagatttcaacttaagcagttccttcttagttgtgttttttgaacttgtttttctgagagaaaaagaaaactgaatttgagctcatgcagcattgctacttctaacagaactgatgcataaggtgttttattggtttctgtgtgtggacaattatgaattccagtttatatacttgtattatttctcttgtcataacttttggtactaatttctgtacaggctataa

SEQ ID NO: 26022 - DNA, 612 bp, Glycine max
  Intron number 1 from transcript Glyma13g14900.1 (locus Gly ma13g14900) derived from phytozome v7.0 (chr-ID Gm13; pos 18672806 to 18673417 reverse strand)
gaggtaaaaggataactcaaaatgcttcatgctgataacttctattcgtgtgtgttttctctgtctttttttttttttttttacatatatctgataattttcaacaaaaaataagagggggataaattgtttacttttaggataacttcaacagggttgagaaaagaaaagtagagaatagttaatgaaaatgattttttttattatattaaaaatataaaataatataattcttactttatagtttatactaatagaagaatttaatattccctaaaagaaaagagcatttaatagtgtttttttttaccggtgccatcattgtgctagttagtaaggtgctaatttttatttaattgatgatatttcttcacctttcacagtaacaaaataaaaatatcagttgatatttgtcccctgtgaatataactaacattgtgaaacttaattaaatgattttatcagcatcatcataatctgaactttgaagagtgtcatctctatgtagactagaacattatcagtcatatcacgtaggattgccactcgattcaaagattctgacaacatagtgtttgaaattcacaggacctggttgttcctcattggggt

SEQ ID NO: 26023 - DNA, 664 bp, Glycine max
  Intron number 2 from transcript Glyma16g07940.1 (locus Gly ma16g07940) derived from phytozome v7.0 (chr-ID Gm16; pos 7191352 to 7192015)
accaagtcacattctaatggctttctgtttatgatcaacagagtaatacttctccaaaaaaaaaatttatataaagcacattaggtgtctgcttatcatacaatccttaaacaatttttttttttttagcttgacactaattactcattcccttttgttataaattaaaagaaaacattttttttaattaactatggtaaattttaactaataataaaaagtacgtcaaaatgagtattagaaagtgcattgataatcctatccagggtaaaaatatctgaaaggaaaataatattgagacacctaaaatgttaaaggactgctagtgcgagaggaaaaaaaagagaaaaaataaaataatataagtagtatgatgtgaagaaaaaagatataacgattaatgttatgtatttaaaaaaaaaaaagtgttcaattgtcattatcctatctgaaatttactctcatttcagtttagctttcaaaatttcttacaatcaaaacaaaaccagtactattcagatatctgtcactgtctgttacaaaattattcaccaattccccaatgcaggtggtccaaaatttccaagcatctaactggaaggactgataatgagatcaagaactactagaggacaaggatccagaagcacctcaagcaagcttc

SEQ ID NO: 26024 - DNA, 338 bp, Glycine max
  Intron number 1 from transcript Glyma13g09620.1 (locus Gly ma13g09620) derived from phytozome v7.0 (chr-ID Gm13; pos 11119231 to 11119568 reverse strand)
ttcttgggagtataaacaaaaccatcatatgtgtttctttggatgaaacttacacacattttttaagtgtttttggtgttgttcttctaccagaattggagtttcatctcggtaatcagcataatagacgtttgtgtaaagattattgaggtgaaattgtaattcggattggaaaacaacatcaaaagtgtcaatggaactaaataagttttgttctgtttctttttttgtttatttatgaatttgtttttctattggagtttgacatttttttttatcttttggtgaaatgggttggtgtagaaattgtgaatcgagaagggaaatcctcgttgttt

SEQ ID NO: 26025 - DNA, 528 bp, Glycine max
  Intron number 1 from transcript Glyma15g21920.1 (locus Gly ma15g21920) derived from phytozome v7.0 (chr-ID Gm15; pos 20405298 to 20405825 reverse strand)
gctcctgggagaactcaatttaacaaaccaagaaggtatcacctcacacaaacacaagcttggtttgaaggttttttgtggggctggggtttctgattggtgttttttagttattatttttttatggaaagaaattgtttatttttcttggtgtttttttttgggtagcatcgaatggtgtgctcatgcgttgtattcttttaagtcatagatgtttagctttccaatttttatttttatttttttaatttttatttggtcccaaatcattgaggcttctcgtggaagctgtgtgtttttggtaagatgaaaaagtgttggttaaatgattgcttatcatctatagatgataggttgtttatttgaaacatataattatatttgttaatggtgttctcaattctcagtatcttgcttcatcctttctttttctcttctccttccaattttgaggttgtttgtaaaatctggtgcaataatttgacagatgtgatcctatttattttatgttacttttgttttgaaggt

SEQ ID NO: 26026 - DNA, 555 bp, Glycine max
  Intron number 1 from transcript Glyma16g33280.1 (locus Gly ma16g33280) derived from phytozome v7.0 (chr-ID Gm16; pos 36248095 to 36248649 reverse strand)
taccaggtttcacttagtacctctaaatttagattactcctactcaccctcttttccattcttgtttttgtaagaaacgaggatttgagttattgctatttgatcctttttaaattaaaaacatttttcacaaaatatatagttttttctgtttgtggttttcagttatgtgctagattttattcttttttggaaacggttaaattttaacattcggcaactgtgaggtcatggtgtactaaaaacatgctttatcttttattattgttctcggtgtctcagtttcattctccttctcgtttgcggattttcgattctgtaatgagttaagttgagttctgtgtggcaatcctggtaaattgcctgtgtacacaattatgtcttcatgttcaatttttggcattccaaaataacgatgttttttaatttgacccgggactggattatccatggtgattttggtgatgttgttagcttgatttatatagagatatcttacattacatgattactctactagcttaaatatcctgcacctggagctccacaattggc

SEQ ID NO: 26027 - DNA, 959 bp, Glycine max
  Intron number 2 from transcript Glyma13g27010.1 (locus Gly ma13g27010) derived from phytozome v7.0 (chr-ID Gm13; pos 30186408 to 30187366 reverse strand)
aattcgtgcgttttaaggtacattttcctgtctggtttgttctgttttttaaattttggttactctgttctgcagtgttaaaagtcaatttcctttgttgtatagtcagttgaatatatatctctatttgtaaaatttgttttcatggccagaatggctgatattgattctttttaatttatttgataaagtcaaagttaaattgttgctataagaatatatatggagggtgccaacttaattaaatgcatatataagattatatagaatgttcgtttgtttttatcaactgttcaactaattatccttttcttgaggttgcaatttgattatacaatatacataacaatttgttatttaaataacaatataaaattactcaacattgtaaatatataacccattttttattatattgtaaaaggtgtttaagaataataaccatctgtactgtatgtttaaacttttagaaacacagatttttttttaaaaaaaataatgttttatagtttcatgaacaacctaattgcaaaaaaaattaactaaataatttttgtaatgaattcaataaaaaaaatttaaatgtaacaaaagttattcacatttttcttattaaaatagtcagaaaaatatttattcacgtttttcatagaataaatgtagccctctgtctagggatttattttacttttattaatgtatatttgttatagttaaacgaaggaactcatggaagtgatactctttattattattattattattattattattattatattctcttttttaatattagagaagaaatgtaatgacgcattctggcaattatcacttggcttttttaattgttaatactctcaacattcaacaacaagattcaactaataaaatacaaagaactaaagttggaataattaatatggcatgtggtcccttatgtgactgatttaatcaga

SEQ ID NO: 26028 - DNA, 496 bp, Glycine max
  Intron number 3 from transcript Glyma14g35850.1 (locus Gly ma14g35850) derived from phytozome v7.0 (chr-ID Gm14; pos 45008967 to 45009462 reverse strand)
gggccagaaaagaggccattgattggattgaaaaggtgggttttaagagcttgtgctgattttgcatgctctttgaggattctttattgtgtttttgcgtgtggcggtgttgttggggattgtttttcttctaatctttaaacggggtttctgaaaatcctcactttttgcctttgatgatcttattttcaagagttttatttggatttgactgcctccttttctgtttgtggatgatttcattggtgaatctgaggctcttggactggattcgattgcccttttattttgaagttgtttgttgggtcgaattcttttgttaatgcatattttttaaagctagattagtatttcattttttttttcagtgtgaagccatttgatcttggaaacaaggattattgatcatcgatcgccatttgctatggtctaactaatgaacgaatgttcctgttttataggttcaacagcactttggttttggacccctctgtgc

SEQ ID NO: 26029 - DNA, 990 bp, Glycine max
  Intron number 1 from transcript Glyma15g00590.1 (locus Gly ma15g00590) derived from phytozome v7.0 (chr-ID Gm15; pos 324324 to 325313)
agaactccgatactaatcaaattgttgtgcctgatgtgagtttgggctctcattgaatccctttttttttattattttaattgtctattttagtttttggttagctttcctatggtaaaaatgatgagacgaacattgctttaacttgccacctgtgtttaagattaaagattaattatagcggatcagttcttctttgtttgtgtgttaaatcaagatgccgtgactgaaattggaataagtcgtggaaagtagaaatagataacaagggacggaaattttcagtttgtaaacaggtgtttgaattgacttaggaatattccaggtgtgtttgtttgttgtattctcatgtcacgtatgagttaaagtagcattggctattgaacacccaagtgaaccggctagagtgtatggtagaatgtgtgttacagtttccaactggtgataaaaacctattattttctttgggtagagaaatctattaccagtacatgactctgtgctaatagctgatttgtagtcagcttatgtggcatttactttgtgtgttcgcaaacctccaattaaattgaattggctcatggatgaaatggaaaacaaaagacacgagtgctgatatgaattgaagaacacccccatccaaccacctgccttgggacaacatcatttttcatttgggactttatgaaatgaaaagaatattaggattattgattataaccattgactctcttcttttaatttttcatctgccatatttcttgcaattttgttgacatcagtccttggggatgattttaagcaatattttttaacattttgtttaatttaaagtgttaaattaatggagcaacctaagaccttcgattgtagagtacactgcagtaatacatatacttcctctgatgatgagtattgtttacttgataaccaccatttatttatgcttctattttgcagaggagaagctggaaaaatttatttgcatac

SEQ ID NO: 26030 - DNA, 846 bp, Glycine max
  Intron number 1 from transcript Glyma13g34570.1 (locus Gly ma13g34570) derived from phytozome v7.0 (chr-ID Gm13; pos 36112971 to 36113816)
ggaatacaggttctgttctgtattgctcttcttcttcttcttttttgttggggttcagttttggggagatgatgggtcaagggagaagagagaaagttttgatttttattatttttggggtgtgtttgggtaagcaatttagttaaatgcttgttgaataagtttatggctatgtttacataaacttctcttgtaagcacttgtaagaaaagaaagtaagagtgtaaaatgaattgagcttctttaataagctaaaatcaacttatgcagctcagttattggagaagttagatgaaagaacatctataaaagttaaatgtataagttgatatattaacttaagaaagaagttcgattcattttacctttttttttcctcctataagtacttactagtacgtagaggtttatccaaacagggccaatgtataaattgtttctagagggaatggagttaaactgttttcatttaagttttaaaaagtttttgtaagctatggtgggaaatttattgaaataagctgaaaacagtttgtagacatatcataagttagtctggtaagctctcaaatatttatgtaagtgcttattaatgttgtaagataagcccaaattagttgtaaataaattcttccaaatgcagctttagtagcttgtagatgacaggaaaaaagattattttgatgatgcctttattaggttttatctatagcttgcaagaaatgacttaaaagactgagaagaaaagttcattagtttcagttcaggtcatggtattgataaatgacaagtggtgtgtacttggttgcagttcacagtttgctcttcggtcatatttgtaccttt

SEQ ID NO: 26031 - DNA, 570 bp, Glycine max
  Intron number 2 from transcript Glyma13g41120.1 (locus Gly ma13g41120) derived from phytozome v7.0 (chr-ID Gm13; pos 41518754 to 41519323)
ttgtaggtgagccttagctagcttctgatgggattgcctctatttgtggaaaacattttgtacttatcatactcttgcgatggtctctctggctaagtaaatttcactgttaatatggatcattttttggcattggaaattataatcacaaaactactaagtatttaaaaggttctaattctctctttttgaattcagaagtacttttttttttaaatgtagcaatgatatgtgacgtaaattctttagataccatatatgagtgtttcatgtgcttatactgtgtgcaatttgcattttgcctttggatttaaaaaaattcacttgtatcataaccttttttttttctctaaataacaagtttctggctccccttgaacctattgcaatttctttactggtatctcatatatccgttgttgggtatttctcttcaattacttcctttgcaaataagttcatcaaattatttttatcacctcttggcaatgacaatgttttgacacgtgctaataaacctgtttgtcttttacagaagttgttgtgagccctccttttgtgttccttcct

SEQ ID NO: 26032 - DNA, 925 bp, Glycine max
  Intron number 1 from transcript Glyma13g09470.1 (locus Gly ma13g09470) derived from phytozome v7.0 (chr-ID Gm13; pos 10895840 to 10896764)
acgaatttcaagctcaaggagacaagcttgctgtatcatgtttcattcttacacatacccatgtggtttgttttaggttctgttgtttatttatttttggggaagggaagggtggacttaggaaacactgaattatgaattggggtgagtaaatatgagtacaattgcattgattttgtaaacattgatgaatttaatgagacaagggttgctcaatttatgattttgcagaaaaagtggttccgctttgttttgcttttctgaacctgaatgttgagtgctaaaagtttatatgtatataatgttgattatattactcgggtccttatggtcttactaaatttttttaataagtttttgcagtgtaaaggattttaaattttcaaattagtcctctctagctaacaaccgtgaaaactttgataacttttcggtattctatgtggacttagtattaaccttgataaactatgtttagtggagggaatggcaaaaatatcttactttgataaaagacatttggaatttgtgttgaaaacaatctcaaccctttgtcatgaaactatcaagcaaaagaactctcattttgcctagatttttctcagtctatgcaagtgctagtctgtccgaatctttgagatttagtttagatatgtttacctctagacatcaatttgatttgttttgaagtctcaatttcattttccctgactacattacaatttgacatataacaagataaattattgtaatcttgaaactcatatatatgatttatttattgtaaattatccttttcctaagttttcaattatatataggcatatatgccatgttcttgtcgtgcaattattaaaatttggtgtgttccccatgtcatgtatgtctgtcggtgcgtggctaattccatattctttcttgcagg

SEQ ID NO: 26033 - DNA, 405 bp, Glycine max; identical to SEQ ID NO: 19265
  Intron number 2 from transcript Glyma14g08230.3 (locus Gly ma14g08230) derived from phytozome v7.0 (chr-ID Gm14; pos 6256154 to 6256558 reverse strand)

SEQ ID NO: 26034 - DNA, 364 bp, Glycine max
  Intron number 2 from transcript Glyma15g40110.1 (locus Gly ma15g40110) derived from phytozome v7.0 (chr-ID Gm15; pos 47070978 to 47071341 reverse strand)
aaatcgttaacgacggtgtcaccgtcgccaaagaggtgagttttttaatttcgtcatattattattatggctgtttattttttggaatttaaagcaattttaaagtagttattttaaaaaccatcaaacttatgagttatgatgagctgtggttggatgactctttaaaactgtcttatgtcgagggtgcataacctattttcttttcttttattgcatgtgttgggaatgtttgaatttgtttatgtggataggatttcatttgaattttgtttaagtgggttttttgggtgtttgttttgatgctttgttgaatttgatttgggaaggttgagttggaggatccggttgagaatattggcgc

SEQ ID NO: 26035 - DNA, 677 bp, Glycine max
  Intron number 2 from transcript Glyma15g13060.1 (locus Gly ma15g13060) derived from phytozome v7.0 (chr-ID Gm15; pos 9729868 to 9730544)
gggagtgccatttacttttgaaaaggtacttcctcttgctttacaattgttctggtaccagagtttcttttcttgatgcatgtttactggggatgtgggctttgcaattcctattcagaaattaatcaatactgtgctgtttggctgttgtggatttatttgatattcataaaattatgtcattcgtgtgtcactttctggctcctaattgtttttaactgaaacattttatatgacaatgatatttaaagtttgacattttccttggcatcacatctttatgtatttggttattatttccaattagattaatagaaccactagttctttgttctctcccactttatataattatatggcttcagtttgcagtttgctatgtttcaatttatgtatgatctcatgctgtcaatgctatatttttttctttaactctagtttgcagacattttatagtttagtccttatgagtatcatatcacgaaatgacttatggtaataaacttgaagaggtttgggaactgcataaatattgaaatttttgctattgcctttgaactagcttagatcaatattttaattcttgtggaatagcttacactccacatggttgctgttacttcatattttgaagcttggcctttctatttttttttttgtaggtcctttatccaatc

SEQ ID NO: 26036 - DNA, 877 bp, Glycine max
  Intron number 2 from transcript Glyma16g01140.1 (locus Gly ma16g01140) derived from phytozome v7.0 (chr-ID Gm16; pos 834286 to 835162)
atacttgtgcttcttgttttcctctctgcttgctggtaagttgtgattgcagtaataagctagggtttcaaatattttgaattgagtaatcggtgaatttaaagtttaatatatgcaaagggagggggggattttctgctactggtctaattataaacataagatttttatgttgaatatcttttgtttccatgtctaaaaatttaatctttttggcaactgaatgggggaaaggaataactgagcaacttttggtttcttggttcgtgtaaatttataattctgaatttcttttttcaccttctctctggtttgcattaactgatagctttaacaaatttatctgataaagtttgttacatgcacgcatcaggttaaggccttgtttatataaatttctccatgaggaaaataggaagggaaaatgcattgagcctttccataagctaaaatcaacttatccaccttagcttttggaaaagttaaatgaagagagcttctataaaagttaagtgcagttgattttagtttatgcaaaaagctcaatttattttacctttttattttcttttcctgtaagtgttaatagagaagtttatctaagcagagcctaataataacacttgagttggaatttttacagcaataatagttgatcttgatgatggagagttatgcatgctttgcatatatcaaattattcatctttcatatgttcattgcacgagcgaactgtctccagatatagaggttgtctatatatacttctctgtgtatgtaatttcagtttgatgtacttaaaagtggacagataatgaaaaataatgataaataaattcaccttgtgagtttttcaaaagttgcagttcttctacac

SEQ ID NO: 26037 - DNA, 352 bp, Glycine max
  Intron number 1 from transcript Glyma13g38700.1 (locus Gly ma13g38700) derived from phytozome v7.0 (chr-ID Gm13; pos 39434223 to 39434574)
tacaggtatagttcggtacattgctcaaatacaggttcacaagatttaatttgaagctttccagtgttttcagggtaatgctggttaaataatttttcctcagtttgttaattaccaaaattcatgtctataattgtttttttctttgagtagtgaaattgtatgattagaagactatattgctgtatagcaggggaattgcttgcctctgaaatcgcaaaaattatggtttaagagttgtttttaattaaattaggtttaagtttctttgtttttttttttattattatagtttgatttaagggaattgagtttgatatggtttacttttgtgagctaggttataattaga

SEQ ID NO: 26038 - DNA, 914 bp, Glycine max
  Intron number 1 from transcript Glyma15g04120.1 (locus Gly ma15g04120) derived from phytozome v7.0 (chr-ID Gm15; pos 2895922 to 2896835 reverse strand)
aatccaggtgtatttgtttttccacgaaacagtgattatattttgataacaattttttttaaacatttaattaataatatttttttctattacactacattatcaataaaattaataactgatttctcatttcttctctttctaagttataaaaaatataagattgtctgagaaatattttggtaaattaaaatcatacaaatttaatgtagtaaaattaagattgaataatttagatattaccaatttgatcctttgaaaaaataattttttatcagattttatttattttttagttaaacttagttatgattacttttatttgaccggatgattaaaaagaaagaaaaaataaacccatacgaaatcacacacttattttttgttttcacagtatatatgagtttcatacaaatcatatcctttcctaattgtatttccttattgctccctatttttgttcttctttcttgccaaacacattatatcaagagtcttatattttattttattatcttaggatccgtttagaatcgaaaagaaaataaaaaaaattaattttttttccctttcattttgcctccaattaaatttcaaaactttctttctttcctcactacaaaaaataaggtaagttttgttatagatagaaaaaggtgtgggaggagggaggtgcgcgcgcaagcatcccttggtaacataactgaaatcatttattggcgccacgtatgatggagtgttggcacctgtcaattccagaaccacataaatgactagcgtcttccagaaccaacgggctaaaattaaattcttcacttttaaataactcgcatctctctagacttgttacttattgcatgatgaacatgaacgctgtagaggaagaagagatcaacggcggcgcttgtggccgt

SEQ ID NO: 26039 - DNA, 322 bp, Glycine max
  Intron number 3 from transcript Glyma14g08620.1 (locus Gly ma14g08620) derived from phytozome v7.0 (chr-ID Gm14; pos 6621151 to 6621472 reverse strand)
agtgaagagcactgacaaaggcatcactgctgcaggtaaattagtgttgaatagggatcttgtgttatgttatggttccttctcaaggacccattttcgtttcttctaattattattattctctttgtttttttgagatctttggtgattcggtgtgacagaaaactctatgatttgcatctagtactgttcccgttaaaaacaaaagtgtctcttggcatataggactatactgacttcaaagttctcaagtgaattattaagctgtggtgtctgataaagaaagagcaatggctctatttgttgatgaattttgcaggtc

SEQ ID NO: 26040 - DNA, 389 bp, Glycine max
  Intron number 1 from transcript Glyma14g08620.1 (locus Gly ma14g08620) derived from phytozome v7.0 (chr-ID Gm14; pos 6621829 to 6622217 reverse strand)
tgttcacgcggttcaacttcttggcggccacgaaagtaaattccatcaatatagtacatgtttgatgcagttaaatccgtcgctaaaacttgatgaaaatagtcactaaatttggttactaatccatccattattgattcttagtggtgttagaagaaaaatcgtttgttccttcttcttttctgtattattttgaaaaatcttgtgatggttgaacatggtctaattaattattacgctatgtatgaatggtttgatggtttctttattattgtatgcaaaagctagattcttttgagataaagcatatataacatttagattacgtctaatcttgagtttgtcttctcacacttgcaggagcaactccgaagtctgttttagagtta

SEQ ID NO: 26041 - DNA, 622 bp, Glycine max; identical to SEQ ID NO: 25388
  Intron number 1 from transcript Glyma16g31280.2 (locus Gly ma16g31280) derived from phytozome v7.0 (chr-ID Gm16; pos 34699753 to 34700374)

SEQ ID NO: 26042 - DNA, 497 bp, Glycine max
  Intron number 2 from transcript Glyma14g40650.1 (locus Gly ma14g40650) derived from phytozome v7.0 (chr-ID Gm14; pos 49623577 to 49624073 reverse strand)
tcgattcatattttgttccctttggtttctgtaaggtttgaaatctttcttctttcaagtatcaaaaacaattgaagtttttttttttttttttacaaaacttaaatacagtgtcataagtggagttataagattggtccagtgctaaggaacaaggaaaggtgccaaagttcctgagtttgaattcttccattaacaaaaactaactaataattaacatttgtcgataaaaaataaatacagtttcataagtatttgtggtgtcgtcttttgtcttaatgtcataatagaatcggagtttcatcttagtaatctatgttgttgttttttttttatgtaaacctttattatgtggattagccgatgaaactccaattctaatagaagaacaacacggaacaacatcaaaagtatctatggaattgtgtctatgtgtctaaggttgttgtttgtatttggacctgagattaatttgtaatgagttgatgaactgcaga

SEQ ID NO: 26043 - DNA, 602 bp, Glycine max
  Intron number 5 from transcript Glyma14g04040.1 (locus Gly ma14g04040) derived from phytozome v7.0 (chr-ID Gm14; pos 2687156 to 2687757)
cttcgcttaagattgttcgtagtgcttctgttaaggtatgactcatttcgcggtttgtttgatcatctgtctcaacaatcttttttcttttttgtaattaaattcttagcaagtgtgtgtggtccttggttggggttacattcttagcattcaggaaattattagactgaacttttttttcccaaagtctgtgtctaacattttttaatatatgaaacagaaatcatgtttctctgttaatggtatcaaaggacagagtacatgcatggtagtcactgaaatctatgctattttgcaacagaaaaattatttttttctatttgtaataatttttagattactctcttactgttgtacattcatttttcgttctgatgaaatttcagtttgttgttaaaatgtaactggaaagaaaaatggaaagcatcctggttttcttttgtggatttagctatttgaatatgggcaatttcttcgtaagttcttaacatgtatggctattcccgtcacactgattatgtttagcccactccccaaactcatatgatgttttgctaataatttcaggcacttggttggttaaaatcttattattgggaacc

SEQ ID NO: 26044 - DNA, 492 bp, Glycine max
  Intron number 1 from transcript Glyma15g38070.1 (locus Gly ma15g38070) derived from phytozome v7.0 (chr-ID Gm15; pos 44158473 to 44158964)
acaagacagtgaacgactcagaaaggctttccaaggtctctctctctctctctctctctctctctctctttctctctctctctctctcaccataagaacatttgttaatgctgaagaaaattgaaaaactgaattctgttgtgatttgagttatcaatgaatttaggctgcaagaattgtgttaaaaaaactgaaattttgtagttttgttttttgggggtaatggggtttccacaaacattattatgtctgcaattctatgaaattcttggttatatcgttccaatggaatgtaatgtttgattttataacaaagttttatgctttcttagtattggtaggagtttggataatggggcatttgaggcattgccaatgcttttgcttgttatttagtccttatggtaatttgtgtatgagttattttttggcattaaatggttggtggtgatgattatgattttgggaaacttgatgtaggatttgggacag

SEQ ID NO: 26045 - DNA, 1014 bp, Glycine max
  Intron number 2 from transcript Glyma15g38070.1 (locus Gly ma15g38070) derived from phytozome v7.0 (chr-ID Gm15; pos 44159064 to 44160077)
atcgtcttcattctgaattgtctggtgattttagagtatgtcatggttgcttcacttggttgggtttttattaccttttgcttttaagaaaatagttcttcatcattgtgttttattgacatatttgatagaattcaactgaaataatgtgatgtccctttttagtggttatgataattttgatgtgtagttttccttgggacaatgcaaattggtcaattttgcttatgtaagttgccattgccaaccagcattgaccaatcatgtgctttgttgcattaagcaaaaacattaagggggtaaacttacaaaatggatttttggctggatttttattttttattttaaatgttcatggaagactggattgaattttttactttgtaggttttcttgcttgcctgaattcttttacaccgtttcaaatttttctccaataggggagcttaaggtcacataagctatatttgtctgcttatactcaatttttcaaaaagaagagaggttctgaagaagagagaaaatgaaagataaaatggattgtatattctgagaatctaatattttatcaaatatttatatttccttcttaattctaggttttgttttttttttttttcttttttgaatagccaaatgaatttcattgaaagaaaaacttagtgtagagcacaagacgtgacccaaccaagctataaagtattacagagcaataccttgcacgtcagtgcagattaatgtgataagcctgtgatttagatgcttctttatcggtcattaaggtgacagttacatagctcaacgaaatgtattgtttaatctttcaactatttaatatattgaatattgatgtttgtacctacaattgttagtcttttggctcattattccttttgtccatggttgaagttcattggattgtagaactttcagtctccaaagcatgccattttttcttgaagtaatcatatgatctactaagttctgtgacttaaacttatgatgcatgacaga

SEQ ID NO: 26046 - DNA, 443 bp, Glycine max
  Intron number 2 from transcript Glyma13g32740.1 (locus Gly ma13g32740) derived from phytozome v7.0 (chr-ID Gm13; pos 34814422 to 34814864)
ccgcctagaagagaaccaggtttccttgaggggtaagctattgcataggaaaggatttgctcttcaaattaaccaaaagtaacattaagttttggtttaaattttttttagctcttcaaatttgagcttaatctcaaaattaaaaatgactattttcctttttttaatttgaaaataatttacttttaattcttacaatcatttttttatcattttagtcttaaaataaggatcaaaagtaaactatttctaaattgaaaataattatttttaaaataaactagaaccaaatttaagagagaaaaagatatttaaccctaagatttttacttttgattctaccatagatattcttttcttgttcaatgctcctcttaactttgtctttgttttttccccaattggcagcctagcggctttgtgttgctgttgcctcttggacg

SEQ ID NO: 26047 - DNA, 944 bp, Glycine max
  Intron number 1 from transcript Glyma16g05100.1 (locus Gly ma16g05100) derived from phytozome v7.0 (chr-ID Gm16; pos 4406060 to 4407003 reverse strand)
gaggagctttgggaggcgcttgtgagagcaggcatgtgttttgttctctctcttgttgtgttttaacggaattgttcgttgttttcttgcaaattcagtggatgtttgtgttttggttttgtttaggtaggttagtttgagatagaatttgtgtgtaaaaaaatgttgtttgagatcacctcatgtcgactagtcatatggtcaaaatagtatatataagtcatcttgccgttgagttatcttttggatttgagttatattcaaacaaaaattctaagatgatataagaatctattgttacttgttatcaagctgttattaattagtttattggttaataatatgaccaaaatagtgtatataagtggaggacaactcaactctctcctcaagagctagttttagtgtttgagttagatccgaacttaagttctaacttgcatctaatttgggttggtcaggatagtgaattacaaatttaataaaaggaaagcagatttcaaccgggcacacggtatttaatgaaaagaaaaacgttcattatattaaataaggataaattatttagtacttcacttgttttttttttataaaaaaaaaaacagaaatctaatagtgtattaagtggtccctaacttgaaaaaaaagaaagatgtgcttgccattgtttaactggttaaaatagtggtgcaagctggcatcaaatgttcatctcaagtcataagaaaaattggaggttggactgtgattctgttgtgtacatttccttgccagactctgatactaggctatgtgcatcttcttggaaatttgtgttaaaattcagaaaagtcctgattacatttgctgatgtatatgagtgtgtttggttccccattgaaaccacgttcaattgggttttcccactttccaagacaagaaagtaagtcccttgttgctttaga

SEQ ID NO: 26048 - DNA, 1004 bp, Glycine max
  Intron number 1 from transcript Glyma13g25870.1 (locus Gly ma13g25870) derived from phytozome v7.0 (chr-ID Gm13; pos 29099692 to 29100695 reverse strand)
ctcgattcgccgtagacgaacacaacaagaagcaggttgctgctaaaccatcactctctctctccttttatttattttttcacaaaaataataaaagaattgtttttattttaatctttttttcattgccacttgctacgtgttttgaatgcacgagaccaggttgcttatgctagtgtttgatcattcgtgaattgtcatgttatggccatacacacacacacacacacatatatacacattaagagcttaatacatcctggattatttgggattttttaaagtaaactatagaaatatttgtatcatttatagtttctgtaattgggtctggagtttgtaaagtcgccgcaattctaactccaggacccaattacaaaaaatgtagaagaacaaggaccgaattacaattttttttagtctagtgacctaattaatttttttaaaaaaagttgagagacctactgatgcattcaacctgttttaaaataatgatctgaattagaatttgagtgcaaaatttgtaagggtcattgaattatagattcttatgaatggtaagattattcacctttataaaaaaaaaattctagtttaatacaggcatacaatgttactataaaagtaccttacgatagttgttatcaaagttaacaaactttatcattcccggttgtttggatgacagtataaaaaactcttacaatgtcactacgtatattattttctcaagttatttgaagtgtcatatctagaatgatttcgaatgatatactatattatatgcatgcatctgtttatatgttgctagtgagggttttatgctcccactaatgcactgacatgttattaggattgctgaactttcttgttattgtgattgcagtagttctttatgttcaatatgatgaacaatgttttatgtaattgtgaactaaacgtgttgacttgtgttggttggtgttgaagaattcgcttctggagtttgctagggtggttagggc

SEQ ID NO: 26049 - DNA, 940 bp, Glycine max
  Intron number 3 from transcript Glyma14g39100.1 (locus Gly ma14g39100) derived from phytozome v7.0 (chr-ID Gm14; pos 48226000 to 48226939 reverse strand)
tgtgcgtggagccagagaggccgtggaatttaacggtaacgactttttcgattttgtctttggtttcctcttcagtcaatttgactgatcaccttctcggtttttaaactgaagtctgttgggatggaggaatattttttatgttgaaatttcatctggtttgaactatttatattgtttgctaggaattggctcatttagatattagttgcatgaagcaatttaacactagagtttaatgattgtgtacagtcgagggtaaataattttgtgcggtcaaccaatcagaaatcaccattggtatgacttttaaggtagctattgtgaaagtcatcaaatcaaacttactataagtggcggtggaattgtgattagatgacactataaaactgctttacattgatagtatatgtttttcttatcataaagcctttgtaatttatttattccataatttgaatagagtattagagtttaattcatatgtatcattggtgtaattattttccacactagcttccaataggagttcatcctactgcctcatcatattcataaatgggatgacgtgacaatagggggaattcctaatttcctatttgatgtctgtaaaatgttttacagactgtggatagaaattaaatgctttgaatatcatatgaatgtagctctatgttctatgaaggctaccttttggatttcttcccaattcatctctacctgcttggtggtgttgttattcaagaaactaggaaagttcctgaacttggggaatcaaataacattaaaaattaaaagtgcttgtagaaattaggactgatttactacaaaaattttagtggcccttacaaaaatcatctttccacgtgcaacaatattcaatctctgtagcctcttatttgtaggtacacttcagaggatatccaagtaatattttact

SEQ ID NO: 26050 - DNA, 865 bp, Glycine max
  Intron number 1 from transcript Glyma14g04100.1 (locus Gly ma14g04100) derived from phytozome v7.0 (chr-ID Gm14; pos 2730872 to 2731736 reverse strand)
aaccaaaggtatatgatataataatagaataatcaaattgatgaagaaaatagaggggtgaaattggaattttgatagtgggaaaacttaaaaggtgtaattaagtctacttttaacaatacaaattatacgataatgctctgaagtttaacgaaattttattcaatttcttctttaataacctatacttgagtttgtgcataattgcgttatagaagttaaaagaaaaacaatttacggataaggttcatcatattttttgaattataaaaattaaactcatatttatcacaacacatgttacatcgagttagactttcttagggatataatttatttgatgaatacgcaattatattcaagttcaagacctctctctatcatgcagtgatcacacagcaacatcacctaagcaagctccaacagaagcagcaaaggctctctcttctgtctctctggtccacagttgtttcccaagtagtaattaaaaaggcatccaaacacattctgcaccatatttatttgcattaaggcaccaacccctatgcacattcattgactctactcattttcagagctcacacttcaaggttactcacaccatccaattcaaaataatccaatccgcatacaagttagccaaaatcacactctgaccaaaaaggaccaccacatcagacacacacatcacaccctcctccaaattaactactagtaccactttgcttcccttcctcttaagctttattattttttgtttctaagtatttttagtgacaccctttttgaatcagatccaaaagaagctactagtttaatctgtttctttctttacgggggtttgagccaattatataagttttcc

SEQ ID NO: 26051 - DNA, 895 bp, Glycine max
  Intron number 2 from transcript Glyma15g42040.1 (locus Gly ma15g42040) derived from phytozome v7.0 (chr-ID Gm15; pos 49407227 to 49408121)
ggatttaggttctagcagaggttacaggtaaagtcatactagttctgcataagaaaaaaaaaagaagaagaagaagcttagttctagttttatctcaagaaattactatttgatgtattttttttatgtcctgaaatcatgatctctgaaaatgataaatcccaagaatgattattatttttgggaatgaaaaaatttgattgattggtcataaatatttttggaaaagtttcttgaaaataataaatttacttggtatttttatcggttattttagttatttatcaaattaaattaaaccatcgagtaacataatatttttatttgtagtaaaaggatacttttacttgcaaaactaaattctcacctctctccacatgttcgcgaaaatctgcacagaaaatattttagaaaacttcttttacaagaatcttatcttatttttttaaaataaatactaaacataataaacaaagattctcaatcaaagattttcaagaaacacaaaatttctcccctaaaattctctccctaattttaaggaattcaaaatttttatcgttttaccattaacaaaattattgtttttatctcaattttttttatttgttttgacaaattttgcatttaaatttttaattttaaccaattctatcattattttaaaaaaaattgtaaattttattctattttttttattttgatgaattttactttcaactttcatgtttattattaatagacaaataaaagaaagtagaatatgtaaattttttaaaagttaaaataaaatgtgtcaaaccaatttgttgggataaaaattgtataaaaaataaaaaatgcaactaagcccgattcaattagttattttgatgattttttcacaggtacaact

SEQ ID NO: 26052 - DNA, 638 bp, Glycine max
  Intron number 2 from transcript Glyma17g03920.1 (locus Gly ma17g03920) derived from phytozome v7.0 (chr-ID Gm17; pos 2562258 to 2562895 reverse strand)
tcgtaacaagcttccccagcttctccacgaccagggtaatgtttccattttatctcttccctaattgttctgaattggttgccccaaattgattatttatttttcatttgttgaactgatttttctttaaattgagtataggcaatggaagtccatcgtcctcgatggactgctaaattttttgtaatggatgaaaattgtttggctgctatacatcaaagaatttaatggtggaaatttgattgtttggatgaaatttgaattagattataatatatgggtctaaaacaattctgtataatgaattagtttgcaacaaactatttaattgatgtggatacgaggaaaaatgattgtattgcttgtgagttgtgacacagtggcagaaatatttgattgatcatgcattggtgcatggcatatatgatgcaaatgaatttctaatcatttatctatttaacaaacttaaaaaaatttgagtcatgaaatttacttaaaattattgggggactagtacaactcattaggtttaaatagaggagctagaaatgtaaatataataagccttgttaactattattgtttacaaagtttttggtgtgggaaacaaatggtgttgatttctattgcagatacag

SEQ ID NO: 26053 - DNA, 468 bp, Glycine max
  Intron number 1 from transcript Glyma13g02910.1 (locus Gly ma13g02910) derived from phytozome v7.0 (chr-ID Gm13; pos 2908876 to 2909343 reverse strand)
ctctgagacaaccccgagtaattgcagaggtcattgtaagttttcttttcgtattgctaataagacatcataataagaattagatttcatggttttcttttcttaatgaataaatgcctagcttattttaaaaaatgagcctttttgagtcactttttttgtttttctcaaaatctccaaaatatgatcatggccatttaggttgtgtttgtttgaagagaacaacagtgaaaatagagaaaaatgaacagtgaagtaaaataatgtaggactcacacttttacgttcttctttaatttaattttttttatttcaattcactttcttttcatttcttttcactctatggaacggattcttaatgttttctttttcttattctaattcatggaaaaatttaatgtggggtcggatgcatcttgcattggaaaataaatgcagggaggaatactacttggaccatctgca

SEQ ID NO: 26054 - DNA, 799 bp, Glycine max
  Intron number 1 from transcript Glyma13g38030.1 (locus Gly ma13g38030) derived from phytozome v7.0 (chr-ID Gm13; pos 38953002 to 38953800 reverse strand)
ttactaaagctttcaactttccaacaccctttcaggtttcttacctctttcaccctcttttcgttcttcttcacatctctacttgatttcaaagaaagagtttttgttttagttaattttatctctcttgtaattcacccatctaattttttttttatagtttttgttattcccaattgtaatggtactatggagggcaactaatcactggcttgcatttgcattagatattgttttaaaaaatttcataatgtttatactggtgagtgtagagttgggttagtagaaagtagaaacatttcttgaggggtggcaagattgacatgttatggaaggggctgttgaattattaacatgataaatgtggttctgtgtttcactctcactgtagctaggctaacaaattgggttatagtgagtgaccttttgaattgattgtgtacttgtttgtgttcacattgggttatcaagaagcaggttgaaatatcaggtaaatgtccacatgttttgttccacttagaggaattgattttgagttaaaacaactttaggtagtttttgcattgggtaacaaaattatactgagttttactactaacttgcatttagaataaacacttctagacataaattgcatcacttcaaaatcaattttaatcaaaattaatttggtaaatactcacccaaaagcttgagggcttgttttcttggcaggtgtatgattaagtgttgttatgttgtaatgttaacattgtaaattttgttggtaattacatagttcaacttgaattgcacgcag

SEQ ID NO: 26055 - DNA, 671 bp, Glycine max
  Intron number 4 from transcript Glyma17g02430.1 (locus Gly ma17g02430) derived from phytozome v7.0 (chr-ID Gm17; pos 1567028 to 1567698)
gacctttcttccaaaaggtactactccgtatatagaaaatcatcatgatattcttgtgaagttggtatgaactaatgttttctttcctcctactccagatgcgttttctttttcactgtttgctagtcgattggtagtcgatcattatactacttggtgtttattagctttctctagttctataatgtttgatttctcatgatcctgtgtggggaaatcacaatatatgaaaataaatttcacgattttctgtgatcatcattcatcacttgctgttcttgtaattgccttccttggctttaaaaggaagttcgttaataaaagggaagtaatagataaaaagtagattgctctattataatcaagtaatcatgactacgctcagttgttcatctgaatgagaaagttagcaatattcgatgaactggtaaaaaaagaaaaaaaaatctgttatgatttaattaagaaaattaaaatagatgatccacattgaaagtgatgcattatttcaggatcagaagattaatatacccttgataacgtgtatctgtatgaccagttgaatgatgaaaatggtccacattcttttataaacacacacaagtgtgtatatatgtacaaacaagcactaatcagtgtccttgttatattttgtgattgaatttcagaaa

SEQ ID NO: 26056 - DNA, 653 bp, Glycine max
  Intron number 1 from transcript Glyma15g22780.1 (locus Gly ma15g22780) derived from phytozome v7.0 (chr-ID Gm15; pos 21521509 to 21522161)
tgactacattggttcatccactaatctggtagcttgagtcatttcaaagtttccttgttccttttgttgtttcatctgactttatttacaaagcataatagatagtagattcaattcttttggacgggtatatatgaaaatcttgtttatacatgcaacaatcttgtgaaattgttgagtgcatatgcataatggtactgaaattcgtgtagtttctagttcagttaccatgtgaaagaagtgattgagagtatgtataagtgttaattggaattatcacatactagatttttttaaaaaataaataggaaatcttgtaatattaatgtaaagtatgatgaactgcgtacaaacacatttttatcaaacttattacaagagagtttctacgcattagcttacgaagaagttaatttttgcttatgaacaaaattaattcatttctcttaactatttttttcttcttgaaagtatttataaaaaaatttatccaaacagaccttttattggtgtactttaccatgtacctagtatggattgaacaaagtaaaactttcaaagcccttgttacagttgtggatggtttgatttgtgttgttaccatgactatgtgcatatggttttattgactttgttgacatgttgggcagatt

SEQ ID NO: 26057 - DNA, 157 bp, Glycine max
  Intron number 1 from transcript Glyma16g22390.1 (locus Gly ma16g22390) derived from phytozome v7.0 (chr-ID Gm16; pos 25843934 to 25844090)
ccaaagggaagcttggagaatcgtctcttcaacaatatgaattgaagacaattgaagtaattcaaagaaaactctttctcatgaaattgagattaattcattttatttgttgtgtttttgtgcaggaaaaccactttcttggaacactcggcttaaa

SEQ ID NO: 26058 - DNA, 638 bp, Glycine max
  Intron number 1 from transcript Glyma13g20740.1 (locus Gly ma13g20740) derived from phytozome v7.0 (chr-ID Gm13; pos 24220301 to 24220938 reverse strand)
tttttgggatcaaactatatctgtttgaacttgaggtgaggtttagtgtgcttttttttggttttttctttggaaacaaataagacctgcaattgatcccaaatgaattggattaaaaggtatataaaggtttctatttttcttgcttcccctcttttgaatttggagatacacgccattctgaattagtgaattttattttctacaacatatggtttctgttgccatatttgtaaaattgacctacttaatcccccatccccccccccctagttaacaaaatttctaatggggttacctgaaattatagttgttgggaagggtatggagggattaggctccaaatgggcttttcctttttgaattgttgaagaatcagggaactatttgggcgtgtttgaaaaaccctctgagaagtaaaaaatcacatttgggatgtggaagctataactcttagcttctcataaaagataaaacgtgaaaaaccacttatggaatgtggaaccagtaccaaataagcttgctattcatcatatgtgacctttaatttggatgtcgtgttacttttcaattagtctatgtttcttaatttgttcttcaattttgtgaaaatgcagtctagttcaagtcaggttgca

SEQ ID NO: 26059 - DNA, 314 bp, Glycine max
  Intron number 1 from transcript Glyma17g02190.1 (locus Gly ma17g02190) derived from phytozome v7.0 (chr-ID Gm17; pos 1396900 to 1397213)
tgaaaaggccgaaagtgtttggctaaaagatcataatccggttaattcttatctttcttaataatacttggctgtttatgagtgatttagcaagaaaaaaattatgtttcgttttttcaaaattcaatcttggtgtccttatttgatttttcttatctgattggaagaggattcagatgtttggcttcagttgtattatgagttgtttcagatgtataaaaaatatgacttgtttgtaaattgttaatacattctgatgcatacatattatatttttaggaaaaaggtattgaagttgcaaaacctgttattga

SEQ ID NO: 26060 - DNA, 488 bp, Glycine max
  Intron number 1 from transcript Glyma14g06750.1 (locus Gly ma14g06750) derived from phytozome v7.0 (chr-ID Gm14; pos 4987762 to 4988249 reverse strand)
aacacaggtgagtttcaccaatttagaatatccaatagtttatctgacttgaccttttgctcccttctgtagttgctgcaagatattggtattgaaattctgctgatcgaacatgattttattgccctaccaaccaattagtcttggattaaatatttaatcattgttcatatcatttaccttgaattccaatgtttttatcactgatccaattgtcttctatactagctattttgtctatctagcaaagcagctatactataatttgatcagtgagtttttaattttttaaaataatttgcaatttgaactttgggcatggccaaaagagccggcatgtcaaacataattttgagtttttttgtgtgtttcctatataaacttgttgcttttcatcttatctgttgtgctaagtgaggtatttcaatctctatcctttttggttcctgtacttgatgactttggttttaaattacagacgttttctg

SEQ ID NO: 26061 - DNA, 964 bp, Glycine max
  Intron number 2 from transcript Glyma13g11530.1 (locus Gly ma13g11530) derived from phytozome v7.0 (chr-ID Gm13; pos 14222463 to 14223426 reverse strand)
gtgccaatcgactgctaagtgctacttctagggaggtaaaaccccaaaatcaactcatctaatatattcatgtatataaacttggctcggataaaattctagacacatcactttcttgtcacccacatattttaatcatttttaaaatgtccagttttgtgacaaaatatttcaatttaaaaaaattatgatatcttttttgaataatagtatttgttccctaaattttattattttgctaatacacacctgatatattggttccatatatcctaattcatcgttaaactttactctctttactaaccagtctttgtatatgtgggatacacttaatctttatattgaaagtatattataataattatttatttaaactataggattaatttatatttcttgctgacatttttaaagtaactttgtaattaaatatcattgagtaaagttaagaaaataatactttgaatatttcattttcctataaatacgtaattatttaaattgactatttttaattaggtaaaatatatatttatttctaatcgtttaaaaaatataattcctttatggaatggattttataatatatatatatatatatatataataataataataataataatttttttctcttatacatgttagtccaaaatcaattcaattgattatataaacaaattatactcctatcatataattagtgaatgcataataatcaaactgaatgcatgaaataaaaaattatactcctatcatataattaatgaatgcataatttcaattgattactcactaattaatgtaatttgttaaatgaatgaaaaataaaaaaactaaaaataaattgtctgaaatgttcttatttcgatatcagaaaaaagtgtgatcgaataatgacaatgtgtgtatatatacatgaacagcttgttacggggcttctaggagtagagtctggaca

SEQ ID NO: 26062 - DNA, 295 bp, Glycine max
  Intron number 2 from transcript Glyma13g01740.1 (locus Gly ma13g01740) derived from phytozome v7.0 (chr-ID Gm13; pos 1409602 to 1409896 reverse strand)
ttctctaggaagacctagaccatcaccacctagaggttaattaatttcactttcttttcttttatttgcattttgtatctcacaatgttataaacataataattatcatcatactacctccgttcttttcttataaataggaaagaaaggtagtacgatatatgattaaacttaggatatatgtaaataaaaatgtaacataatgttttgttaattccttgatcaaatttgaggttgtgtcttgtggggtggtaatgcaggaagaggtacattccaaggaggaggagcaccaggg

SEQ ID NO: 26063 - DNA, 623 bp, Glycine max
  Intron number 1 from transcript Glyma17g04270.1 (locus Gly ma17g04270) derived from phytozome v7.0 (chr-ID Gm17; pos 2846826 to 2847448 reverse strand)
gcttcctcacctgtccatcaggtaggaatccaactcttttaaagctgtatttgaatgagtatgctgtgcccacttctgctgttgacttgtatcatcatatctataaagtcaactatgtactgagaaaaatattgatacttgataagactataacaagttaataatttgcattccctagacgttactatttctctgaaatggacacacttggggagaatgcctagatatggattaattaatggactttgagctcttttgtactttgaatctcagtgtgatattgagtcagtttggacattttaaacaagtagctatagaagaaaataaaatgaatcaaagatgtaaaatgaatcaaatttccctcccaagttaaaatcaatttatgtataactacttattcagtagttctctctctctctctctctctctctctctatctttaacataagttgagtttaactcatggtataagtttgtttcattttacctccttaattcattttttttcttttataaattcttattgtgtttggtgacttatttcatctttaaagtggattgtctgttaaaaacttcaaaatttcttgaatatttttggttggttttgtaggccagaagcattg

SEQ ID NO: 26064 - DNA, 465 bp, Glycine max
  Intron number 2 from transcript Glyma15g40770.1 (locus Gly ma15g40770) derived from phytozome v7.0 (chr-ID Gm15; pos 47747775 to 47748239 reverse strand)
gcttctggaaggggtgagttcatttactttgtctaattaattagggtatgagatgtgaaaatataagtttcaacttaactcaattgtatgaaattttactttgtctaattaattagggtatgagatgttaaagtataagtttggacttaactcaattgtatgaaattctatttgttaagtgaatgatgtttttacttatatactttatcatgaaattatttttaacatatgtaaaacttaagttttttctaatacttataaatattaaaaatacaattgaattgcagtactaaaaattacagtgaaagatgttattaatacttttttataaataaaaaatactattaatttcgtaacatatatttattagagcgctttacatctaatcatgttttgatttctcaaaagttccttctttcttttcttgcagttgtgctggattgtgctgttgctgtgccctggatt

SEQ ID NO: 26065 - DNA, 694 bp, Glycine max
  Intron number 1 from transcript Glyma13g31830.1 (locus Gly ma13g31830) derived from phytozome v7.0 (chr-ID Gm13; pos 34187939 to 34188632)
accccttcgacgaagaagaagtcaatcccttctctgtaagtccctttctctcttccccacgagtgttgctttctcaaagtttagttttgcgaactgggtatgctcttttttctgaatttgatcttgttcagtggtgtttgaaccgggaataatggatatgttactgttttggattttgggttgggaattctctgtggttgttagtcagctgacttgtttcttactatatttgaatttgatgttaccgaagaaacgggattttgggttgtctatgattttattttccttgtaggatattaagttttctgctcattttttggtctttaagaaggttgctttggaattgagcccaaaagactcctctttcaaaacttatatcttttttgtgcttgtctatactcgctgtatagaatacatggtgatgaaatgtaagtaatttttaaggtaacggataagatcaaattatgtggctgtagctgataagatacacagcaagtctgtcatgagcctagctaatgacaaattaatggatgaagtttgaaattatatggtatccccagttggaatagttttatatttagttgctctaacattgtgcgtgtagtttattgacaatacatgctcttgcctgatccttcaaatttggtatacacttacaggaaccagctgtaaggggaaaaacatcaagccaatc

SEQ ID NO: 26066 - DNA, 609 bp, Glycine max
  Intron number 2 from transcript Glyma13g31830.1 (locus Gly ma13g31830) derived from phytozome v7.0 (chr-ID Gm13; pos 34188629 to 34189237)
aatcaagttatagcgggggtgcattttacactacagtgagtttgttaattaagcaccagtaaatcataatattttgcgagcatttgtttttgaatgattttaaaggtcatggccatagcccataagtgcattagtgaacaaccttgtttcttcaacttaagtgatctaacttgtactggtgatgttgttcgcaaagtaggaggagtcataaactattttctgcttaaatctttgtgcttgttgaactataatgttctggtccctgaccatttcctttttataaagtataatgaaatatcaaatgactatggcacacttctcagaataattagtcacacacaaaaaaaaatattgatgataaacattgcccaatgtattttattttgtcccgcgcccctctctgtattgtcatggtttcaacattcatagagctgaaacaggtagtaagagagcgaaaataatcattagtgttccaaaggaaaccattttacccatatctttcccctaggtgaaaataaatcaatcacaatttcttgcctacaccttatggatcttgatgttctaaaattttcagaatcctggaagtgttgcccctgccacaaattcaag

SEQ ID NO: 26067 - DNA, 975 bp, Glycine max
  Intron number 1 from transcript Glyma15g13370.1 (locus Gly ma15g13370) derived from phytozome v7.0 (chr-ID Gm15; pos 9988716 to 9989690 reverse strand)
attaagttcttatataattgggcaggtcatccccttatgaatcattttttaaggggacctttcggatgcctgattatttttttttttctctcatagccatggatgtcattgatgattaagttcttatataacgccacccccttatgaatcattttttaaggggaccttttggatgcctagttggttcttttttttctctcatggccatggatatcattgatgattaagttcttatataactaggttgaccatctttttttaagggaacctttcggatgtatgtctggttggttcttttcttctcacatggccatggctgccattgatgattctaaacccttcattcttcattcttctaacaatcttgacattgtcttagtttctcatcttttcatcgtgttctcggcaaaggcttagttgctgatgtggtgttgtagatgaattggcgtggagcggttgcggtgctcgtttatgccaccgcattgtggtacctcttcgagcgtgtcagttacaatttcttgtccttcgtcaccaaagtttttgccaacaagctttgatgcttgctttggactcttggaaactatcgaagttggtcgaagatttctcaaagtttttattttgaccaatatatttccaacatgttttgctatatttcatgttttcagattttttttttcttttcttttctctttcttctttaatgttgatgtattgtattcttcaagctaaaaagcttgtgagggtactagatataaaattaatttagttaattattagaagttatttgagtaaattagttgattactcaagttatagttactagaaattatttgagtaagttagtgttggttattcaagttaattattttctatctttatataaatatatcaactttgtaatactttaatgaatgaatgaattctaaaactatttttcatttatcttccatttctttcattcctactaacaagtac

SEQ ID NO: 26068 - DNA, 422 bp, Glycine max
  Intron number 3 from transcript Glyma15g30830.1 (locus Gly ma15g30830) derived from phytozome v7.0 (chr-ID Gm15; pos 34100759 to 34101180)
gtctgctgagaggtaaataacttttgtatccaaatgatcgataatattataaactagtatagtatacatttagttcggtcttttctctttacatggttcaataattgaaaatttgatttttgtaattacctcgcacatttgaaattgaaatttttcctatgagtaaaaaataagaccttttggaacacattgcttcatcaattaagaaagataattcttttttttcaaattgaagataaggaaggaaagtttggcttttaaatgttgagaggtagataattattcgtatccaaatgataatgaatattataagctatagtataatatacatttagttcagctttttcttgcatggttcaataattgattgttttttcttcgttaccttgcacatttgaaggtataatttggctgaggagaac

SEQ ID NO: 26069 - DNA, 653 bp, Glycine max
  Intron number 2 from transcript Glyma13g25700.1 (locus Gly ma13g25700) derived from phytozome v7.0 (chr-ID Gm13; pos 28915793 to 28916445)
ctctctgcctttctcctgaaaccagaactctgcttgtaagttaattccttgaagttgaaccccattgcttataaataacagtagagcttttacttcacatcaaccagaaggggatcagttttcttactgtaactatcatagtctaggatgtagcttagcattgtttttcacaaaactagaaaaccgtgcaatggaatgtgagcaagttatttgagtttctttcagtaacggagtcactgaaaatggaatcatatcatggcctaataatgctttttgtgtgtgcatgagaagaaatcagttaatcatttgctactcattgtaagtaatcaatggtgaacattgataggttgatcttttagtaatgctttatttctcatggagtcggcttcttctgttgattacctgaagtgtagttgaattttgtgaactgtgggatttatgcataatggtttacactatttggaaaatgcaaaatagaacattttttatgtggttgctagttcaaattgagaatttcccgctttatttcaatggataaggatgctttgaaacatgacatcaccgatgccctgccacaaatgcattagacttgttttgaaacaaaacattatttacttaaaattcttatgatttgtgacaggtacctaaagcca

SEQ ID NO: 26070 - DNA, 965 bp, Glycine max
  Intron number 1 from transcript Glyma15g01690.2 (locus Gly ma15g01690) derived from phytozome v7.0 (chr-ID Gm15; pos 1119396 to 1120360 reverse strand)
tctttggatcaaccctccaatttgtttacaatgtgggtcatctcattcttcctcttgtgattctgaaagcaatctccttaatgaaattatttatatactttcttaatcctgtgccacttttttttcttcaatatagtatgaattttagattgtcaataattaaaaattattctaaatatgttttcgaaataattgttgtaaaagcaatattatcatatattataattcataatcagataataataatgtaaaaaatcactacattctaattaaattatttttgtaatgcatttatataacctttaggatagtaaggtgttttttttttttttttttttatcaccattaggatagtaagttatgtctacaaacagttataatgggcaaagcccaatttaaaatcgttcttttctatttatcaattttttaaaaggctttatcaattacttataaaaaataagttagtgaaacaatattacgtatttattattttatttttagctataataaggaaattcattgggaaaataaatatattttaaccttcaaaattaaaaatcaatatgtcggagttcttctgttgatataacttcttaaagaaagcatgcacctgagtgagtccaacatataagaagttgaaaaaacgttgtatatgattatgctcgaaaggacggatgtcttaagaaagcttatgaaacataagatcaaaatcgtgtcattaatccaacaatcaagctatttcgtttttttttttttaatttaatcttggttattacgggaagaaaagggttttcgcataatatgtctgggtaggccaatttcttgatattgccatgcatgcttttagctttatgaaatatgttactatgaagtatgaactgactagtttgcttattgcttcttacgacaatgttgatgctgtaggaacagaccctctcctttgaatttgaggtattgttattttc

SEQ ID NO: 26071 - DNA, 877 bp, Glycine max
  Intron number 1 from transcript Glyma17g02760.1 (locus Gly ma17g02760) derived from phytozome v7.0 (chr-ID Gm17; pos 1830085 to 1830961)
acgacaacactgaccttgattctctctcttacattgtaagggtttacttcaaatcataaacaagttaaatgtttttctggtttggcttctctactctgattttgcacgcaaataggacaaacaagtgaaaatcatttagtaccacaatgatgctatcatgtcactaagcatgaattttcaattcatcaatgtgttttgttcctgggggaatatagggaattgagcagttgctgaaatttttatgattaaacaaacttatgtttcggtgttggaaaagaaattcagcactataatcgtaaagattttgaaaaataatgtattggcaactgacaaacaaaggtaatcaatcctagaaaactgctaatgcatactatgaatcaattatgttgtcctagggattctgtagatgcttttgagtgtgtttgtttctccatttaaaacccaattgaaagccaatccatggttttaattctctcacattgaagtgcattggaaagtgggataacaaaaaaaacaaacacacttttttgcagcactatccactatatgccacatccaatctccgaccattgataactacatgctgtgtacttgtgatgcaagtttatatttttgctgtttctcagattgttgatagtatgctaattttcatttacagtttggtctgggtgaagattgttaccttccaattgaatgatataaatagtgataactgttgaattcttgttgctgggcttcatggtgcctgtcgtgatgttgcttcattcctagtgattttttttagctaatgcaatttttgctttaatcaatgtcctcttgattaaatttcatcttcaaaacaataggactaataatttgcttcctgttctattcaagg

SEQ ID NO: 26072 - DNA, 823 bp, Glycine max
  Intron number 1 from transcript Glyma13g06070.1 (locus Gly ma13g06070) derived from phytozome v7.0 (chr-ID Gm13; pos 6366744 to 6367566 reverse strand)
aggcttacgcctcccatctcaagcgttccggcaaggttcaatttttgccatctctgtcatcgttttctctttctgggtctctcgaatttccactctttcttcgcttttcaatgctcttgttcatttgggtcgtttgtgttgctgtacgttttgtttttgttttgtgtttgggttgcacgcgcttcgaattagtagtaatgatagtaatttctttttgcttgggcttgtgtttatgatgagaggaaaatcgtagttactagttacgacccggctttgtgttgaatgaatccattgttgtgcagatattctggtgaatcatattctcaatgagggtaagtagatgatttaggttaaccattgttttggatgtaatattaatatgttttaaattgtggttgcaaatttgttttcaaatgtggctgcaattgcggtagtggagatctcaaaaaccttgatggtgtgtgagtgcaattgtggtagcggaccattttataaaaccttgaatattaatccatgtgtgctgttttgtgggtaggaaattggggaaacactgtttgttgcatagtggtgtatggaagatggtatttgatggctttgatttttcattccttagtccagaatggtgtctgctatttgttttttggcttcttaatttgaagttgaattgtgttgctttggtgcttctgtgaatgcctattaatgttgcttgtaacaagtttatgtgtttacttgagtgaagtaattaagtgctaagttattgacatttgaacttgaaggttatattttccattgtaacagttgatttgtgtgtggttgtcaacag

SEQ ID NO: 26073 - DNA, 878 bp, Glycine max
  Intron number 1 from transcript Glyma13g26120.1 (locus Gly ma13g26120) derived from phytozome v7.0 (chr-ID Gm13; pos 29320969 to 29321846)
tcagacgacgatttcgagcttcaaattttcaagtgtgtaagtctgcccatgtttgtgtgtctgattattatgaacacaacttcagatgtttagtttcttctggggtttttttttgcacgagtgcttgcttctacccaatatagagagctttgattttctgaatagtaacattgtggcatgattctttatttttaggtcattgtattttataattaataagccttagagatggaatccacaatttgaaactgtgtatcttctcatctatttctttttctgaaggtctatgttaatgtaaattggcaaatttcattttctgtatttgcagaattgctttgaaatcaagtgacatcagttgtagtatttctgttaggtgatcttacagattatttgttttaaaatttgacttgtttaatctggtacaaggtgtacattgcccatgagaattgtgtggggagcatgatagacaggaattagaattttcttatttattctgcatactttgaaatgaaagacaggaaataaaaaaaaatattattttagggactaaagtgatttgaatgattgaatgactggaactctattgcttgatttgtttcatacactctttcacttttaaatcaccaaaagaccgggggtatattagtggtaaaatagttcttattgtcaagcaatgtcatttttgaggtatactgtggcgtttgtgaaaggaaaaaaaggaaagaaatactgtgacatttttgcttaaaacaaaatcttaatattttttcagaaatatagtgatgtcatttctatctgaaatactgttcatatgcattacaacttattttgttgtcattgtaggctgtcactcgagtaaagccctacatttgcactat

SEQ ID NO: 26074 - DNA, 954 bp, Glycine max
  Intron number 1 from transcript Glyma15g13140.1 (locus Gly ma15g13140) derived from phytozome v7.0 (chr-ID Gm15; pos 9790295 to 9791248)
ctctcgaacaaccacaacaccatcttcatcacgtcagtttttttctttctaattctctctcttccttttttcgtttatccgatttgttctcccgcccgcaccaataactaaatccgcgaatttcgagttttttttttgttggattttgttgcatcggaatttctgagctgggttcgtatttgatctgatcgtttaacttgaacggtgccttttttaattttctgaaaaagaataaatcgtggcgttttcagatctgatttcggtgtttcgattgagtttttcccgaattggtagcttaatatgatagttatattgcggatttcagtttacaacagcttgtgatgcgtgatgtgtttgatctgcggagaaatcggttttgtgatctgacatgtggatttaacttcttttatttgataattatgcgtggaattttcaaataaggcatatattcttgttctgtttttgtttttggttgcatatattcttattcttttattagatttattttggtgatgtttcttatattaaatttattaatgagtaaatatgattttattttgggatttaagtgacgacaaacataacgcggctttttatttttttattgatgtttacttattttggcactaatcactgtctgcttctatcccctttatttggacgatactgggtttgttgaattattattatttacttcgctagttggcgacatattcctataacatttcattgttcccaatctacaaatatagtttctttttttgtaagcatttgattttctgtggcaagtttcaactctattatgttgacaatccttttttttttctctttcctggagtaacaatttaaatggaaaaaatattagcaacatatttgtgtacaattacctgggattgatgaccatggtggtgtgtgtctgcaactgcaattctataggcaaacgcagcatctggt

SEQ ID NO: 26075 - DNA, 955 bp, Glycine max
  Intron number 1 from transcript Glyma13g22460.1 (locus Gly ma13g22460) derived from phytozome v7.0 (chr-ID Gm13; pos 26003359 to 26004313 reverse strand)
tgtacaagcgtgatcctcacgataaccctggcctcgtatgcttccttcttcttctaaccttcttttacattttccgtcaaaatcaagtaatctgataatactctttttgctttcatgtaaaaatgaaatcagttgcttcttacgatgaatgttgttgatgctgatttgaattttagattaattttggatcaagaactgagagttttgtagtttgattaattgatttatagtttcggtggtagaacggagatgttacatacgaatgttgcttacgtgattgaggattgtgctacgttcggtttgctgaaacttgaaagaagtaattggaaatagagttcgcaagcaggctcgaaggcttatcgatgcagtatttagctaattatcatcggaaggaatttacgattcaagttgaatttgcatcgaatgctttttagtttagtttcttttgtgctgaaggtgctgcagaaacaaataggagcaagagtttttgtaacactgctctatcttagatctgtggtcccaaaacccgaatcgtgatccgaactaatcttcttcaactttacccaagtagaacatatagataacctttttaagaaagactcaactggcaaggttaaaatattaaacggttgagcttaagggccaaggctcattggctttccttacatttttgtctttaaaagaaaatatttgtagtgaatcagttatatttaattgggcatgcatacttgttagtttcaataatttgtaaataattttattattttttttcaaatgtgggtaatagtgccatttcacttactaattttccgtttctccttggcctttatttttttatctcgttttttttttgacaaggaatttttatctctgttttttcaataataaaatagttaatgttaaaagttttctccgtgcagaaacccatcaggcagggaattgtaggacccacgct

SEQ ID NO: 26076 - DNA, 775 bp, Glycine max
  Intron number 1 from transcript Glyma13g25010.1 (locus Gly ma13g25010) derived from phytozome v7.0 (chr-ID Gm13; pos 28300610 to 28301384 reverse strand)
ttcaattgcactccttgtgtatcagagagaacaaggtatatagtaaacacaacactttaaataaaaattaatgaatgaatgaatgaaaagaaggcacaataaaaatttgaactactaaagcactatattccattccatggcaatttgactctctggacttaatctgacttaataatctcagaggactactgcactggaaaatcttttggataacccaattatgacttgtctggatttttgtaataatttgcctgaacttaactaatctgctgttttgaacccagatggtgaaggaactggctaaattggacacttaatagagacaccacccacaccctgtatttggcattaattaaaaactgaactgagtttcatgacgtgatgatgttccatgagactattttttataaaagactcctctttcttgttgatctcatggaagttgttgctggagtttgttgttacattgagaaatacgtgatcatagtgaactatagtatatatgctgttagggttttaattgaagagaaagaatcttaaaatttattgaatattttgattgtagtaagaggtgtagtcaaatgtcttccataccttgaacagagttacaaatatgtccatgcatggtttactaaagatggctattttttttttttttttgtgttagcattgaccattcatgattctctcatagattatatgtggctaccagtaatataattctcttgtcggattttaactatggttgtgatgttggaccttgcagactgctgta

SEQ ID NO: 26077 - DNA, 633 bp, Glycine max
  Intron number 2 from transcript Glyma14g21140.1 (locus Gly ma14g21140) derived from phytozome v7.0 (chr-ID Gm14; pos 24458879 to 24459511)
tcccacagtttctcacgagtaaggaaaaggaagatttcattgatgcaaaactctataagtttgagtctgatgtttttaggttgtcagtagggtgtacatgcattatatttcatctgtaacctattactaggtagaagtactatttaattgaatatataattacatctattttagttgatattcaactaatgatgatttttatatttgattctatattttctaaacagtttaggtcattagggtgatttgtctttagcagtgccaagtaataaactcaactgcaaagttatctaccatgttgaaaaagaacatttgatgcttctttaatgatcattggctacttttggaagttctaattgtaaattacttgcaatgattgataaacctactattttcaatatttcttaataactgagctaaatgtgtggttttatatgattaatttaatgcctactgttatctaaaacatgtctaaatttagtctgcattaagttaaggagaagttagtactgctgaaaattaaccatcttttggtatataatttgataggggaatcattttgatggcaagaatcacatgaatgaaattactaaggccacaaattcaggcagtcaacccagctgcactttctgc

SEQ ID NO: 26078 - DNA, 969 bp, Glycine max
  Intron number 3 from transcript Glyma16g03060.1 (locus Gly ma16g03060) derived from phytozome v7.0 (chr-ID Gm16; pos 2665600 to 2666568 reverse strand)
gaccctgaaggcaaaaagtttggaggaggtaaaaagttggttacattagtgctctacattatgttattttatacaaatctttgtttgttgtctaatgttgtgttattattattatagtcctgatctcctatctgcttggcattgactgtacaagttatccaattggtgttacttagttaaattttcaaacagctagtattttaacttgaatggtatcttcatttgcccctatatcataattttaacttagtcaattagtgcctgttgaaaaattttcaaattgaatggaaaagggaaaagggagaatatattaagtaataagaatgaattttcgttagactttatgatatacaatactaacttgtactcctattatactaacaatctggattgatgagatggaagattcattgcttagctgaaagatagcatgaggatgaattattttcaattcaacttttgtgaaatttgttttgccttttctttttggcattatattattggcttggacatacatttgtcataaattttctcatttaacataaaaattgatatcagcatgtactttgattatatatttttgtacaaaaactctgttactataatcttcaactttggtatataatagctttatgcatgaacccacataacaaaacatgttatgtttacagaaactcatagtttgctattaatttattttataagtgcttaaatgtgattatttcctggtatatggatgaatttattggataaaaagaaattggactgtgttgatataaaattactctaagcatttgttcaggattttgagtcatacttaaaaattgccctgcaagcttccctttttaaaaaattgttgtattttcttgtgtgtgtgtgtgtgtgtgtgtatatttttgtttgttattaatactgtgggtgtttgaacctttaggaccaagggaattgactggtgctgtggatcttata

SEQ ID NO: 26079 - DNA, 371 bp, Glycine max
  Intron number 1 from transcript Glyma16g03980.1 (locus Gly ma16g03980) derived from phytozome v7.0 (chr-ID Gm16; pos 3345424 to 3345794 reverse strand)
gtgtgagtggccttaaatgatatgatatgccattaggattatccaattggattgttgcttcttcttatttctctctctctctctcggcattggttttatcctcaaatcaaaattggagtttgatatttaatacaaacctttactatacagattaccattgtgaaactcctattctaatttgatgacaaacatcaaaattgtttttttctttctttcttctgtcacttacgctttctttaactgtgaattaatcttactagtgttgattgcatatgctaatgattgactcaaattggtgtgtgtgaacacctctttcaactaccagatctaacccaggcgttttctgggttgccaaggagtaccaatttcat

SEQ ID NO: 26080 - DNA, 606 bp, Glycine max
  Intron number 2 from transcript Glyma13g38430.1 (locus Gly ma13g38430) derived from phytozome v7.0 (chr-ID Gm13; pos 39211287 to 39211892)
gctttggattatcttcagggctttctcttggccaggttagtgtgggctaattgtttcatctccttttcttcttccttctctcgaatttccccccctttttgtcacaattgggttctgattcggatgccaatttgattgatgcgttcggtttgctcaatttggcttttatccttcaaaaagggcctttgttttttcacaagtcaaaattggtcttagtgtgaagccaagccagctcaactctctcttgtatccttctcgttattcgcaaaacgcgttattccttctcactgttttgaagctactacttactcactccgcccccccataaaaaaacttataaacctagtcaaaatcctcgtgttttctgcacaactcttttaccctaaataataatttaattatcccatcaattagtcctccatagctatgtgtgtaccaatgtgaattagacagaaagcaaaaaagaaatttaaaaagttttgttgttgttgctgttttattttattatatatatgcttgttcttttgagtgtactgcactgtatatacctcgtattattgtgttgtgttagattgaaaaccataaggcttcggaatctcaaagatc

SEQ ID NO: 26081 - DNA, 822 bp, Glycine max
  Intron number 2 from transcript Glyma13g42060.1 (locus Gly ma13g42060) derived from phytozome v7.0 (chr-ID Gm13; pos 42157780 to 42158601 reverse strand)
gtgtagacttccttcgaccacaatctacgagaagagtaatgctttagtttttcttcttcttaaattcaattacctgttatgttacaagcatccttatgcctcatggttgtgtctgtaaaattagtctcaatttggttagtgccttagtgggctgtggttgttttaaacttatgtggaatgagagggagggagggaatcaggtttgataatctttactcaaatgctaccaaattgaattggtgtatgtgacgctgtgaagatcataaggttgcactatcttacgagttaaatagtaaatctttacaaccttgatcaatattccatatttcagtagctttttaaattttagtaattataatagaggactttggttgctttaatttaaagctttgtctgatttcttcaatgatgtttgttggatgtgagctatgccagctttgatctattttcatgtttgatatagaaattgttgaattgggttgtttccttataaacctttctaagccttagttactttttttttgctatttaatattttctcttctgcctgttactctcatgtagctaatgttccctttactgatttctataggattttttggttgatcatgggcagtttcagactagaccacaggttagagtcccactaacctaactgcatttgtgttttgtcctctttatatgtctttggatagatgttatgtatttatgttttggttagatgatatataactcttacttggaaccttattagtgttccttataaatgctcattcttgtgtcacagcatttacaaccttcaattgggaggaatagtcaacc

SEQ ID NO: 26082 - DNA, 897 bp, Glycine max
  Intron number 1 from transcript Glyma15g35860.1 (locus Gly ma15g35860) derived from phytozome v7.0 (chr-ID Gm15; pos 40663461 to 40664357)
gcagcgcatgtaagcatatatataatttctttgtcatacatatgcagttatagtttaaatgttttcttgaaatcttcgattctatttgctattagtgatgtcactactgttatatctttcttgtattttatcaaggaacttccatctgataacccgcttttccttttgacttctccctaaaaatatggagcaagctagttttatctcttgatgtcatacaatgacaaatccacacataaagaaaagagttgattaaataatcagcgtttggagaggtatctccaaataggtgataagctgacgtagaggtctactataactaatgtggcagaatacagtttacatgtcttttgtttgattcccaaatcccaatgcataacatcactcattctgtataagtgttatttaatgctgtaatatgtttgtatgtcaacttttacacagtatagagttttacagtgtttttgtaaattttttctgtatatcatcatactggtttaagaagttaaataaccattgttatggtatgatacttgggagacattcatttcaatgcagttttttattttctgtgtttgcaaatgatttgtaattctatcatatctacaacttcaattgcaaattaggttattaataatcttacaaagtagataataaaatacatcatggtaactgttcatttttaagagttagaaggttgcctatgttacattctattggatgttgtggacttgtgccccttgactaggaaaacaattgactagtattatattgccaaaacagggaagtgacaattaaatcaataataaagcttataggtttcttgaataatttaaaccccttaatctgttatgatggttaatttgttttgcttgtagttgcctggtcgcacagata

SEQ ID NO: 26083 - DNA, 598 bp, Glycine max
  Intron number 1 from transcript Glyma13g21230.1 (locus Gly ma13g21230) derived from phytozome v7.0 (chr-ID Gm13; pos 24726526 to 24727123)
ttaaggtttggctcaagagagaggatttgcaacccgtaagttcgttcccaccacctttttttacatcagggtcggtatcaatttttgatcttgatgtgcaatgcgtgggaaaaaggcctcattgttgattattaattggtattattgaaaatagagtttaatacatgtcactctcaactaatgagtaattatcgatgacatgactttttaaggtggctattataaaagaaatgtcagaaaacttaacaatttgtgatggcagttttgaagaaaaaaaatattattggtgtgtttatgaaatatttcaagtgatgtaaatgactatgtttttgcttgaagtggaaggaactctgttcagtgaatcatttttttttaccgcagtttttgtttttgtttttgtttttaagtattaactatgaagggcttgaatcgcttgatgcattgccttggattttgttacaacggagtcttgttgtgtttaagagatgttatatggtttactgaaagatgagtgaacaacatacgtgtgtgttaatgcatgagtatttgaaattggggtgtaggttttctcatttaagcttcgtggagcttataatat

SEQ ID NO: 26084 - DNA, 410 bp, Glycine max
  Intron number 2 from transcript Glyma13g10790.1 (locus Gly ma13g10790) derived from phytozome v7.0 (chr-ID Gm13; pos 12947197 to 12947606 reverse strand)
ccaattttataaatctctataaattggagcttcatgttccaattttataaatctctgttctttagtacacgtgtttcatggtttttattcacaactagtattcagtttttaggtttctctcttttaaagggaaaaaatatgtatgaagtgaaaaaaaggaaagaaagaatttacaattgatttaaataatgcattcacacctttttttcacttttcacatttttttttatcaattaaaaggaatccaatcttcgatcgatttttaagcatatactgacaagtgataattaaatggagttttgattattttttatacgataaatgtttaatttttaaatgaattggaattggtgattttgagttaattgattgtaggtgttggagctaggaattattgttcattctatcat

SEQ ID NO: 26085 - DNA, 500 bp, Glycine max
  Intron number 1 from transcript Glyma13g28960.1 (locus Gly ma13g28960) derived from phytozome v7.0 (chr-ID Gm13; pos 31911815 to 31912314 reverse strand)
aattttcaatctaagggtcaattttgatttcaaattataaaaaaaattattaaataatataatagttggtatagctattatataatttgaaatctctctaaccttaatgaattcaaaaaattgttctaaaaaaatattttaaaaagttttataaaagacttacaaaaaagataaaaaaaatttatttgatttaatttttatttataactttttaagttaatttattttaaatttaaaaatacatataaaaacttactatgctagatagtagatagaactgggttgattttataaaaaaaatacctaaagcagcaaattgagcgaggttgcaattgaatttcctctaatcgtgtcccttcaaaaaacgcatcagcaacagtaataataattctttaatcaaaatattcttcagctccacttcccctaattgttccgtaaattgggccaaatcattatcctgggccgtgtgtttcgccaagctaactggcgtgcctgtgcat

SEQ ID NO: 26086 - DNA, 999 bp, Glycine max
  Intron number 2 from transcript Glyma13g16940.1 (locus Gly ma13g16940) derived from phytozome v7.0 (chr-ID Gm13; pos 20802674 to 20803672)
agcgaaggcaccttgatctcccccactgctcctgggtactttaccaatctctttccattattattcttttcaacaatatcataataatatattattcataatttcatgtgtctatatgtttttttttccatctcatttactttaactgttggtgggaatattatttgttttatgatttttaattattaaataaaaaaaatcacttcatgatttataatgttaaatatgtaattcacttttatttaaatattaaaatattattgattgcaagactgtgtaaacattagtcaattgataaaacatttattccttgtgcttcaacgcaaaactgtttgtttttgtactaagtctaaaatgctcctcttttttttttttgccttaatgagattgaacggtcaaacaacgcgtcctacggtggaacgagttctacgtgggtgctgctcgtgtttagtatctaatatcgataaatattaattattaatttttatttttttaataaaatggattgagcccacaacatttttcttatattttttaatcacccaaaaaaaccttatatctcctgtgtaccattgactgctgcaattaacagacttttatttttgtgtaattgttaacgggctaagaaaaaaaaagttaaagatgtatcaagtaaaagaaaaaaaaaagtagaagtaaaattaaatgtatacaaattgtttcatgttgtatgaaaaccgatttcgtaagccattatttttaggtaataattaaaaataaacaatttttttcattatttaaaattcttgtaaatttaatcaaaaagtattttcaattttctaatcattattaaaaaataatgataaataaaaccgttaaagaaggaatacattttgtacttatggaatactaatttctttgtaattattcatcttcatttagtattttctttaaggtgtgattagtttggtcatggtgggactgtttagtggagtggtggtttgatatacaggtttcccc

SEQ ID NO: 26087 - DNA, 356 bp, Glycine max
  Intron number 3 from transcript Glyma15g19200.1 (locus Gly ma15g19200) derived from phytozome v7.0 (chr-ID Gm15; pos 16338350 to 16338705)
aacataagaaggtacttgactcttgaacctccatttagtatttaacacaccgaaattatatttaaagttctttcatagttcatttttagcataatgattaaatcaaaattgatatctgacttaataatcgactaatgttttaacaattattgattacagtcatagagttttataatctaactatatgctacaataacggaataagttttttttttgaaaaagcattctcttcccttgtttcctaggaaatgctagaatttgtgagcctctgcatcatgttaatatttttgttagtagttaaattaaagcttttgacatcaggttatcactggcatcgcacttcctgttggatccga

SEQ ID NO: 26088 - DNA, 238 bp, Glycine max
  Intron number 3 from transcript Glyma16g21560.1 (locus Gly ma16g21560) derived from phytozome v7.0 (chr-ID Gm16; pos 24600914 to 24601151 reverse strand)
aagttagttccttcgcttgacttgactctcctttgatttgttctgtttgtgttgttagttatttaatccttgatggaggttttatattcactgcttattgttttgattttcttgtgcagaagaattattctttaactattttcttgttttctatgtgccttgagtatgcataatatatgtatgtatcttaaattttttccctttatgtgcagccatcttccctagctgcacttcgaga

SEQ ID NO: 26089 - DNA, 901 bp, Glycine max
  Intron number 1 from transcript Glyma14g40520.1 (locus Gly ma14g40520) derived from phytozome v7.0 (chr-ID Gm14; pos 49460113 to 49461013 reverse strand)
acacgagattgttttagcttaaacagtgttctcaggttcgagtattgaatattcttctgtgaaagataacctgagctctttttttttttttttttaattctttctgaaatatctttcattttcaattttcggaagagaaaatgcatttttgttggagtgtacggttgtatgacatcatgggataaagaataagggaagtcgatggttaaatcttggagattgcagttagcatcattggcttatgttagctcctgtggcctcactcactgtgtgagtgaatgcatcagcatcacagttacaaaataaagtaacatgagtcaatcagggacccaaaatgggtgccaaaactatgagcaatcaacaatttggccttgccctgttgcactgtttgcttttgggggtcgtgtcttgtgtgtttttctatcgccaccgacactaccgacgagtgcaaaattatgagtcatttacttttgagtagtgttgaaaacggaagccacttgtgtgatgctatcgtgatggccttttgtgaatcggtggggatggttgagtattcgtatacggtttgaattactatttgttagtgtaataatacagtagtatgtgtgagaattattttttatcatgttatttatccacttactttgtcgattaatctttgtgcgaaaacttagactatggattgttttttttccctcactttttttcatttataaagttcgaaaccaaaatcttacctaggaattaattctagtaccactgagaccaagttggtgtttatgcatgtgtgggaaattaacagagcccactgggtaaaaaatgaaaaaaagaaaagaaaaagagaacttgcttttaattgtaagttttaactgttttttggattatagggtgtccgtacttttca

SEQ ID NO: 26090 - DNA, 1028 bp, Glycine max
  Intron number 1 from transcript Glyma14g37400.1 (locus Gly ma14g37400) derived from phytozome v7.0 (chr-ID Gm14; pos 46681342 to 46682369 reverse strand)
tggtatgttaagttcttaaccaactacttttcttcaaattattgtgcttgatagggggaattgtgaatttgtgatttgattaaatgttatattaaattgatcgttatttggttacttgataatggacatgtgtggccaacgtgcatcgtatcaacctatttgaatgacatttgttaattgacataagtttctgcagcttttaatatgtagggatttcctctactcaactatgtacatatctggttttgtgaccttgatactaactggactagaacataaacaataaaattcacaatcaacatgttataatatggttggcaaaatatcatacttcttaaatatgtggttagggatttgatctctgaatctgtatatgaagatcaatcccttacatagatcttgatatttcatgagattagtatgatcttttacctaatggttcaatagaaaacaagaaaaactgaactaagaaaaatcactgatatcataagagggatacaagaaagattaagtagcagaaatgaaaatatggaatgaacttatggcaaatggaatgtgtagattgttttgctttaaggggtgaaggaatgtgttctgttaattgattaaacttttcccatatgggttgaaaatctaagggatctattcgaagtttgaaatcattataaggtaccctttttgtaaatgggtttattgaaattttgttttttggtaccttcttttcttggtctaccctatctagtaagaaaaggcttcattggaagtaaaacgattaaagcagctcctggtcctgaagccccaatgaaaattcaatttcatatctatttcttactctttctacgcctcctccaaacaaaagggcatcatactagtttaagttgaaatattcggtactcacaatatggcttaattttggaaaatgactagttttaattgaaaattggtacttacaatgtgtcttaattgaggagaatctgacaaatggtttttaaggtgcattgtgagtctgtaactgaaggggcacaggc

SEQ ID NO: 26091 - DNA, 266 bp, Glycine max
  Intron number 1 from transcript Glyma16g03120.1 (locus Gly ma16g03120) derived from phytozome v7.0 (chr-ID Gm16; pos 2713272 to 2713537 reverse strand)
gttgctgcagagggtaatatagtaattaccgcctttcttccttttttctcatttttcaatttgaatatttactgataactggagtgcttactctgtttgtattgtgcttataattatgaaggactcaaaaaacttgttactgacttttgtcatatgatatggatttctattgtgcaacttatgtgaaagcgcttgataagaggctgacatgtatacgtttttctttttcagctccaattctccagcagtattcaccatacgtgagt

SEQ ID NO: 26092 - DNA, 186 bp, Glycine max
  Intron number 1 from transcript Glyma14g35380.1 (locus Gly ma14g35380) derived from phytozome v7.0 (chr-ID Gm14; pos 44316951 to 44317136 reverse strand)
tttttgctgtcaagtttattgagagaggccagaaggtgttcttcatcttctttaccttttcaatttcagtttcattttctttttctttgttggtaattatttattatttatctgggtttgtaatggtttgagtgtgtgattttgtttgtggtttactgtggaaatatgtgctgcagattgacgagc

SEQ ID NO: 26093 - DNA, 514 bp, Glycine max
  Intron number 2 from transcript Glyma13g08790.1 (locus Gly ma13g08790) derived from phytozome v7.0 (chr-ID Gm13; pos 9511171 to 9511684)
tgaagaacaacacaaaaaacgcgaaatcacttgtagttatatattgcaaaactttaaaacttagttattatgttgtaagttagttttaattaatcactatgttataggattttttttttcaatttgtcattgtgttgtaacggtcttttaactatgttgaatgttgaatttgatttcaatttctctaattaattatgatattcaaaacaactattagttttttattatgtaggttgtcattctaaagtagtcgttagaaagtagttgttaaaaaagtaaccatcgtggaactagttgttggaatgatgctatttaattggtaaattttctttcagtcatgtacatttttttttacaaactctgcaatattcttctttcaaaatttggaaagaaattgttgatgaaacattggaagacaacactgaagaagaaatcataaggtacttatgtggggagcaacaataagtaaagaatattagtcgatcgagacaaaaaaagacaccatataaatcac

SEQ ID NO: 26094 - DNA, 604 bp, Glycine max
  Intron number 1 from transcript Glyma13g40420.1 (locus Gly ma13g40420) derived from phytozome v7.0 (chr-ID Gm13; pos 40914433 to 40915036 reverse strand)
aatccttctagtggacaaccccaggtaggataattaattaacatgcaccatgctagatatattgcctgattaaaattttaaaatcacaatcctctttccttttctctctttgcttcgtgtggttttacttttgagagtgtggttgatattggtttttaattcttccttccacaagatcaatttaaagaatgaataatgaaatgatccatatatgtgtgtgtataatatctgtgtttccaattgaattctcgaagctgagaatttgatgttaaggcaaattattttataactttcccatcttcatctttgtgaattacccttcaatcgtgtatcaacaaaatgcaagaattgaaaatttaggtgtgatatatatattttttgcgagtgtgattatgagtgtttttttttattttttatattcaattgtttctacctataatttgcatcataaactctccttttctgactatatatgtgcgcacgcatgcatcattcacggtacacacttagattcagccggggaaattttatttggcactttggcctgaaatcaactatttaattcatccacactcatacaactttatatattttattgcagcaa

SEQ ID NO: 26095 - DNA, 824 bp, Glycine max
  Intron number 2 from transcript Glyma15g43370.1 (locus Gly ma15g43370) derived from phytozome v7.0 (chr-ID Gm15; pos 50898185 to 50899008 reverse strand)
ctcttttactttttgtcattgatctcaaggaccaggttttcaatgaggttatataaatttttaaatgggacaatgtcatgacagtgagtaagaaggaattgcaaattcatttccttattatatttaattttctaatttcatgattttttcctacttataacaccaatatcaaattctctgggattcttgctcttccatgctttatggtggtatttaacataaccattttttgataatttagtatttttctgtatgattttatggtgacaataacattttttgtttcatgattgacattggaagcaagctgcgggatacaatcaaatcttttggctgtgtgcagggaattctgatctcaaattgtccacggctatgcagcgaaattcttgacaagttgaaccacccttttctacctgcattatctatatgcttccttccaggtttgtaactcgaatactactttaaaataagtaacagaatgattagtattgatcaattagaataactggtaggaacattaggatctctttagcgatgacagagttccaatatgtcacatcacaacctttctatcatagatatccttgttttatagataatgatttcacaaattatattgtcttgagctggactattgcctttatttcctattacatttaattctgaagctaaagagtagcaaggattttcacatggctcctttactatttaatttactaaatttgttaaatatttcaaacctgcagaccaaaactcacgtttgtttgattactaattattgtcctggaggagaactattccaacttcttgattggcaattctga

SEQ ID NO: 26096 - DNA, 642 bp, Glycine max; identical to SEQ ID NO: 24852
  Intron number 1 from transcript Glyma13g40400.2 (locus Gly ma13g40400) derived from phytozome v7.0 (chr-ID Gm13; pos 40900921 to 40901562)

SEQ ID NO: 26097 - DNA, 741 bp, Glycine max
  Intron number 4 from transcript Glyma15g01430.1 (locus Gly ma15g01430) derived from phytozome v7.0 (chr-ID Gm15; pos 897921 to 898661)
tatagattatcaaggtaaaactccaattctaagaagtattgtccttacttgatttagtagaggtaattctttgttattcatgcctaatttatgtattaaagacaaggagaggggtgaattaagaggttcatcctggatatcctggaaaatgcttctcgcgttgtcaccaccagcatggcattcttttgagtgggaatgggtgaagtgaaactcaaataacgtaaatgtctttcatgtgggaccactggatcatagatgcgactgtgattggctttttttcaacatttggcttttctcttgtcccacattctgatgcatgtggaaaaggttatgcaactattttactgaaatggaacgtaattaatgatctcttgagtataggaaactctttctagtttaaacgttaaagcttggcattttcttctgatagctatgtatatttattacttgttgccactcaaaaaagtagcctcctaaatgtaggtaacccgtcaggtacaagtaggctatatattagtagttggtcttcccccatgttatttgaataatacaatcttgttctgtttatggttagaacttcattttactattaaaagaagcataacccttttcggcacttgagacagtactggatggtggtaggcaagttactagttactgctcataatttatgccgatcttgatgtaccaaacaatagtcctagattagataccttttgaaggcttactgagttgagaaac

SEQ ID NO: 26098 - DNA, 797 bp, Glycine max
  Intron number 1 from transcript Glyma15g13530.1 (locus Gly ma15g13530) derived from phytozome v7.0 (chr-ID Gm15; pos 10131765 to 10132561)
tcatcaggctccactttcacggttgttttgtacaagtaactacctatattcttcatatcttaactccataatgtgatatgtagttttttttttctttttattttaaactaaatcctttcctggctacttctgttaccccgagaataactcattcataaactttttttttatattacatagttgaaatgtatatatgtggattcatgaacggaggaaagcctcaaaccacttctatagaaattttactattttaaagagtagatgtgtttgagttctatttttaaaactgattttagtttcaacctaaataagactgctcatactacagttggtaaaggctggttcacgatataccacataggtcaaagtgtaaaattgaaagagcagttgaataagataaaatcaaaaacatgaagatgagaaaattaaatacctcctagctattttttcttttggtttttaagacacttattttagaaacaatttaaaatttattagatttaattaataattaatgagtgatgtaaaatcgttttagaaaataattttttaaatgaaacaatgagaaggggatcaatcaaacatgtctttggtcccctccatcaattttatgcgtaaaaggaaacgcagtttgaaatgtcaagctttccttatgggcactgataaatcaagagttaattaaataagagaaagagtgttttgttttaatatgactcaaatttcttgttgctgagaattgaagtgaattatatatgtttccaggggtgtgacgcatcaattctattgaaccaaacgga

SEQ ID NO: 26099 - DNA, 875 bp, Glycine max
  Intron number 2 from transcript Glyma16g24270.1 (locus Gly ma16g24270) derived from phytozome v7.0 (chr-ID Gm16; pos 28104164 to 28105038)
ggttcaatcaaaccctcgatcacttctctccctatgtatctttctctctctcaatctctctctttttctctttaaatgcaaaatagaagtaaagttcttagcttacatgatagatagttgtaaagtgcaacccttgattttactgtgggtgggaattaattttagatgctgaaagttttataagctaaggagaaatgttgagtggattatagttctttctctctctctctctctctctctcttttttttttttttgattttggttctttcaacttgcatcaaaatatgctcgtcaccaatttgattgttcctgcttaaccagtagtcttgaattcgagtcttatgcaactgcatgaaatattcagagggagacgtttttaatggtcctatctcgagtatggttgcatcaagtgcaaaatactcataagcaaaaataactaatttcacacctaaagttagttgatatcatttaattttcctaatttcaattaaaaaataagattgtttttaaaatgtccttcattggaacttgctatggtgagtcaaaagaagttattgaaaatagaattataattaaatgaaaagtgttttcggaatgagagcattaaataggacaaaattagtcaaatttgcttatatttaagtccaacatacaagaccaccttttgcttatatatgagtccagagggaggagtatgtgttagcaaaaaaataatatgctcctgtgttttctttcttaagaaaataataataaaaaatgggattgtttggtgtatttacctcatatgtttatcgaattctgatgctgttagttgtgcgtatttggttgttgcaccacaggatcaccatcaattccgtcaacgttacttcgagtt

SEQ ID NO: 26100 - DNA, 624 bp, Glycine max
  Intron number 3 from transcript Glyma13g34860.1 (locus Gly ma13g34860) derived from phytozome v7.0 (chr-ID Gm13; pos 36384270 to 36384893 reverse strand)
aagcttttgctaacgcataccagcctaaggaagaggttttgcaatgctaacaccttttttaatttgtaggtttaatacatcagtagctcctgaacattttgtgatttttaatctaaaaaatcttagggtcctgctaaccagtgccctcagggcatgcattggttatggagttaaaaagagaaaatatttattgtggaaatcataggagaataagccatgtggagcgcatcttagtaaaaacctttctccttttagttctttaactaatgtcctaaagacactgcttagcatttgccaaaatcttataattgggttcttgatcttctatatgttttgtaattgtattcctagacttagtttatggtggcttgaaattgctagaaaaataatattttgcagtggctttactgactccaggaatcaaattacaaaaattgtagaagatccaggacccaattacaatgtttttagtttaatgatctaattaaaaattcccaaatagttttgagacctactgatgtattaaaccttatttgtattttatgttatcactcatcatttgaaaactaactatcttgttcatgtcccaattgcagttcactaattttaatacgttgtttgagg

SEQ ID NO: 26101 - DNA, 639 bp, Glycine max
  Intron number 1 from transcript Glyma15g05260.1 (locus Gly ma15g05260) derived from phytozome v7.0 (chr-ID Gm15; pos 3737114 to 3737752)
cccgccttggggttcttcttcactcctgtttcaaggtcccttttcatttatccattccatttaattgcaaattttgggacttgggtttgattcaaattttcaaattatttttcttttcctcagttatcttatgggaaccgattgaaatggaggtcacaagtatcatgtcgtttaagaaggtttattattttgtagaatttcgcttattatgatcatgtggcgtagttgatcttcctgttactggattcattgctgctttgaatgctgattgatgatgggaatatgaaataggctatggtgtttgagatgtgtactcgatttgttatcacttgtttgaactttctccattctggttgatgaggctttctcttgtggcttctcaatcttctttttgtatattttggtttatatgaatttggatgtccatcagaatttggtttttaaccgagcctaatgacatcgtgtaattcatgtagtcaacttcacctagtagaataaggttgttgtgttgtatgaatttgagcattggtgttcttttgatgttgtggtagtgttccctgactctgttgtcccctttgctgatcagaaactcgctcctttaactcatgtgtttagattgaaggattagtggtgtcagag

SEQ ID NO: 26102 - DNA, 441 bp, Glycine max
  Intron number 3 from transcript Glyma15g33020.1 (locus Gly ma15g33020) derived from phytozome v7.0 (chr-ID Gm15; pos 36578499 to 36578939 reverse strand)
gtcaagccacggacccacacagcatcgctgaaagggtacttattacagtttttgtttctgactttaattcttggcttcatttaatagcatgtttaggagttctgaaaatggagcccaataatttcaggttgtcgcttttggtaaacaataccctagtccattagtattattcaatgaaactaattgtgactagtgagtgcagattgaacaatgagattaattgttagggtttgttaattatgaattttgaaagaaaaataaaagaaacgaaaacaaaagaagccacaataataggacatagtcgattttgttttctatccgtttcccgggcagttaagcaaaagcaatgaatatagtgttttttttggttgtgtttgttattctgaagttggttgtatacgttgtttgtggcagttacgtagggagagaatcgccgagaga

SEQ ID NO: 26103 - DNA, 748 bp, Glycine max
  Intron number 2 from transcript Glyma15g41430.1 (locus Gly ma15g41430) derived from phytozome v7.0 (chr-ID Gm15; pos 48531382 to 48532129)
tttgggaagaagagggcaactgacattgctcacatgtatgtactaattgaaaattgaaatgcttctgttttcaaaatttctgcttgatttttccatttttcaggttagtatttggggggaaaagtcagtttgttgtctaggacttattttcaattttgagttgttattgtttcttctaatagaggggcagattaaaatttcaaattttttgtacatgctgtttttttttttctctttttctcaaccatggctgatactgatatgctaatatagaactattatgtcagctttatttgttgtcacaaataatcatataaataatttttatttttaattttaaggtatgcataggcggatgttttacgagagcctgatactagaaagttacattgtatatgattcattatgattatttacgtgagtgttagacttggaattgatcttatgctgcatttgtatcacagagtcacaaaatgctgagcaatttaactttttgtagtctaaaattctaataatttgtggcaaaattctctttgttatataatttggatggcctctgctatatccatttcagtttccatgcttataaaaggtgctttcgttgagttaaaagtaaacatattccattttgttacagaactctattcggcaggcctgctacttgtacttgttattattctcatatttatctatatagatttagccttgataatggctatatttcttgttcctaccagggtgtggaaac

SEQ ID NO: 26104 - DNA, 1005 bp, Glycine max
  Intron number 3 from transcript Glyma14g16130.1 (locus Gly ma14g16130) derived from phytozome v7.0 (chr-ID Gm14; pos 17450172 to 17451176)
cgaggaattctgattgattggcttgtggaggttagtctcgtggcaattttttacatctatactacttggcatcttaagcttttcctattgccacttgttgcaaatctatctgtgtaatacaattcatcttcctcaatgtatgtaattttggtcttcgtataattttgacagttgcacttctttgattcttcctctagattattgcagagaaacttttgaagtaatcaacatgacaatacaatactatgtgtttttcttcagagttaaatttttcattactccccaaccatgttatttattcagttaatgtcaaattttgataagttgagggtgaaccttggtaccatggtaagattgttgttgcctcatggccaagagattaagaattcaactcctagaagcaacctctcaatttatgggagtaagttgtgtatatgtacgctccctagatcccactaggtcgaaaactcaggcattggctcacccttttattaaatttttacgagctcatctctgaaaaaaaggattatttaatattcccttgtgttcgccatgtgggaattagaaaactttattctaatttctaatccaagtttccttttcttctccatgtaataattttgtaagttcataaaaaacattaaaaacatgcattctttctcttttgaatctggtgttacatttcggtacttgacttccatgtcaccatctcaactactgcctccatgcctctcctattatgcacaaaaaatcttgttactgcattcttgtggacagatttcaatgggaacagttgaataattcatactgagaagagctgaatttttataacatatccatgataaaggcacattattagaaataaaaaacaattcttttattactgttagcttcaatctttgcatcagttgcttcaatccttggctgctgaatgggttatagctgaagcttttttatattctcttttcaggtttctgaggaatataagctagttccagatactct

SEQ ID NO: 26105 - DNA, 783 bp, Glycine max
  Intron number 1 from transcript Glyma16g27890.1 (locus Gly ma16g27890) derived from phytozome v7.0 (chr-ID Gm16; pos 31837981 to 31838763 reverse strand)
attgttttgttcaggtaacttagtacaatcatcctataaattctacagtgtcagctttgcagtcaataacttataacttataagtttctaactagtttataagcttgaattcaataactatcttatgagtttgttttacaaaacatacatttagacttttcactataaattcaataagatttaaggtagtagttcgataaaacaatataataatgaattaactatctacaaagccaattaatttattttgtcaaaatttcttgaagaaataatgttctaactatatatatatatataacattttgacttaaatatattttattctcttaaatcggatataagcttaattttggacatccaaatttaaaattgattcttttagtttttattatttgaaaaaaaaagctatattttattccctttacccaattaaacaccctctcaaatggtagcagaatgaatattataaaagaaaagaaaaacacaatagagaatttaataataagaatacaaaataaggtgggttactatgtaagtgtttgataattccttagttacataaaatctctactgatgtttcagcatagaactaaaacttttttttccttcaaattacagaagctaaaaagattaattttaaatttaagaaaacgaaaacagagatttgtccagagattaaaaacatattgaattccaacatttttttatcactaagattatgctgggtaatctgatcctattttcatgcatgagtgattaatttgttgatatatgtgcgtaggg

SEQ ID NO: 26106 - DNA, 394 bp, Glycine max
  Intron number 2 from transcript Glyma15g15070.1 (locus Gly ma15g15070) derived from phytozome v7.0 (chr-ID Gm15; pos 11523776 to 11524169 reverse strand)
ggagcctgacgcaggagaacagtttcatatacgtgagtgctatgcatctgcaatttgaatttcataaatcgctgtgtagtgagtagtgactttttatttttatttttatttttatcggttttatgcttttgtgttttgcttgatcggtgtgatttgcttatatatgtggaatttaaaatttgaattcggattaattgcaaatctatgtcgtgcggagtttatgtaggctaggtatgaacttgttcacgacgtgacgctttgaatgcaatgatttggaattggagcttttgaaatttttgttttttctgttttgaagaatatggctgataaggtctcattcatgattgattcataatcaggtgcctccgaggggaacggcacagcaatcgagcgg

SEQ ID NO: 26107 - DNA, 682 bp, Glycine max
  Intron number 3 from transcript Glyma13g31980.1 (locus Gly ma13g31980) derived from phytozome v7.0 (chr-ID Gm13; pos 34290236 to 34290917 reverse strand)
gaattttggttgaggttagtttcattgccattacacttgcagcaattgctatcgttatcattatcatgtccgtgattactgattattaatgcaaaataatgaccataatagtgataacatcacacttttttacacccttcacgaattcacgtttctgatgcaaaatattgaggaataattaattctgtgttccgtccaacacttgttatttgcatgatggcagtgatggtttttcctaatcttgttagaaaagaaaaaaataagagagaaagaaagaacaggtttgagttttttagagatgttcttaatgtatgaatgaacaaattcgtttctactctgactgaggtatccttccaagatatgctaatactgaagtggtttattggatcatgctcacggactaattgaaaaatatttagtcaatacctcgactctgttctttcctgagaaactttttggcctctggggattaggtttttgtggacaattccaatgaagctcagaagatctgaatgcaagttatgaaatctgtgggaaaccaaatagcaatggggttcacttttaagttttgccatgtaacctgtgtattctagaatacttttgcactggttcacttttgatttcttgtttattaattgtttttcttaatctgacaaacattgccctttttagtaggttgtaa

SEQ ID NO: 26108 - DNA, 540 bp, Glycine max
  Intron number 3 from transcript Glyma14g09000.1 (locus Gly ma14g09000) derived from phytozome v7.0 (chr-ID Gm14; pos 6986132 to 6986671)
gatatcttcaaaccattaacttgaaacaggtttgttcccccatgtgtgattagagctctgttgtttctttgcggtggcaaaaaagggaggagaaaaataaaaaaaaagtaaaacttaggccttgtttgttttctgttttaaaaaaaaaaacagatttctgttttctaaaacaatttttaaaacaaaaaaagtgagaggagaatcaaacaggcttttagatgtagttctttaagtgtttttagaactgttcctcaatcagaatttgagtttcactttcacctcagtaatttgtgtaataaaagtttgcattaaaaattaacataggttaccaagataaaactctaatttagatagaagaacaacactaaaatcacctacggaattgcttctaagttttgtccaaaagtaaatttttgtatgaagtattatgagtgtgatatgctctaagcatgttctcttgatcataccatcactaatacaatatacattgtttaaaatatattaggttgttatagccttagctgaagttctgtgggacca

SEQ ID NO: 26109 - DNA, 593 bp, Glycine max
  Intron number 6 from transcript Glyma15g14500.1 (locus Gly ma15g14500) derived from phytozome v7.0 (chr-ID Gm15; pos 10954502 to 10955094)
tgtcatcatttgaaaaaggaattggtttggtttgggtagcattccattcaaaacatttataataacaagcctacttttgtttcttttccgcaaaatcccaaattaaacctatcgtgtcatgtttagttggtctcaacaaattgattaatttgatattaagatcactttgtggaagtggctcttgtataagaggaaagaacaattagtgatcttcttctcttcatggattattaatcctttgctctgcttttccttacatagataggatatattactagatcctttttgtgattgtcatcatatatcattctggttagtggataggctttttgaatgtaatattgcagcttgtatacagacttgctaacttcgtgtgtgtgtctatatatatatatatatatatatattatacctttgcctttaaaaaaataagggtacaataatactgttaggtccggttagctaaagggaaaattttaaaaattcgaagccaaggcctaattaaggttctgagaagccgagtgtcacagtgagtccacaaaattgagactggcttcaattggaatttggaatatcaaaggcaatcatcaaat

SEQ ID NO: 26110 - DNA, 413 bp, Glycine max
  Intron number 1 from transcript Glyma14g10340.1 (locus Gly ma14g10340) derived from phytozome v7.0 (chr-ID Gm14; pos 8509063 to 8509475 reverse strand)
tggtggtaactggattgctttgcctcaaaaaataggtatatacatattatactacaaacacacactactttctatgaaaccctatttatgaatttgggtttccttgattcactcacatgtatatcttcctttcattgattatctatgtgtaattaggagccaaggactcattactaaagaaaatttttgcatccagacttctaaatttccttttgatcaaacttaaagttaatacagtatcaaaattattatagtattatttttcaatcaaaattagcatttggtttcggtgattctcattaatttaacaaccattatgatcaacacgaaatactagttttgtatgtcttagttaattatattaattttgtgaatcaggccttaagcgttgtggcaagagttgccgccttagg

SEQ ID NO: 26111 - DNA, 663 bp, Glycine max
  Intron number 1 from transcript Glyma13g27250.1 (locus Gly ma13g27250) derived from phytozome v7.0 (chr-ID Gm13; pos 30416323 to 30416985)
ggtgaagtggggtgtttggttttgtcatttgggaggtataaagtttggagatgtttgtgttatttggcttcattgcgtgaaaattcatctggggttgttcggattctctttgatctgtctgtttgcagcggaaactggtagaaaatattggttttttgaggtggtttttgtgtgcatatgaagttttatcgcatggtctttgtttttgaagtagatagtggatatctgttcactgttttgatcatgcgagaatctcaaagaaactgaactttttctttgttcttttttttttttttattgttgttggtaatgggaaaagtgctttgttttctcagccatgtacacaaaggagacttcattatttagaatctgtcacccttgtcattttctcttagccttttctcatctacgtaacaaaatttgagatcagaagttctttttcttgtttccactttgcaaactgcttagaatggttgttaaaaactattctttttgtgtgtatgattatagcttcaatttgagatcacaagtttatgttttttgtcttcactttgcatactgttgagaatgcttgttaaaaactagaattttttattttcttttgtgataatagcttcattatctacagattaagaataaagggagtcttccaaattgatcttc

SEQ ID NO: 26112 - DNA, 957 bp, Glycine max
  Intron number 2 from transcript Glyma14g03360.1 (locus Gly ma14g03360) derived from phytozome v7.0 (chr-ID Gm14; pos 2163100 to 2164056)
ggagcaacttacatctacaagctcacctaatagtggtacgtaagctaacatctcctctttaaatcaatgatatgtataagggagacagattaattgtcttctgtttttgtaatgccattttatcactgttagaaaccccttctctgttttgttgttaacttgctagtttaaatgaaatatgctgaagatatagacatggctggagaatgtaattgttttaatagttttaatgggaaaaaaattgaaagcaagagtagtgcctttgaaatcacaagttacaagattatgttactgccatatcattaaaatttcaatgatactatgaaagagcttgcctttgatgttaccttatccttcccccttatggccgcatagtataataatttagagtagaaacaatgaagttggaatcacatagtattactcagcatagaccaaattcatggtagaatttgggtgttgtaatatgatttgttcgtcaaagataatgtgtttagccgtagtagttgtatgggaggaaaataggcggcatgaaagtttgaaaattgagtaaaaatttgactcctctaagataagaaaaaatataaagtgagaaagtaaggatgtatttatccttagtttgaagtggttcaagtttacaagttatttggattcaaatcaattgtaaatgcacccttaatttctcactttagaagagtaaagtccatatttttggtatgatcatatgtctatttctccccatcttgcataacttttgaaattctcccatgccatttatctctctgttatgaatcactcctgatatggatgtttgtctcatgagttatgtgagaatagaaattttagagccatgtctgttcataacctctttcttgtatttggtttttcttctctttttttttccctttaatattgggaaaaggattacaaagattgaacatttctgatttataggtt

SEQ ID NO: 26113 - DNA, 803 bp, Glycine max
  Intron number 4 from transcript Glyma14g24720.1 (locus Gly ma14g24720) derived from phytozome v7.0 (chr-ID Gm14; pos 29760063 to 29760865)
ttgaacgaggtaaagacacatgtcaatgaaaagcatgaaacaaaaacatggagaaggatctatttttaggttcttttgattccttcataagagatatgctattggtgatgtcctacttaaattttttgtttgtctttttaaattttagctaagaataagaactagcttaatcaatttcatgtgtgcgacatggttaggattgattatctagggtttatatagtcttcatcatgttgttggtgaactgtgtttttttcccatgtcgtttctttgttttgtaattggggactatagttgtgcatgtagtttctacatgttgtgttgtttgaatgaaagggcatcttgtgactttaataaataaattttcaaatctatctaaaattccaatcttttgaactccaattaaggatttgattttcttgtctccatcaaaggcaagttgagtttgcaagtaagtttaaaagacgtaggtacaaacaattaacactcaattccatttttgttagggtcaaagaaagaatttgtgtactcctttttaaaaaaattacttatatatatttttaaacaaactatatactaagttattaactatattttgttggatcgagtggcctcagaataattaagaagggggaggggttgaattaattattcctaaacctttactaattaaaaaattactcttctaaggcttttactgaattgttaagagaatgaggagtagaagagaaacttaacagaaagtaaaagcgaaaattaaatgcacagtggaaagtaaaagagtagggaagaaggaaacaagc

SEQ ID NO: 26114 - DNA, 492 bp, Glycine max; identical to SEQ ID NO: 19307
  Intron number 1 from transcript Glyma14g39420.1 (locus Gly ma14g39420) derived from phytozome v7.0 (chr-ID Gm14; pos 48513383 to 48513874 reverse strand)

SEQ ID NO: 26115 - DNA, 784 bp, Glycine max
  Intron number 1 from transcript Glyma13g25450.1 (locus Gly ma13g25450) derived from phytozome v7.0 (chr-ID Gm13; pos 28695526 to 28696309)
aaggtttttgcggtcttttttattttattttattttggggtggaagtaaaactttactcttctttatgtggcgatgctgaatgaaagtttagatgggttagatctaattgaaaagcttaaggggttgttttctctgttattttatatgaagatgttaaagaatgagtcaatttcttcttttcaccgaaaaagtatttatcttgttttaatatagcaattggactttgcttgagaagaatggagttttggttgttttggctagctatggatttccccctgttttttcattgtctttttcatgcgatcctcgtgtcggttaaacccaatgcatgcagctctgttttcgtgttccatgaggtgcttatgtgttgtatcatgtaatgccagttttggaatttctttgatatgtgtcttttgtttctgttttatgaggaggtttgggtggtgctgaaaagtgtgtgtggattaagcaacttgtgatcattgccaatactctaagcatgtttctcaaattcacatgtattagctctttcttgtcacactgctgcatgtgcatcaatatctcactaccccttttgttagtcctcaatctcctacacaaaagtgactgtaattatgtatatggcatttagttctgtgcattttttctctgttttggaccttcggggttgagttggccagtgattaagctcaagagtcaaaagcaatccttttccctttactcccgtgtgttttgtacgatgaaatgatttctgatactttctattgcagcaagcagtttgtg

SEQ ID NO: 26116 - DNA, 217 bp, Glycine max
  Intron number 1 from transcript Glyma15g03600.1 (locus Gly ma15g03600) derived from phytozome v7.0 (chr-ID Gm15; pos 2501001 to 2501217)
tttcatcatctgggtattgtttatttcttctttttcttcttcagatcatagtgttttttgttttatttttcttctacccttttaaatctattgcgtttttgagcttttaactattcgaatctacttgcttcccaataaataattacaactctctggttgttgcttattctagagttcttcttttgagggctttagcagattccattccttgagtctc

SEQ ID NO: 26117 - DNA, 795 bp, Glycine max
  Intron number 4 from transcript Glyma16g22910.1 (locus Gly ma16g22910) derived from phytozome v7.0 (chr-ID Gm16; pos 26559657 to 26560451 reverse strand)
gtcacttgctggtaactgtcttttttcccatcttgatgcttttattttcctcttcctctttttaagttgggtctgtagccttatatactatgcaattgcataaatatataaatagcactttacacatacaactatgagtaacatttttggttatgttcacttcattgctgccatgtccctattatatattttgggtaatgatgtataaaagagttgaattttgatgtactagaaggatgaatttcttttaatactttcatacgaacttccttgtaatcttcaagtttaactgaactattttttaaacaattactggcgtcgtatgtcaacatgctcttgatactatttgcctctgtaagggttctggtataatttataaacttacaattaatgtgccatgtagcatgcttccttctgcagtctttggtataacttatttttaatggtggtattttgtgaaataaagcaaagcaaaccccatcccattcctcacttctttcataaccattgtttttgttgtcaataggtttgtctgatgcttgattatatttgtatatttatgtacttctatagcaattgtgtatgctgaactacacaaatatggggcaactaaatagttttagtatgttaatctttgtggaaatagtttcaatgagtttctcttaccttgattagtaccttgtatatgaaccttttagcaaacaagctactaaaaaatggacaagccatgatcattttaaatgttgttatctttttggccacaggcaggggaagagcgcttttcaattgagattg

SEQ ID NO: 26118 - DNA, 910 bp, Glycine max
  Intron number 1 from transcript Glyma15g00490.1 (locus Gly ma15g00490) derived from phytozome v7.0 (chr-ID Gm15; pos 252162 to 253071 reverse strand)
gctcccaccctggagctccgtagattattctggcggtatccacacctatccgctgttgttgcttcggtccctcccttttctcttgtctgttactcgtgcctatgcccatcgatgttgatgttttaatgtactacctaaacattacatgtttttttaaatactactaattttgatttgcctaatctatccttatcattattaaagcatgaaactatttgttggtgaatggtgatttagcatatgtgctcatacagttacacttgcagaggcagccgagagccctcttctgtacttacaaatagggtgctcataatttagctatttacgtgatttggatacttataaatggatattataagtataactaattttatataattatttattatttttaaaatatgtatatataactgcttagaataaataagttataattcattataattacttttattctctttcttttatcccctcctaaaagattaaaaaaattataagcatttaatatattaacaacttaaaaaatatgtcaacttcattgtattttttatttttaaatctttataaacttaaaactatttccttttttttgaaagtacgatgttgaatttggtaactacatagtacatactatatcgtacatcatatcatatgaatatttttaaattcaagacacgattaaatagaataatttttaaacacatgttaaacaaaaatatttaaattatacaatatattaggtaactattatacacattcaacatttcttcttgtatcaatggttgacaagtccaaatttctctcttagtagttcaagatttaatgtagttgtattcatatctatctaaatgttctttttttttttttacacatagtgattttgcttcagtagtagcaattttctttttcg

SEQ ID NO: 26119 - DNA, 991 bp, Glycine max
  Intron number 3 from transcript Glyma15g07390.1 (locus Gly ma15g07390) derived from phytozome v7.0 (chr-ID Gm15; pos 5192021 to 5193011 reverse strand)
gcatcaaaggaattgttttcttctgcttttggcaggtaaactcattatcatttatataatcatctgataagctgagttaaatgaccacttagagccataaaaagcagcacagagccaacaagagaataaactcgatgtaggaaaaatgagaatgttgtgttggattgggtgactgaacacagtaagtaaaatgggtataggccgagcatgtgtggataagacttagaagactcagtgaggagagaagaccaaatggaaggtaaaataatcactagaggtagaagaaggctaagaaaaacaataggcgaaacaataaagaaggatttagaggttaataattattttgttgtcgtgatttacaacagaacattatggtgttgttatttgatactttgatctatgtaaccaatctcacctattgggtaaatgcttggttgttattgttgttgttataaaacacttgatcaaactaacgtttattaattgggcaccataagttcctattgtgttatactttggggtgtatttatgttaaatactttagtcgatttgcatggtctaaagatgatgatgacccgggatgtagttagtaaaattttataaataaatcttcaacacctgctgagtattagcctaggaatctgtccatatttattaatctgtccttgttcatgtacagatctgtgtaataaactaataattgtatccctagtataaaatgtgaaattaggaattagagaataaacatttatttgttgtaaattggaaaatctttccatatttgtccctgcattgtgtctatttatcggaaagaatacaaatcagaagacaatttgaccctgagatttgcctgattcatccatttgtctcacatttaccttcaattcttttcctagccctatatctttatattatccttcatatataattgcatcatcattcagggcttttaatgtgataataatgaactatctttggccatgtttaggga

SEQ ID NO: 26120 - DNA, 769 bp, Glycine max
  Intron number 1 from transcript Glyma14g24620.1 (locus Gly ma14g24620) derived from phytozome v7.0 (chr-ID Gm14; pos 29582398 to 29583166 reverse strand)
tcccttctttattccacttctctgcttctctctgggtatgtatgccactctctccaaacaccattaccttgtcaatttcttgtctgcttatgcttatgttgtctcttcttcactttaattttgttgtgagattggtttgtatgagttcttagataatccatgttgtatatctattgctaatactgtttatttattcaattaccttctcgatgatggtttggactatggatggttggttatggagttttggtcattattattggttatttacaactaagttgattgttttctatgtgaatttgagctttggaatcttaatattccaaaatatcttctccctcgatcctcaaaccccatttccgaaaggggcttgtgtgctgattatttgatttgattagtgtttgcattgcaagtactttatcaaatcagtcagaaatcaaattttatggtggtgagtcattaaattttgtccggcctgcctataatctacatctgaattggccctcccctttaccctctatggctatgatgagctcagataatgaaaacttatattaatagtagtaaggacccaatctggttctgttgtattgtgtccaattgagatgtgtggctttaattttctgcactacgcatgaattttcattcattagatgaagctcctatagcatgctagtaataatttgagtgaccaaaggacaacagcgattaatttagtaattacttatgattgttcttaagacaattatggtatgttttgcagccctga

SEQ ID NO: 26121 - DNA, 708 bp, Glycine max
  Intron number 1 from transcript Glyma15g05880.1 (locus Gly ma15g05880) derived from phytozome v7.0 (chr-ID Gm15; pos 4179300 to 4180007)
aggtctctttcctttctctctttgagaatcagtttgtggaagtggccacgccacgttgtttctcagtataggttgaaatttctgatggaaaaaatatttaaatcaatctaaaagtttctctctgcgtgggaccttgtgaattttgattgttaatttagtgttatgacatgctccagaaatggaaaataaggtgaagaaaattaggtatggaatttaacatggttcaacctgaagtctacgttcgcggccaaaacagagtgaaagtctacggtctgtggactgtgaaaattaaaccaatcatctctttgatgctcttaatccaaatcccaatacaaccaaaatcttatgcgcattgcaaccttaatgatgattttacaattcaagctattatataacaattagtgtctaggagatgcttatgtttcttgtcgttcttcttcttcttcttttaaagcaatcactgttgttccttttgctgaatttctggattatatgaattttagtctgtaattcactgatgtattctaattgttcacggttcttgtgcctgcggtccaccccttaaagtgtcttactgctcatcatgagattatatagcttgttagtgtagtggaacatcaacatctatatattaatattatctgcttgttgtcttcattatatttcaccgcaggacatcagtgtgggtaagaaaattgtattggcttt

SEQ ID NO: 26122 - DNA, 812 bp, Glycine max
  Intron number 1 from transcript Glyma13g31510.1 (locus Gly ma13g31510) derived from phytozome v7.0 (chr-ID Gm13; pos 33932300 to 33933111 reverse strand)
tatcagagagaacaaggtataatcagcaaaacttgtaaaagtgaaacccagtattcaactttttaaagaaaaagaagaaaaaagaaactctattccaaaacaagcatattatggactctggacagaatctcggatgatgatgacttattttgaagttgcacttgcacccaagtacttggcaattcggaattttcgtaatatttgtctcaactaattgaatctattgatttaaagtttagaaccccagatgttgtgggaactgtctaattggttgccctgcattaattaatgacttcctttactcagactgaatccgaactgcgttatgaagattggcttttgtttcttgtgaatcttgtaacatatttttgccaaggtttgcttgctatgttgggtagcatgtgatgatagtctaatgtagcatccatattggtccaaattacaacagaatgattaattatcgatagtttcaagggcagtctaaaataaactagaatgatttcaaatttaaaacagaacagcaaatatattgatcgtgtatccctacataacaaatgtgtgctttgcttacataataagagagattaaccatgagagatacttttgatcttttcacaacaaattttagagaaatcctgattttttagtttggcactgtatccatctttaacattttgcaatgcttgctagattaaaaccttttcaaattttgtttcttgtacatggtcgtcaattttccttttttctaatttctcttgcttgagtttaaccacaatttcaattttcaatattggctggtgcagactgctgta

SEQ ID NO: 26123 - DNA, 849 bp, Glycine max
  Intron number 1 from transcript Glyma16g07590.1 (locus Gly ma16g07590) derived from phytozome v7.0 (chr-ID Gm16; pos 6862796 to 6863644)
tgtgctctacttagccttgcctttggaagtgaaaggttagttcatttatctcatatttttttatccgtaagaattgaatacagcactaagagatttacagcactcaaacattctgctcaaccaattaagttagaccttttttattcattgtaccccaatataacatcaaatgtaaagtcctgaacattcatttctcttcacttcagttttgttagattgtttgttcatttggtatagtatgtctatacccaaaaacttgattaagaggagcttagagaatagaagaatttgattatcgaaatttactttttttgaaatagtatatcacccattcaaacattgtttttgagtaagaaaaagtgttaataatataatacacttttttctaatacatctgttcttgtgagttaaaatttattaaaaattataaaatactgattgagattcacgaattaagatgtgagacttaaaaaaatttatttttaataaattttaaccagttaaaaaatatataattaaaagaatgtgttagaaggtatcatgctagtatttctggtattgttattatgaagtttgaacctttttttaagcttcccatgattgtttttctgttaatggaaccaagggatatgtccaatgcttgccatttgttagtagtacattctatcatcatgatactttaccataaagtaatgtacaaaaacacaagggagaatataaatcccttcaacttcacatattcccaaagaaagtttccttcaaaggttgctgaaatctcacacaaaaacttgtccacataatatttcacgtacagaaacaagtcaaggatcatcaagtcaggagcattgc

SEQ ID NO: 26124 - DNA, 699 bp, Glycine max
  Intron number 1 from transcript Glyma13g36330.1 (locus Gly ma13g36330) derived from phytozome v7.0 (chr-ID Gm13; pos 37608229 to 37608927 reverse strand)
ctcaagcctcaagcttaagcgaccctctgattcaggtgcttcacaacccttttctctctctagtgaatggatttataatcggattcattattttttttaagcagatttcttctattttccgcggtaagtgtttgttaaaatttctgtgagaatgcatacttatatgggaagggtattaagtgagacatgagaatttgataggagactgaataacttatgattcaaattaattgttaaaattaaaactgattaagaatatctgtgagaatacgtacattcgtgtgtggttgtatggccaagctttacccctctcgtgctttcactatatatatccattttttctaagataacaaggaaaactgagtaagctaggagtaggtttacggtggtttaactagtaatttttgcttttatttacaattaattagcctttttttttcggggaaggggtggtggtggttggaatggaatgaaatctctcttctgtagtttgccaaaaatagtttcttgggatcacttttttatttttaatttttaattgcattcttggtgaaccgtgaactacagcaccatctcctatgaataaattacctttaatttatgagcttgttttctctttgtctataaaagattaattatatcggattattgttactgaacgcagctggtaagtcagccaagaaacctgattctgaggaa

SEQ ID NO: 26125 - DNA, 991 bp, Glycine max
  Intron number 3 from transcript Glyma15g23640.1 (locus Gly ma15g23640) derived from phytozome v7.0 (chr-ID Gm15; pos 23249623 to 23250613 reverse strand)
ggagaggttagtttctgaccagtttatgttctattccaaatgagcaaatttttgaactagttctattccaaatgttcaaaactgatctgattttaaaaaactagttctgaattgaactagtttttaaccagttttaaactagttttaagaacggaaccagttttgcactagttttcgaactaatttttggactatttttttcaaatgaaaaaaaatatttaaataaaaactagttcggttaaccaaacaagttttgtagaaacaattcggttaaccgaattggttttataaaacagtacactcattttttcttgaactagttcaggaaaaaaccaactttgtttaggttcggttacaatctggctcaatccaaaccattttttttaacacctttagagcccggtagagactctcaatgaaagcatcgatgcaataagactagttcatcaggcaagagagcctcatgcattaagtaccacattaattagttaagtttattccactcaactagggattcctaacattcctaatagtaaccccattatgatgcatttattgggtaacaagtagtgtcggggtaacgtagatcaaacaattaagaggaactactatagggaaaagaggaaggtgtaattcgttgagaaggtcctaactgcaataatgctgttcgctgtaactcaagattgtgctcaagctgaatgtaatgtgatgaataggcactctgacttacgagcattgcctttgttagggtttttggatgtagtttctttgatatctttaccctctttctttaaccttcttttttattagaacttttgctaggttattattattttgggtgactatggcgtataattcatgaagttgcacacacggcttctcttctgtcttgctatgcatagtttttttttttattatattttcatgattaattcaagatttaatttattttgcaggagtcattctctctttgtgatccaaaagtcattga

SEQ ID NO: 26126 - DNA, 879 bp, Glycine max
  Intron number 1 from transcript Glyma16g32310.1 (locus Gly ma16g32310) derived from phytozome v7.0 (chr-ID Gm16; pos 35513851 to 35514729 reverse strand)
ttgaaaatcaattccacttacccgtgataagtgagtatcattcttaattaaacattaaaccatccttccgctttttcttctttttagtacatatacaatctttattttcctttctttcattctaatgttgaccctatataccatatcaatgtaattcaacatatttaatggattaaaaaacagtactttctcatacatacataaataaagaacaaacttacaagtaattcacataagtttagaaaaaaaaggataggtaagaaacaaaagtactgatatactagtttggtctctcatctatgcattcacatgctttttgtttcaaaaaaactcacattcgttcagcagcatctttgcagttggatagataatttggaaatacataactagaataaaaatgggtatatgttaaatgtacacacgtaaacaatattgaaagaaaatgattttaaaaaactaaaatgaaattaaatacacatctataaagatcaaagcattgttgttttactcatagatatacattaatatactgactaattttgtgtatcttacgtttaagctttatgaatattcctgacatagtattggagtctcttttgctgaaatgttcttgagttaattttttcagtcttactcttactactttaattctttgttgtccaatgtattcttgtgccgaattagtctgttatttaagagatttggattacttgcgtctcttttctgtgtctactttcttgtctcttaataaaaaataaaatgaaattaacaccttagcagaacacacactaacaaactgaatagaaaatgttatttttctattggggagactgggaagaggaaacaatttgtgacttatcttttttgtttcatgcagtt

SEQ ID NO: 26127 - DNA, 378 bp, Glycine max
  Intron number 1 from transcript Glyma13g39960.1 (locus Gly ma13g39960) derived from phytozome v7.0 (chr-ID Gm13; pos 40517604 to 40517981)
ttcttttgcctgtggtggggcctgaggaatttgaggtaagtgctatgcagttgttctgccatgttaccatcttttacactttgagttaagccttaacaaacatatcatcaccttgctttcttcaaaacattttaattttaatctttcggttagcatcattcaatcctaatgtcccaaaagtgcaactcagttctccagttcttatttttctatgttgtcatagataatgtcatctacaaactctgataaaacgagagttatttttctcttttgtattctctagctgctcatgactcactagaattatccctttgggtattaatgcttttctgattggagggtgcagttctttgggacaaggccttcttactagcacac

SEQ ID NO: 26128 - DNA, 596 bp, Glycine max
  Intron number 5 from transcript Glyma16g22050.1 (locus Gly ma16g22050) derived from phytozome v7.0 (chr-ID Gm16; pos 25543280 to 25543875)
aaatacaccatacctctctcagcttcctgtgagatatgttaccttgtttctttttatttcacatgttacatgtaatactttaaacctacatttggacctgaaaaaaatagtagacagtgatgactaaatgttatgttgatgcttaatatgatcattgatcagtacttcggtagcaaaagtaaaacatgtcagcatctttggttctgctataaagaagatttcatagttaaggattacttgaggcctataaatctcagcatgatctgtagggaattttaaacaatatcattgactcagttctgtttggcgtgtgaagatccaacaagaggaacgattacaccactaaaaacactaacataaaaaagtttattttttatataggcatgtatttgtaacatatgatggatattttgaatttgtatctcattactcaaaatagaaaccgcacaagaagttcaaattatcatttgtttgtcaagtgcattatatgtatgcaacttatagttatgattgtccttaacccaatttctctcttatacctggttttcaatgtaagttcttaaatcatctttgtttagggaattctgaagtgtctg

SEQ ID NO: 26129 - DNA, 926 bp, Glycine max
  Intron number 1 from transcript Glyma13g07530.1 (locus Gly ma13g07530) derived from phytozome v7.0 (chr-ID Gm13; pos 7715916 to 7716841 reverse strand)
ggaaaacttgtcaccaggtgcttttcttttttgagattttgagaatacccgtttctttttttcttgtgtttttgcgttgtggggtgtgctggtttgtggagagtgctaaatctgaatgtgggtatgtgagggaccgtgggaattatgtgaaaagtgggaactttggttgatgtgtggggttatatagtaatggtttatgaagttgtttcagctgaatgagtagtcttaagtttgaggtttgagtatacgtagtttggttagatttttggaaggagaactttgttactcatagtgaagtaggattgtttttcgtagagggtatatttagttttgtaccaaaagaaaataatgacgatgtttgtgatgttgtagatttgcttttactttgtgttttgtgctgttttgtgttgtggcgtgtggtggtttgaagagagggctcaaagttgtgaaactccattgaatatcagataaaaatagagttgaagagagagaaggaaaaaatcaggggaaaccttgctctattgaagtctatcgaagacgattcattctagaatgaatcattacactatgcgtttggtatttataccaagtctaattggtaactccttagctgaatatcaacgaatttgttgagctggagaactaacttgctgtcatggataactgattctgttgaaccagttgttacacactggatattaagggtggaatctggatgtgggaattgtgtgaaaaagggaaactgtggtggatggggttgtatgatgatgatgttttcaatgttgttttacttttactttttgtgtatcgtttagtttgtttgtttttgttctagattttgaggtttgtttggatgataacatttttgtttgcttggttttcacgttgaagtgtcggcaaaaaaccagggattttgctgtttcttg

SEQ ID NO: 26130 - DNA, 788 bp, Glycine max
  Intron number 1 from transcript Glyma13g09290.1 (locus Gly ma13g09290) derived from phytozome v7.0 (chr-ID Gm13; pos 10420279 to 10421066 reverse strand)
aatcaaacttttctgttctctatagtaacgttctggtaatgaccatttctgtttctctcatatgttgttttctacttttacttttgatcatacacatttcaagccctgctgatatatttaaataaaacaaagagcaaaaaacaaaattttcagttagaatggattgtgggttttctcctttctttttttttttttttgttttcattttgagaagtggggttgttgttttataatgtcttgttttatcagaaaaaagttttagttcttcttctgatcaacttttttttccctggttagtttgctccttattcttatgatttgaactatttgggttcttttttacatgcatgtcaaatttgatcaaaagggttttcccttttttgaaggaggggctgtttgatcctcattctgtgatgattaagtttgatgctttgtttttcgtgtcattgagaaacatgtgatgggtatttctggaaattgcagaattcttcgtccaataagattagacccttgtgttttacttaatatacagtttcatcacaaatatgatcatgattattgttaatcaccatctttctcgggtaataacatgtggcctttaattaattaattaattaattaattaatttatgatttgtggttgttattgtttttgcgacacgttgtatatatgctgaaacaagggcttcaaggtttatctatgttccgtgtgtgacatcacttccactttatttctttgtttgtaattacaagggctaagaatatctggctttggttgaagtagtaat

SEQ ID NO: 26131 - DNA, 585 bp, Glycine max
  Intron number 1 from transcript Glyma13g35000.1 (locus Gly ma13g35000) derived from phytozome v7.0 (chr-ID Gm13; pos 36513058 to 36513642 reverse strand)
tagcaggtgttgcaatttctcctagtgtgaatttgtgttgcctttagcattttgcataatctatatggtagagttgatcatgcttttccatcatgtgtttataattttgaaactcagcacactactacttttgaagtaaaccttcaaaattcaaactatgaacagacttcttataattgatggaatgccttgatcactgcctacagaatttgatgttctgccacttaagaaacaattttccatgcatacatcagaaacacattaagaattgaactccagtgcttagaacttttcactaggtctgtttacttctttttttttttcctgtttttattttctgttttcacttttaatttacaagttgatttcaccgtttcctgtacaaatatttgaaaacaataaacaaattgaaaacaaagtggccggttttgtaaaataagattgaaaacagaaaaaaagaagaaaaaatagaagtaaacgggccttaagtttccatataaaggagcagaagtgtcaactattttcaaaggactgcttccatgcaattgccttattagaaacctgtgatgagtcggtgcaggttcc

SEQ ID NO: 26132 - DNA, 712 bp, Glycine max
  Intron number 2 from transcript Glyma13g37800.1 (locus Gly ma13g37800) derived from phytozome v7.0 (chr-ID Gm13; pos 38755724 to 38756435 reverse strand)
aaaatagacaagtaatgaattttggttctattctttcatcttacaactgagtattattctgtttttctgctacttgaatagtttggttattaatctatagttccatttccttcctactattgaggatattcttcagcctcgcttattattgaatgtaatagatttgtatttgtatgttgcctggttatgattgtgatcctaattgattttttgtgggttaaaggcattgtagttgggatcgctgcaataccagtaaatgtaaaattaattgattattcggatatccaaactgaaagcttatgatctactgtactaatttaatttccattttgaggatatcacttcaatatgagattcttctgtcatgtgtttacatgccttgttaatcttaaactgtcaagctagctgttatttaacattattatttcattcactcttttttgttcattattttgttctcatatggggcatagtagtggtttttctagtttagtattagtccttttttcttcttttgagatttcgttttgtcccttactgactccccatgtccttagtgccctttaattcaaagtaaatatatgtttactgtttaatggatactctttgttcaagatatatattaatttttttattgatttgttctacaaatgttgattgctgatacttggtgtttgttttccactcctgaaccctcagctggcacattctt

SEQ ID NO: 26133 - DNA, 871 bp, Glycine max
  Intron number 3 from transcript Glyma13g29660.2 (locus Gly ma13g29660) derived from phytozome v7.0 (chr-ID Gm13; pos 32533238 to 32534108)
gttggctctctggtgttgacatcaatacacagcaggttcagcttcatttctttctttcttgtttgttgattcttgtgtttctgcacattgtttccgtatctacctctcaattaaaaggatttgtatggtgggtgatgataatgatttttctagtttttgatattgtggattagagttggatgctttactttcgttgtcaggtttatgtgaatcttgtagtgtgaatagatttcacactgtttctgttctctctagtttcctatctttttttaacactccttggaatttataatgatggcatgcaaagtattctccctgctatcttagcagaaagaataatattaaatgagtttgaataatttgaggactaaatcatacacccaaattaaatcaggggtcaaaattaccagctagatatgttaatattgccatgctgctcttttatttttaaaaagagatctgagattcatttaatgaaaaaatcttagatttgtttctgatgttcctagaatgtcaatatttgttagtatggaagcttgctttgattctctcagtagtgaatggggagctgttccttttgataaaaggtttctttaagatatcagtggaaccaaacctttttcttgcttattgaaaacagtgtcatgatatccgctttcaagtgccaactgttgtctatttcttaaaatttgaattgtaggtaattgaaatttccatccaggcttaggcattataattaaatccattattagtattaactattactttggttcatattagtatgttgctgctgattagtatgagtaacttgctcttctatgttacatcatgcagagttttgaggctttgaatcagcgtgcagtggctgtgg

SEQ ID NO: 26134 - DNA, 939 bp, Glycine max
  Intron number 1 from transcript Glyma14g16070.1 (locus Gly ma14g16070) derived from phytozome v7.0 (chr-ID Gm14; pos 17377545 to 17378483)
ccacctacgtacgtctcataccacatgctttcaatcaaccacaaccactaacatcttttgcaccacattctcaactatgtactagtttttttttcttatttatttaatatttattatagatgccaagaagtattttttttattaaaaatatgaaagttatttaacgtttatattttttaagtaattgaaaacagagtaaataatttatgcgccgataatgtaaaaaaaaaatattattattcaatcataaattattatgtataataaatttatttaatttataatagttacatcaaaagttatatttataataatttataactagttatagtataaaaataattacactcaaaatacataaaaattaaactctttaaagcatattgaatgttttaatatgcattcttaaaaggtttaagctttttcaatttccaacaagcatatagattaatgggttaattggtgtcagattaaatttaatgaagtttttcgtgttgttttctaattcgtatttgaatcctatgtaccatttaagttttgtcttccttaaaattctaatgaatcagatcttttactctgtttttattaagtttaaaatgtgtctctatttttttaaaacaaatgaagtaaattttatataaatttcagttttgacttttgattgttattatagatcatgttttctaaatagagtaactttagtcaacccattataatataattgagtattaaaattacattttaaaaaaagactaaattattaatttggttcctctgtttatttaattagtttaaaatagtccctttattattaaaaactccaactttgtatgaattaaaatcaaattttgatatagttacaaggatacgtacatgtttaaatcatatttatgtagtagttggaactaattttaactgcttcaagaacaggggaagctg

SEQ ID NO: 26135 - DNA, 781 bp, Glycine max
  Intron number 2 from transcript Glyma13g03650.1 (locus Gly ma13g03650) derived from phytozome v7.0 (chr-ID Gm13; pos 3664510 to 3665290)
gagagacttttcagtacaggtttacagttgacagggtaattacatttctctcctctcattttgttttttaaattttaatccttgttaagaagacacaataggcttcaagtcatgtaagattggttgagtcaaagaaaaaaaatcaaattacaaattttataatctccttttcacttgaatcaaggcatttgtcatttctattttcagttatatagaaaaaacagtgctgattgatttcccgtgtcctatcctttgatatttgagtccagagttttgtttgtttcaaagaaatgaaaataagaagggagaaaagattttaaaatttgaattgaacaaaaaataagaagaaaagaatatttctaaaaatttacttttgttgtttttttatatatttttatcaaatagaaatatatatctattgggatctaaaattttctgcaacttatcacatttgaaatattgtctgctttagttttctgtgagtctttgcatatttgttcttaaaaggtgtctgttggttaatcgagaagaatattataaactgttttttactttgatttttaagtaatgtgaaattctttaattggtgtacatgaaaacattatccctgctatttcttattattttcttttctctcgtctaaatagagaccacaagaggcatgtccggcaatgatttctcttttggtggtttctgtgtgtgttttatgcatttgttgttctctcgtgtaatgatgtattcatgggtttttctatggtgcagcctggtacatatttctatc

SEQ ID NO: 26136 - DNA, 757 bp, Glycine max
  Intron number 1 from transcript Glyma14g05110.2 (locus Gly ma14g05110) derived from phytozome v7.0 (chr-ID Gm14; pos 3543951 to 3544707)
aacttcatcttcaaccctgcgcttcttttgaactggtaaaaacttcgatcattttttgctctttagtcggtgttcatttcaactcagaagtcagaacatcggagctcatcaagtatgttaatcacttaccacgcattcacgaattgggtcttgaccaaaccctaattagaaaactagtgtttttacatttgtaattgatttgtgtgctttggaatctgaagattttattatgtgtatttagtgtatgatatctacttctctgagtgaatgacaattaggacttaaaacagccggaagtgaacattgatgattttatgaacttcaattgttattcatttttctggtccatttccattccgttgttgtgggttttaaagtgtgtaggtactaggtaaggtaagcctcacccttcaaattttcaagaaaaaaaaagttggaaacttgtttctttttctagccatatatgatggaaacagacacagcacaacacacaagtaaaacaaacaaacccacatagggaagcataactacacgtgctactatagaatcaacggaaggttatgttatagtgtcagtttttccccctttgcagttaaaaattaactgagattactcatggtaatttaagagggaaatgtgttggttggttcctgttggaacttttattcaatgtgcatcattaaaattggaagtctttgaatttcttaaaacctttcttgcagatttgtgctagtttgcaagggaagttgattgattg

SEQ ID NO: 26137 - DNA, 955 bp, Glycine max
  Intron number 2 from transcript Glyma14g25920.1 (locus Gly ma14g25920) derived from phytozome v7.0 (chr-ID Gm14; pos 31610791 to 31611745 reverse strand)
accgtgtttattggtactacatcatgaacccttatggttgaaaggcaaattccctttattctgaattttatttctgatgtgtataatctaaagactaggaaatgtgtgtttgcttttgtattaacaagtaaaatttgaacctatcttggccacctcccacaaagtaaattgtttattctgtttcttagcttgggacttggatgacaagttgaattcagcacaccaggtgttcaaatggagattttgtttccagaatcttttatctgtgtgactgttctctgtcttcaggacatatgcttttgaagttcttctgatgcttggatgtgcattgatgttgtagccctttttattccttttccttttctgtttgtacactgtttgctaaagcttattggagtatagttttagtcctatgtatctcttattttctcaatttctgtacaacagtagttcagttaggtgttctattctggttttgtatcttagcagttagctgtcatctctaactcactcaatggtagttagagctgagctgctctgtttcattgtccataaataccctatgtaaaaactacttgtataggttgaattcattttctcaataatacaatttctctcttcgaattctctctcaactatattaaagctaattttcattttcataatgagtaagataattatgaagtagcagtgcttaccatattctttatttgggcattggcgtctgaaatttgacttatattactatggataggttcacttcttaattagttttggctttaactccagttacatctatctcactttacaagttgttgggacaagttgtttgcaaaatttgactgatcttgtttattttccataatctaggatatctaatcatttactttgacaaattcattgacttgcttatttcacagtgacaactgcaatacatcaattgtcaatttccaca

SEQ ID NO: 26138 - DNA, 700 bp, Glycine max
  Intron number 1 from transcript Glyma13g35080.1 (locus Gly ma13g35080) derived from phytozome v7.0 (chr-ID Gm13; pos 36565925 to 36566624)
actcttggttttctgtcactggtttggctgtcgtaaattatattcagaatttctttaggaatgtagtgaaatgaattatcatgtatgataagcaatattgttgagttttataataagattggtgctagctactttaacaatgaaaagcaggagtttagatggcacagtaacacacttcacacctctattagatgtatctcatcataaagaaaacacaagacagtaccgatggtggaacagcaaaatcctggatttggaggaggccaaacatcaattacttttttcactacctatgttccttacaaacttgttctattacttaatcgtgttggtttctgtaattttcgctggccaccttggtgatcttcagcttgctggtgctactcttgcaaactcttggttttctgtcactggtttggctgtcatggtaaattatattcagaatttctttaggaatgtagtgaaatgaattatcatgtatgataagcaatattgttgagttttataataagattggtgctagctactttaacaatgatgcaatatgctaggaaaatttaacaccataacatttcctcaaaactagttgacttgaataaatgcaattaacaagattgagtattcttacaagatcaaacacgatcatcttctttcccttgtaataggttggtttgagtggggcattggaaacactctgtgg

SEQ ID NO: 26139 - DNA, 957 bp, Glycine max
  Intron number 3 from transcript Glyma15g15800.1 (locus Gly ma15g15800) derived from phytozome v7.0 (chr-ID Gm15; pos 12145686 to 12146642 reverse strand)
ccacttttgccctctgcggattcatccgtgctcaggtatctattttttttcactttttttatattcggttctggaatttctgccttgtttatttttattattgttttattttagcctctatgcaagtaacccttttatgtgtttgttgatttatgccagttattaattgtgctttttcattgtatctccaatgttgtttgatggtgtcgatttggttgatactgaactgtattttaagtgttttgttaatgtcgaccctttatttagcaaaaaatggaaaaattctatttggaaagaaatatttgttacattagaaatataaagtgtaacaagtgattttgtttttgttgcttaaaatcagcaagaacccttttatcaattaaactgcataaattaaactgcgtgtttgtttgtgtttactaattgattggattggtattgagtagctgttggaccggctatacgtatgacgtattaaattagaaccaaactgaactggttgattatgtgcctcacttctatttacttggtctttctctatttaaggagttggggtcggatgggaattgtggattttttggagtgccctgttttgttctttggttgtgtttcttgtcatcaatctaaattgaaaatcacaagaatttaatttaattcctacacaaatccttgaaaagaagaaacaaattgaaaacaaggcatgctttttggtgattatctgtggaaaatggtcatgaagaaaacaaaactaatacagtctaatatgattctaagaaatagattgcactgttttggtggtttgcttttcatttatattatgttggaaattgtgtttgctattgtattcaggtccctgtctctgcctggaaactcctacttgttcctttgatgtaccttgataatttacctttaagaattgcatttcttggctcatctttgtttttaatttccagggtg

SEQ ID NO: 26140 - DNA, 760 bp, Glycine max
  Intron number 4 from transcript Glyma14g17370.1 (locus Gly ma14g17370) derived from phytozome v7.0 (chr-ID Gm14; pos 19207855 to 19208614 reverse strand)
gcaactagagacgtcatagcattggtaaataagcaacaatagccttggcaaaatagagagcttccaattaatattcataaattggattctttataaactaagttcatcaatcatagtatactagttgtctctataataagtaacagtggggtagaattagagaacgcaaaatgaattagaattggcaatggcaactagggatgctatagaattggtaaataaggaatgtcctttgcaataaagcaaagcttacatgcatttcattaagtactttttttttaggaagattccttcagtacttttggtactgttttcaaatcaaaattagagtttcattgcattaaaagtcaacataaattactgaggtaaaactctaaatatgatttgaaaactgtaacatcccaatttttgtaatctagattaaaaaggattgtattttttttaaataaataaagttttagaaaaatgatgagattttataaataaataaataaggagatataattatcaattaaaataataatttgagagaaaataaaaatgatattttatttatttgtttgatagagaataaaatagagtttatttttataaaataataaataaatagagtaaacctagctataaatagtgttaggtcagttttcacactgacgctgtctctcctttccctcattttcgttttttcccttctcctctcaaaacccttactttttttcccacagcccaccaaacctgtctcagaaaaacgacgatcttg

SEQ ID NO: 26141 - DNA, 724 bp, Glycine max
  Intron number 1 from transcript Glyma14g01540.1 (locus Gly ma14g01540) derived from phytozome v7.0 (chr-ID Gm14; pos 890194 to 890917 reverse strand)
catcatattttgtacacgccttctcaactatctaggtataaattaatcacttatatatggcttcaccctaaaatcaacatttacgaagtatacatacattattcctagagggaaaccaatcaagcttcttgtcatgaaacatgatttaatgttattatctcattagcatttatgcatgtaccatgtctttaattcgtgatatcttgcttcataagcaaatcatatagtggtgttatatagcacacatccaaacaaaatcataacacaaggaaattaagataagcgcatcacaaggtaactaactctcttctttgatctccatcatatgcatatatgtccttagacacaaggcataggatatattattagcaattaacaccttttttaagaatctaacaagtgcagctgttatgtaaagtccaaccgtgcaattatctgttttacctgctgttatggaaaatcatgcaatgtctttagatgatgattggcatgtttatgattctgtttcacctgccgttatggcagacgtaagctcgactgtgttcccttgtggtttttaatctagtttcttggggctgattgccccagtcattcatcaaaaaaaaaaaaagtgtaaagtccaaccatgcaattatcttgttaaattgtttagtagttgatttgctcaaatgttagagcattttgatggttaattcttaattgaatatgcatggtcaggaaaggg

SEQ ID NO: 26142 - DNA, 550 bp, Glycine max
  Intron number 1 from transcript Glyma16g23730.1 (locus Gly ma16g23730) derived from phytozome v7.0 (chr-ID Gm16; pos 27597010 to 27597559 reverse strand)
agcggaagctctagcttgggtagcgaatcacagtgagtgttgttgcctaatctcctcttcacaatggtttcgatcctttttctttcgacattttacttgaattaactctccaatctgtatgaaatgacctggtttagtccaatttctgttatatttgaacaaatagtttagttttttgtaatcatagagtgttgcaatctgtttagaatttagattcagatccgtgtttcaaatcacggcgtcgctgttcgtttattaacagattcatgccatataaagggttgaatggggtttctttagatttcgttttgcacatgaaactgaaagaagattggattttgaatattatctgttttctgtgtatgctacaaaaataaaaattatgttggcagcgtaggaattcgtatgttgtagccccgagttttatttgtttagtgttagatttgatattcaagattttttatttttaattaatttttgtttgagctttgaacttcaatttatgattgtaacaggcgagaggattaaagaagcatctgaagaggcttaa

SEQ ID NO: 26143 - DNA, 630 bp, Glycine max
  Intron number 1 from transcript Glyma17g02050.1 (locus Gly ma17g02050) derived from phytozome v7.0 (chr-ID Gm17; pos 1279548 to 1280177 reverse strand)
ctgttgttgcttgtttaactctcccagttgacaaggttcctgctttattcaatttcacttctgggttcatctactcctttatattcatttttttttttgtttatataagaaaaaatatttagctcttttagttcattttgttgaaacttgaaatggggtgggagcatttttgttcaattgattaatatactagacacgccgcttttgattacttttttatctgcggcttctttcatgaaatggggtttgaagtttgatgttaattgattgtctcattacccacatgaggtaggaaaattttcaaagttgttttttgaatacgggaatttcaactaacggatagtataagtagcaccttggaaaatggaaattttgttttttggattcaaattgtgaattaccggaaaagaatagaagatagcatcttacgtggcattgcgagcttgttttaaatataatgggaatcccctctcccttgtttatgcatctaagtcacaatgccacttcaatagtattcttcattacaagcaccacttttgaatttccattcgcaaccattctggttgcgtggagattttgaatcttttacccctttttttttgctctatagattctgaaggacttgttgga

SEQ ID NO: 26144 - DNA, 970 bp, Glycine max
  Intron number 1 from transcript Glyma13g16760.1 (locus Gly ma13g16760) derived from phytozome v7.0 (chr-ID Gm13; pos 20668367 to 20669336 reverse strand)
cgcttggttcatcaagctcttccctaattgccgaggttcgatttccttctctcgatcttgtaccatgaactttgctgttactgttacttgaggttttgtttcaagttgaactcgttataaactatgtggcatcgcatgggagaagtgcagatcgtaaagaaaattagggtattatttgctatggactgagtgagactcgatgctttatgcttgttgtgaattgaattaaatcgtttttagtacgatgctgatccaattgttgtcttgactgtgctttttgaagttattgtcttgatacctaccagcattgttttactgatagggaggacaaattatgagaatgataagcggatttaaacactaggatttggctcttctaaggtgaatgagtgcactttagaggattcagtatggatacaactattgattaaaaaaaacaaaggatgatattttaataaaaggacaaaacttagatacagttctatagatgcttatggtgttgttgtctaatcaaaattagtgttttatctctataatctatgttgacctttgacgtgaacctttattgtgtgggttaccgaggtaaaactccaattctgattagagaacaataccaaaagcacctaaagaactacatctaatttatgttcctaataaaattcaagtacatgcatagcaactctgaagtaaagttgttacaaattttcaatctctactgctgattttctaatcagtgtgtgtacgtgcactttatttttaaaatgcaacccttgctttagaggagccaaatcatgacgggttattatttgagaattgagagtacaatatcttcattaaggttgctatgaatgaacttgctctttgacatatgctctttgtattcagtgattttttgtactttggtgtcgtactaatgtagttctttcttatgttccattgccaggtccgaccattttgttttttcaagaaa

SEQ ID NO: 26145 - DNA, 760 bp, Glycine max
  Intron number 1 from transcript Glyma13g25590.3 (locus Gly ma13g25590) derived from phytozome v7.0 (chr-ID Gm13; pos 28802312 to 28803071)
gtggtgttgtgtgctggtaatcattaattttattttattttgtgtacttttcacttcaggaaaattgtttttttcttcttctttcagttctgccattttaggacttttggggtatttgtgactgccatgtttgctaattatactgttctaactgctaaccaaatgtttagtttaaattatgttatcaattgccttttttgacaagagtcatctaaattttttgttttctcttatgtgcttttgcatcagacaaacacagttgctacaaggttgctaaactaggtaaaagttcagtcaggttggctataaaatttggtgcctaacttcagaactgaaactgaatataatgtttacattgataccttaactgttaatttattcagctaaaactgcaaaactagtcttttttcaagttgcacactttctaactttggttcatcctttttcttggagaaaatcaggaaaaagcttaccccttagtggtgactgatatgattatttcatttttctcttgagtgtctgaaattgagtaccttaggtaaaaaaaacagtgctttttaataatcccattagagtagtgtgggaggatcaaagttaaatgctaaatattttcaaatgaaaatcagtgtttgattctcttttttttaccagtagtcatcttttctttgtcaatcagttgaaactattttcccctttctgatgtcactttattttgtcttgtacagcgttgcccatatcgtctctcttccccttcctttat

SEQ ID NO: 26146 - DNA, 1032 bp, Glycine max
  Intron number 2 from transcript Glyma16g01040.1 (locus Gly ma16g01040) derived from phytozome v7.0 (chr-ID Gm16; pos 688517 to 689548 reverse strand)
tgtttggcgctggtgttgctgatttggttgaaggggtgaggaactttttctgttgttggttgatgaatgtgtgtggttaaagatattggaaattgatgcttgcgattttcactttaatgattaacgtttgaatgagtcttcaaatattgaagttattaactgaaatttacacttcagatctagtgttagatgctatggccaagtgtaatttggctgctggaactttttcaaaatttaatgagcattgaccttggagaaaatatagttgtgtgtgtgtgtgtgcgcgctcatgtgtgcgttgttgaatgttttggatgggtttagatgtacaaagtagttttggttgacttgcttgggttcaactcaccataatggtctcaggtcataatgtacaaagcagttttgttgatgtagttaggatgttgtcttataagtgacagcataataataacttaataagtaataacgctcatcctttgcatagatataatttggagggagagttcttttcttttcttgctaaagcataaccacagtagcctgtggttgctaagttaaagtgtaagatgcaagaaaaggatcttgtaaaaatctgctttttggagctgtaggctattcatcttatgtttgctctttcttcatcttcctttccctcattaagtggtttttggaagttgttgtcttgtctctaaattgagaacagtttttctgtattgaggttctacaaacttgatgtttattgttattaacatatggaagcaatgacaatactaattcaatagatttgtgctgtaatttatatttacttagctttctataacagctttaatgctttattatctcttgtgctttggttgctgaaatttgatttgcatttttataggaatccttaactataataaccattgatgtcttcacgtatgcatttctgattttttgaatagtttttccctttggtccttccaatattctaactaattgttatatggcattttaggtttctaaattgagtcacttaagcaagctggctcg

SEQ ID NO: 26147 - DNA, 731 bp, Glycine max
  Intron number 2 from transcript Glyma13g42970.1 (locus Gly ma13g42970) derived from phytozome v7.0 (chr-ID Gm13; pos 42773201 to 42773931 reverse strand)
ttcttcttttgtggcacaagtatgtactccgttactggagcaaatagtatttttctgatttctttaaagctgtcattttaattagtatttaatgttgattcattattatcaacgtaaaacttaactatctaggaagtgtaattattttagtaatggaaaaaaataggtgctaagagagccttatccctctcaaatgggtccaccaagattgaatctataagttggaatttatgtaacttgtaatatcaagggtttcggacaaaaagaaaagcaaatatccaggaaatgtaattcttttagtgaatttgtagtgtgttagatagtaggtatccatagccattagttagttaggttaatggactgaaatagtttgaataaggcatgttgtctataaataagagggagaacctgagagagagatctcagtcaatttgagaaaggattctacaaaagagaaataagaaaaataaactaaagtaagttcagagaatatttggtcggccaattgagttcaaaaatttaaaccttctctgttatagatactttgagtaaacagataatgtgtagcttttctcttcgtgttgttcttttgctactggctattagaaaaattaattatacacattacataaatttggcaaaaacttttacagtgtttttttttttttaagaaaaataaaaactaagaataagatagggttattaaatttccttttattgcaggaagaagc

SEQ ID NO: 26148 - DNA, 1029 bp, Glycine max
  Intron number 1 from transcript Glyma13g22620.1 (locus Gly ma13g22620) derived from phytozome v7.0 (chr-ID Gm13; pos 26104409 to 26105437 reverse strand)
acatcccctgcaacttctgcaatattgttcttgcggtatctttgatttcaaagctcttttacaatttagtgggagatctgcttttcaactcttgcgcgcatgctacctaattgatatgatatatatcttgtttttaaatatcaaactaatgtacagcacatacacacttggttgttttcttcttttgcctctttgttttctttcacctgtttacatccaaggataaaagaactcaatcagatcctgaaaaggaagctacacttggggtgtgtgtgtttgcgcttttgtgaaccagtgggtgtgttattttaattccctctttctgggttcctagtttttgttacagtcatgtctccatctctggacttttcttttttccttttttctccttcttttgcagtcaaagaaaagtcataccctggaggacctcaagatggtcacacacacaaacacaaaaacacatgtacacatacggtgttttccctttctcgttctgagtaagtgcgggtgaggctaattgtgccaactgtgctagcaagctgttttgagaaatatggtggtttcctcttgaaaacgccaaaataggcactatatgttgaaactgttgataggacaagtcctctccaccctttgattttctatctctaagctgtaacctaatttaactccagcttctgcactacacatccaggtcctttctcaagtttgttaataggaaaacaaaaaatgtaaatctactgaggattcccagttctaacacataaggaacaaaccctggatcatagcaccttccaagttaacaagttttctttcttttttttcaagtaaacccaagctgcaccctttttctcaaattattaccatcccccttttttcttttccaagatcttatcatcccaagtgtgaaattattatatgatctagttttatttaactttattttcattttctgggtttctgatgagttttcttcttgtataatgaaataagcgattgaataatagtgttatgggcgcaggtgagtgttcc

SEQ ID NO: 26149 - DNA, 972 bp, Glycine max
  Intron number 2 from transcript Glyma14g09870.1 (locus Gly ma14g09870) derived from phytozome v7.0 (chr-ID Gm14; pos 7933299 to 7934270 reverse strand)
ttagagggttgagtgaaaagaagattgtgatcaatgaagggacaaggaaaaaaaatatgttagagggtggagtgaaaaaatggtggtgagtgaagggagcaagaagaaagattatgttagaggatggagtgaaaagaagatggcaagtactgatgggttactttctcccagaagtggtgattgaggctttccaaggacaaggttcatgcatgcacagaattcccataagaaaagctggtgtgaagaatgaagaatatctgttagtaattcttttttcttctttctttgtttcttcttagtatttttccatttctgaactgggaatagagtttttttttcttctttttttgtgttggtgtcaatacatgtaggttttctttttgacgtgcttgagacgggtttcatttcttctcttctcgttacatgttctgagtgtaaattacggtagaaattgtgaattaggcttaatgacaatccatatatgccatctttgtttgcttcacattgggtggtgaaatgttcgtaaatttcttattgattgaaaacaagtggtgacaattggtcaaaagttaaacaactaaaactacagaagatcaaagttgttatatacttgttggatcggcattaactgaccttaaaaaagaaattaatatacaacactaaataatattcttttctcattaggtaaatttgaccatgtgaattacatattgacttggtgttaaaaacctctactttagatatacttctgtattaattttcttatcattttgtgatatacttagaaacttgtaatgtggcatctccaatctttacctcagtgatttttctggtatttcttcctaaaattacaatgatatgcttagggatcttattttcaagagctatatttcagtgaaatttcatccaacgaataattagttcctataccacataggttttagaaccattccattcgaagatcccgagtaa

SEQ ID NO: 26150 - DNA, 1023 bp, Glycine max
  Intron number 2 from transcript Glyma13g27880.1 (locus Gly ma13g27880) derived from phytozome v7.0 (chr-ID Gm13; pos 30992615 to 30993637)
tggaggagactgtcctgtaccaatttgtggtcaaggtgaaacaacgtttaactattaattcctgtgataattgttttataaattcatcatatttaacattaatatagtaacgacatatttatacgaatacacacacaagaacaatcaaggaaaataacagtgagatttccaagtcttgagtttttatcaatgattataacaattggaattaatagcctagatcaattagggtttcaagtcatgtagatgaatcatacacataaacacagttttctgagaaattggtagatcttacaactgtccatatccaaaaacctcaatacacacagtacaaagtcaaaggatatgaaagatcatgttacctagattgaattgtaacttgcatttcttgattttgataaactatccatgggattttacacccactctactaaatacgatccaacttctaaaacttatcaaaggacctgtatcctgacaaagaaatcaatataatactttttcttgcagagaaatttagttatcattatttttttcactttttatttatcacctgcttgatgtgttttcctccaattagcacaatttcgtgcaattaccttaagtagattcctctattgaaaatttaatatagtgctttgtccaacagtagtttacgctcatttttaacctgaaatccaatgtaaaccttcaacgtgtattcttctgggattatgtgtggtcattgagataaaaacgaacaagtaaatataataataccactatccgtgttacaacagtatctgtaaatttggatgagggtgatcataccttttcagaaaagaaacatcaaaaccaagtgaaatcatgtaagaaaaaggaacttctaagttctaagcacataaatattgctagttaagaaaatatataatttaaagtatttttctttaggttctcattatattcttcgtcacatcattttatttgtatattctttttaatacaacagattgagctgggttgtcaactaagcctggaggaact

SEQ ID NO: 26151 - DNA, 825 bp, Glycine max
  Intron number 1 from transcript Glyma13g18000.1 (locus Gly ma13g18000) derived from phytozome v7.0 (chr-ID Gm13; pos 21667568 to 21668392 reverse strand)
ccttatccgtcgccttgctcctcgctgatctccaagttagttcatactactacttttgaaattctttctatcttcattctaaatattattactactttagcttataggatagatcatagatgtttaatttttatattattaaaattcttaattgttgacactttcttttaaaaaagaacaaactgaaattcaattcagatacagtgataaaagaaggtgtaaagattaaaaaaaaaagtttgaacttttttggctagttatggtgttgtgtgtaaaatgcatttctaaataaaggaaaagaaagaatattgaaaattgagagtaggagtggaaacccattttcaaatcatgtattctaatttataacatgattatatttaatttaagtatttccctaattttgagcatctctgatacaaaaactcaacttgcattcttaactctcttttagtatgtcccttgttgtcgagcatagaatttaagaatactcattaatttttactttaatggtagaattcaactttagtttttattttatctctccacttacacaagaattctcatttttactttaaaaattgtttttaatggttaagcaaccttgcttgtaattgattatataaacaacttctttaagaactctaaaggaatttatttgctccaatgatattctcaaattgtttaattttaagaaccaacataagcaattattaaatccgagttgctcttataattctgtccttccttttttgttgtcttgtatgggacatattattgttattttcgttgctgtttattgtttgtttatagtaaatgtgaatgcag

SEQ ID NO: 26152 - DNA, 961 bp, Glycine max
  Intron number 1 from transcript Glyma13g18620.1 (locus Gly ma13g18620) derived from phytozome v7.0 (chr-ID Gm13; pos 22263993 to 22264953)
agtttcgcttggagacgccacatacgccccctaaggttgattttcacctctcctatattatatgcctctattttcaaacgtgcaatgaatgttaattaatattatctttcaatttacacgcatttacaatagtaaatgatcacttaattaattaaaaataacagtctttgattaaaacgagtgaatgagattagggcatagtggggcaggtgcaagtttcccacgtaagaaatacaaagcttatgattgtagtttcatttatcagctgaaacacttagatattttgagtgaatggatatctccacctaaagtaaagaactaatttttctcaaaatttaatatagtatcttttatggattttgactattcactattgataatatacacagactaatatagacataaaacctctagtaacatacttaagaggacatgattatatgtaaattataccacaaaatattgaaatacttagatgaattaactaatattctttgataattatttttttaaaaagaccaatcttagaaatttaatttatttgtttatatttgtctgtttttatctttaacaagctgtaggtaattaaattaacaaatttcaagacttattaaaatatattgtactaattaatgaggtgtgaaagttggagctagctggggtgtgattggctcagcatctttatatatatatatatatatatatatatatatatatatatatatatatatatatatatatatatatatatgaaagagggaaagagtgtgtgtatgtgaggatagaattggatagagaagaatatattcgttgtctttgccgcgtaattttggtgtgaggataaagcttctttaggcgtgtgttttaggttcacattattttcggtaataattaggtctaattctttaatttgttgttgattgcaggaggactgggttttgtgtagagtgtttcacaaagg

SEQ ID NO: 26153 - DNA, 788 bp, Glycine max
  Intron number 1 from transcript Glyma14g33170.1 (locus Gly ma14g33170) derived from phytozome v7.0 (chr-ID Gm14; pos 40632057 to 40632844 reverse strand)
tcgtcgatccaagcaaaatcctccatcatcttcaggtgttctaatttcatcctttttttcttcttcaaattattaattctcggaagacataattcaattgttttattaggttaacttgtggattatgagaacatggctttgtgggtgttgaagttgatgttgtgtgtttttcctatttatggaaagtcaaatcgaaagcgagttctctttttttgaggagaaagggtgtaactatttgtgttcgtgatgtgaacacatgtcactgttctttaccaatggttccgaggttttattgcgggtcttgtgtttgttgctgttactgtttgcttttgttgtatatgggtcttgaatagttcagtcaatgcaaaatgtgccatggtgatttgtttgtttgatttttttggggaggttgaaaagtttaagtgtgttggatatccggtctttgccggggcagggtaggcctctaggcttgctcgcatacagtacttacatattacccacactaacaaggtcttcacatcatcaatagtaggattcaaactcacaaccttgtgagatattattctgatccttatgaactggactcgttgcttgtggttgtttgttttacctgccactctgatcaactctcctttttttggtaaatttgcaatttagattaagaatttaggtgaaatggtttgaaagtttaattctctcttttttttgtgtgtttgtggtaaatgtgaaaaaaatggattctcgtgtgattcttggtgttttttttgttatgatagcgtctgaagtta

SEQ ID NO: 26154 - DNA, 397 bp, Glycine max
  Intron number 1 from transcript Glyma14g02180.1 (locus Gly ma14g02180) derived from phytozome v7.0 (chr-ID Gm14; pos 1314450 to 1314846 reverse strand)
tcatatgtaatcaacaaaattcgacttctctacagatgcaattaaaaaactttttactttttaacaataattaattaattattattgttattaatattaagattttttttttttggcttatctattcaaagatccttatttgaattcgttatgttagtttagctgttgggatgggtaattttgggttaccggaattcaacatttacccacgatggataacggctttgcatttaattatgctttaattgcatttgcattgtcttatagcagatgtcttctactttcttgatcttcgtagaagagaagaaatgtttctctgtgcgtttggtggaagcagaaagaattttcaagtcatttttatattttgaggtgcaggctaggtgtcgctgggacttca

SEQ ID NO: 26155 - DNA, 797 bp, Glycine max
  Intron number 2 from transcript Glyma15g14870.1 (locus Gly ma15g14870) derived from phytozome v7.0 (chr-ID Gm15; pos 11315640 to 11316436 reverse strand)
aagcttcttgctcagcaaagagatcttcaggtttcatttccttatatatcttaatagattacactttacaatctatcctagataagaagctgcaatgaggaatgcatttacttttatgttattattgttttgttggtattttgattgtgggctgaaaagatgagatgcaaaaaacagtcttattatatttcaatttagaatcaattgcagagtaaaatttaacttgtgaaagagcaagttaaatttgatatttttatgcctgttgaggtgcctgctcgacaggatcaagcaaactattttctctgtaacttgtgaatattatctatcttgggacttgtgtcatgaggtttcacattatagttttcaaaagcatatatgggctgcaaccagaacaaacagttgggttctcggctgatttgagttgcattgatgttatataggctaatagatttagactccaatccaaagttgtcttgtcatatattttgaactctggctgttcctaactgtctaggcttcatactttgaagcagaatgctggtttagaatgtaaaatcagcattcttattgattcattaccaattgctaattttaaaataagtaaaacaagaaaaatgaattgtattttattctatttttgtcaaaaatgttgaacataaaattattcatctaaagttactctctgtctttgaggttcttataccttttactttacatatctaatcaacctattggagtgacactttctgtttgtggtgtttgtcaggcaaagataccagatattgaaaagtgcctag

SEQ ID NO: 26156 - DNA, 806 bp, Glycine max
  Intron number 1 from transcript Glyma15g14870.1 (locus Gly ma15g14870) derived from phytozome v7.0 (chr-ID Gm15; pos 11316440 to 11317245 reverse strand)
ttggttcagccctcgcttttctccaagaaaggttttcatcttcactttctctgtcactttctgattttccacattctcgaaacctgaaattttaaggatctgttttctattttcctctggctgtgttaatagtagaaatcagcttcttttgtttgttcatagagttttcggattgcatcagtgtggtaattatcttcgaattgtggtttgagttagtagttcttagctagttttttagtctgcatttagttgtggtgccttgtagagttgccttcgtgaatgagtatgggagtcgagagaatatgctgagatttaagtagggtagtatatggtgtgatgttgtaagattttctctaaagaccgtatagagttccagaaattaatgtgaatttataagtggtggcagtcggtattattagaagtgatggaatgagaaatgaaggtttttttattcagaggtagggactaggtatggataatagtttcagctgaatgttagctgtagaagatcaatatggatggcttttagattttacagcacgggactgtgaatcttttggattggattttgactccaaactactcatttgagttttgtttctgtaatatgtatagtggaattgatgaatgaggcagccagcttttagtgtgaattttgggttgcaatgatctgattcctttttaaaactttggaacacatcaatacatgatgcttacattgccatttattagattcacttactgtttgtatgacttatgacccatcgtatttttggtgcagacttcagcaatacaaggtagtagaa

SEQ ID NO: 26157 - DNA, 393 bp, Glycine max
  Intron number 1 from transcript Glyma13g24210.1 (locus Gly ma13g24210) derived from phytozome v7.0 (chr-ID Gm13; pos 27577031 to 27577423)
cagttttactcaaggtataatttgatttaattaatttttccattttttctagtctaggaattaggatataaacatggttttaaaaaaagtttgttgtcaacaatgtgtgtagttacactctaagtttgtaaggagaggatctatatttgatttttaaagaatatattcttgtgaagataattggaaatccgactgaagaaccaaaaaaactttaattacggtgttaaggatggtgcaaaacctatactgtgattacaattcatacccatttgaacgaaaagaaaattagccttgtataaaagttaaaataaattaagatggatattaatttaatttttgtgtgaatatattacttagagttggaattctcaattgtgttgcagtgggttctgc

SEQ ID NO: 26158 - DNA, 654 bp, Glycine max; identical to SEQ ID NO: 19727
  Intron number 1 from transcript Glyma15g20120.1 (locus Gly ma15g20120) derived from phytozome v7.0 (chr-ID Gm15; pos 17819106 to 17819759 reverse strand)

SEQ ID NO: 26159 - DNA, 356 bp, Glycine max
  Intron number 1 from transcript Glyma16g26740.1 (locus Gly ma16g26740) derived from phytozome v7.0 (chr-ID Gm16; pos 30830873 to 30831228)
ggagctaccaggtttgtctatatatgtttaaataagatctatattattttttatctagaaaatttaaggattttgatataattatttttagaaagattgaacacactagaaagtttttcaataatagtatattaaaatccttgaattttctatgattttttctgtgatatcatagaatttctcatgagatataccatgtcaagtcaggttgacgtgtgttattcgtgtgcactagaagagttttaattttcttttcttctttttttgtggtgtgtgatgtggaagattgatgtttttttgtttgttgtggttcttcaacagctaaggccgcgtttggggagaaagagtggtacttc

SEQ ID NO: 26160 - DNA, 619 bp, Glycine max
  Intron number 2 from transcript Glyma16g26740.1 (locus Gly ma16g26740) derived from phytozome v7.0 (chr-ID Gm16; pos 30831487 to 30832105)
agggtgagttcccccacactacacttaattaacaacatttacatgaccctcataaaaaactaaagaatatataaaattctatcatggatctgattctcaactttttttgaagtttaatagtatattttaagttttgataagttgtatttataaacagtgttaataatttctcattctattatattactctgaaagatctgattcatgaaaagtgaacaatttgttttaaagaataaaataagtaatcttatttgttaatgaaaagattaacacatggataataaattatacatatgttaaaataccacttttttaatttatcaatcactagaattttttacccactttaaaagatcgaggccaatcctatttcaagataatattcttcatcacctaattaagactttcgatatattgttttgaaaaatgctttttatagataaagcattacaacttttgttacttttttattctctactctttttttttttcattttgaaggaatattttccatgtgtatgagaaaagaataataataggtgaatacatatatgcatgaattaatgattcaatatttaaattacaaattatgtattcttttgtttgtttgtttagttgg

SEQ ID NO: 26161 - DNA, 615 bp, Glycine max
  Intron number 1 from transcript Glyma16g04300.1 (locus Gly ma16g04300) derived from phytozome v7.0 (chr-ID Gm16; pos 3643469 to 3644083)
cccgagtatgacaattctcttttctgcattttctagttgggcatttatttgcttacccttatccatttgaggcatttgttctgctacttcatttgtattttgttctcaagagtcaagaccatagggatggttgtttatttgttataccttgtgatgatcactctatgtttatactaatcacctctgcacatcaaatggtgaatggttgttagatgattgttgaactactttgccatgatctgtccttagctgaattcagaaaatggtggaaatatctctacataaattaagatgaatttttaacttccctaggaaggcagttcatggttaatattttgagttttctaatgtttaacttgtattgcattgatgtgatggatatctccttgattttttgagatgcaaaacttagggatgaaaataatcttcttgtcataaaaccttcaaccctaactagtaaggaaatgaaatgtccttataatttcattcttgttatttattattttatggtgaattagtggaatcaatgttatacgatgccaattaataatattcattaactagtgctttatctctttgaatccattaattctgaaacttgtgttgttttttagg

SEQ ID NO: 26162 - DNA, 908 bp, Glycine max
  Intron number 1 from transcript Glyma14g15210.1 (locus Gly ma14g15210) derived from phytozome v7.0 (chr-ID Gm14; pos 16068515 to 16069422)
cgatacattgtctcaccatataatcgtcgttacaagtaagatttaatgattaatattttgttgttttctcaccatctctttgttagtgaataaacatcatttcatttattgtgcatgttttaatccactaagaattggcctcgtggtaaagaatttaagtagtttgtacaaactcctaggcaaaaacctgtcattgtacaaggacagcattttgttttactgtgcgtgttttagtccgtgtttggcaagtaatttttttctatgaaacaattgctttttattattttcaatggctatctttctggaaaaaaaatcatttctttcaaccaaaacagttttagtaattactaagtaaagatttatacaaaaagctatgaattggttatttagttagatttaaataaaaaaatcattttaaataaaaacttaacatgttgaacttctttgatatgaattaaataagagtttattcagaatacattcaccatataattttttttacattgtcatcctattcgaaataaccatgtctagggtaaaaatgttatgattgaattctaaggagaagagattagaggaattatttacatttatatatgatggtactatttattaggatcgatcaaataattaataacaagttatgatttttgtttgttagatttcatatcagttattatttctgacatttgagttgagaattctgttagttaataatgttatgattcttattcttaaaagattcagaaaaaacttttaataattcctatgaacctactaacagaattctcaactgaaataccagaaaacataaatgatgaaataatcttaagtacctaaccaacaaaaatcactaattatttatttgatcctaatattgtttataatgataattgatattgcagact

SEQ ID NO: 26163 - DNA, 265 bp, Glycine max
  Intron number 2 from transcript Glyma16g04280.1 (locus Gly ma16g04280) derived from phytozome v7.0 (chr-ID Gm16; pos 3621880 to 3622144)
tttgcatcagggagtgtaagaaattgtcttactaaattattttttttatcaataaatattaattgttagaattgttggtttttgttagccgaagaattcaaaaccacgatctctctcccattttcttctcctttcaccactagacaccttatatctctcacattttagtatatttcatggtatcaaatagtagaattttggtactcaaattgaatgtgtattgaacaagatcttgtgatgcaggtggtggaagttccattccgat

SEQ ID NO: 26164 - DNA, 615 bp, Glycine max
  Intron number 1 from transcript Glyma17g00640.1 (locus Gly ma17g00640) derived from phytozome v7.0 (chr-ID Gm17; pos 309742 to 310356)
cccagtttgaatttcagggaagaacaatttatctggtaagtatctatattccatgggtactttgtttctgtacttctggtagtattgatagagattggagatacaagtaggaatcttgattgtaagaggaaaacataatagttcttaatttgtttgtctgaccttcaagttagatgatattggcacacgcttcttttccatttcatgtgtgtattggagcatacatgcatgtgtctctttttctgattttcaatcttgaaaatatgcaattgtaagtcagcaggttctctttaaagttcataatacacttttaaaatatattttcatagtagctattgtacaattttttatggtgagcatgatcaacttgctataattttgattttcctttaattctttaataatattcttttttggcacattaatcgtcaaacatgatgcttagcatggttataagcatccaaatttatattttgattgaaggtactcaataggcatgctgattatacttttgcttcaagggtaataaacttaagtatattgaaatttcagttaaattttataaatataatcatgtttgctgtcattcaggttgatactgctggttggttacag

SEQ ID NO: 26165 - DNA, 361 bp, Glycine max
  Intron number 1 from transcript Glyma16g27300.1 (locus Gly ma16g27300) derived from phytozome v7.0 (chr-ID Gm16; pos 31307408 to 31307768 reverse strand)
ccattgactggaaggtagccctcccattttagttttcttcatctctgatctttgtggatttttgggttttcaatttaatttccatgtttttgttctttgtttgatgggctgtgaattgtggatttctgggtttttaatttatggttgtcaacattattagcattgtgcattgaatcattagctcttataaactctagtagcatggtatttggatagataatacggttttcgaatcctaaatttcagttttttctgttctcagattgttcaatcttttatcattttctttttctgaactttcggcacccttttgatttactatttttttcttctttttactctgtttcaggaaccttggcta

SEQ ID NO: 26166 - DNA, 583 bp, Glycine max
  Intron number 1 from transcript Glyma14g05870.1 (locus Gly ma14g05870) derived from phytozome v7.0 (chr-ID Gm14; pos 4246140 to 4246722 reverse strand)
ctgtaattccctacattatctcctctgatatctttctttccattggatttctccgtgaacattctcaatgaaataagccaattgcctaaaagaatgttcagttagacagtaatattgttatacacttatatatactcccctctgctattcaattcctcttccgaatttgattccatttttgttaaaggaaacaatcttcttccttgctatttttcttattattcaaatctcacatagtcatatatataattttctttttccttattgaccaaattcatattcattctttttgcatctacgattatctttctatgctctcatttccatatatatctgggtatatagaaaactgaagcacaaagaaataaaatgatttatgatgaatattagttattccaatataatattattgaaaatagtgattgacaactttctttaatttaatatcatttgtcttgtaaaccaacgcatatatatatatctgtttcctatcaattatatgcagcttattgagatagtaaactatctaattattattatatgcatggttgatggcagctaaataaaacctcgatcatagtcg

SEQ ID NO: 26167 - DNA, 557 bp, Glycine max
  Intron number 1 from transcript Glyma16g24740.1 (locus Gly ma16g24740) derived from phytozome v7.0 (chr-ID Gm16; pos 28719943 to 28720499 reverse strand)
caaacaactcctttgttcaggtatacttaattacaacgtaacatcgtgctctgtgtacatgttcattttactcaataaaaaaaggttttgttttcttatccttggttatatgtttgcactttaatttatagggagaaagacaattttttttatttataaaaaagtcaccttagtcctaaatctaaaaggtgttgggacattagttcctaagttgaagaaaattttaaaaaaatatctttaagggtaaattgataatcacattaatctaaaataatttttttaaaaatttaaataagaaaattgatacatatttagtgatgaaaatgatgattactgttttataaatgacgataactaccatgacatgcgagagtaattatactggcatttgtgtttttgattaattcttacgaattaagaaagaaaatgtcacgcacctataaatgaagtacaacttatgggtactaattattcagtgtcattggatataacttacagcaaaagttgatttgtttgacaaagcccttaagagaagaagccataaaaagcctctattg

SEQ ID NO: 26168 - DNA, 942 bp, Glycine max
  Intron number 1 from transcript Glyma13g33600.1 (locus Gly ma13g33600) derived from phytozome v7.0 (chr-ID Gm13; pos 35396623 to 35397564)
tccgccctactacccgggctaccaagccgttcccggtatggctctgcgcttctgtgttctcttcatttttttaaagaaatttttggttaagttaatttaaattttgggttttatttgagcttgaagatggaaggtgcgaaattttgtttctgggatgatgaattgtgtgatgggttggatcaaagattggaactttcgagatgggtttggctttgttgagttctgtttggtttgtgctgcaggagagtgataggtcaactgtctgtcttattgcaattttggggtttgaggaaaaattttctgatcttcggttgacttgatttttgtgagtgagttttttggtttgtttttctttttcgattgttggaggttgagaatggttgtcagtgtggtgatcggagtgatttggaaaatgttgttggcagtttgacgttgtaggatagtagaatccaatggatttggtggctggtgatggtgattcagggttttggattaatcactggtttgtctctaattatttgttatccctttacatcatagtttcaagctatgtatgggttgcctatatatgatcaaagtggtgggattaggttacaggatcatttgcaggttgatagacagctagaagaactagatctacactgtttgataattttacaattctcagtgaggcttgtatatgctgtttcacttaagagtcatcttggtgttatgcaatccgtgtttttgcattaaaatgaagtaataagaaagagtgcagcacttgtttggtgaaagcaaagctggttattatgctaggagatgattatgagcagttggtttttatatttgagaatctgatggatgtgagtttgatgatgacatgtctttgtagtgtaacatacttcattttccagtctgctagattttgacatggtttcctctgtgatgataattcaggtt

SEQ ID NO: 26169 - DNA, 824 bp, Glycine max
  Intron number 1 from transcript Glyma14g36750.1 (locus Gly ma14g36750) derived from phytozome v7.0 (chr-ID Gm14; pos 46050376 to 46051199 reverse strand)
gaaagttttggcagaataactttgttggagagaatgtaagttcattttccttcattttcccatctggggtagggtccccacttgtcatcctaatttcatcttctttccatttaatcatgtttgggtaaaaacattttttttattcatgtgatttcggtaatttatttatgagactaattaattaattattattcatggtgggggtggataagaatcagtattgttcatagggtggttttaacttttatgtgcatgagaatgatgtatgtgcagttgtgcacatatctgttccctccacatgctcacttctatagtttcctgtccctaaatgtattatttattcgttaattatttacgttttgtgaattaaaattttaataagaatccatttgaatttgctctttttcaaactgctgaattctgtttttggctatgcttgtcaaaagcatgttaagtttttgtgtttggttttcctgctttcttaggctattacaccaatggaataagatctaatctaattgatgaaagcagttttcttatttaacccacccatgttatgttagaacctttttctgaaagggattaagtagttacataagagtgtgaaatttgtttatgttgagggaaattactttatgagattagtttggttgtttatagaagatgtaagtccttacatttctttagagccaagcaagtcagtttctgttgagtttgattgaattatgtattgttgtggtgggccctgcagaaaattcaggcaaggcgttgaagttggagagtattagattggaagcttagaagtttctctttggaccaaagaa

SEQ ID NO: 26170 - DNA, 713 bp, Glycine max
  Intron number 1 from transcript Glyma15g42130.1 (locus Gly ma15g42130) derived from phytozome v7.0 (chr-ID Gm15; pos 49525226 to 49525938)
gcgaagagcttcacttctctcattcccccagcaaggttttcctctctctttctccataatcgggtctctcaaagttgtctttttttattactgggttttattttgtttctagaccacagttatccaccattagagaaaattctgttcgacgggtagacacattgtgggttgaaaagctctctctcaaagtattcaatccaggatttgaagtcgagacatccaattaaactggaacaatctcgtgctggttgatccacgtcctcggttgtttttagagtttaattttgagctagcattgagttgtttctgtttaactaaccaactcagcgataagcagttgccttaagggagagttttgtcattcagcgatacttaccaacttgaggagcaagattgcttccaaatgaggatatcttttgtcattagcaaagaaaaattaaaaactatccaaaagattatgtttaaattaattattacaaaaatgtaaatgatttctaattatatggcagtgaacaattggattacactattagtgtttttcaattaccttcttttttttaaccatttatgatgatatattctgaggacttcagtttaacccatcaagtctctctcttgttctttatgtgtgtggttgtgcactgattttgtttatttggtttggttgtgtgtgtgaaatgggtgtagcctgtgatagggtacactcagaagac

SEQ ID NO: 26171 - DNA, 652 bp, Glycine max
  Intron number 2 from transcript Glyma16g27020.1 (locus Gly ma16g27020) derived from phytozome v7.0 (chr-ID Gm16; pos 31079716 to 31080367 reverse strand)
gctgcaactccactggttctctcttctcttctcttcatgaatgattatcatcatcaaacttttacaatttcctcttacacctatcttttgtaggaaaatgaaaaagggagggtttaaaattgtaaaataggaagattgacaatagttgaaaagaaagcctggctggattcagttttggattgacttgctttgtgtgtgtgcataatggtttataattcaattatagaacttatgaaaaaggaatttgattgaaatacactttctgtgcaagggcttttttatattatcatccaatcatggattgtcatatagttaaaaattattgacttttgtaataattacttttaagttcatatgtctagagtagggattataaggttgtcttggtgctgaaggaagaagggaggggggagaggtcgtgagtttgaatccccaactaacaaaaactaacaaactatcaactaacatttgctgatgaaaaaaagttcatatatctagagtgatttctactaattgattgaaatgtaatatcaaaattatacatataaaatttttttttttccttctgaaaggtaatctaagttaaacatgcaactgtttcaattaaatttttttagttttaacctcctctaccccaggtcctcacttcaat

SEQ ID NO: 26172 - DNA, 562 bp, Glycine max
  Intron number 3 from transcript Glyma14g26380.1 (locus Gly ma14g26380) derived from phytozome v7.0 (chr-ID Gm14; pos 32288885 to 32289446)
agtttgtgattgtgacataggcagtttagataaaggtagtcttaaaagttgtatgacacagtcaacgaatgttgtggaggatgatgctttagctctgaaattgtcatctgaaatgagggcatcaatgagttccaccggtttgtcaaatgaggaatcctcaaatgtcacaatggtttcatccctttccctaaaaggctcgtaacaattacccttgtgctttatttctttcagttttagttgtttctttcctttcatgcttgtctttaaaccatttcatataatgcatagttcagatggaagggatcaattcttgtattctttttgaactttgaaagctagcaattaattgatgtgttcggaaattaattctttacactacactagggtagttatagtgcatttggtaccataagaagtagttcagtgtatctcattttcagcttgtgaaatatttattagattgattgggcctcaaaagaaaaattccttagtataggtgtttcttcgagcctttgctgacatggatgcttctatgttttccagctgctactgttgcttctca

SEQ ID NO: 26173 - DNA, 427 bp, Glycine max
  Intron number 1 from transcript Glyma15g01460.1 (locus Gly ma15g01460) derived from phytozome v7.0 (chr-ID Gm15; pos 904809 to 905235)
aagctccctacttacaatcgtttaaagaaaggcttgttaatcacatccaatggtgaggtgaatgaaattgacgtcacggatatgggaacacagagaagaaaggaagtgttggagaggttggtaagagatgctgaagaagacaatgaaaaatttctgttgaagctgagggaaagaattgataggtaataaatccattactaatattgcttttttcccccctccctttctctttcaatttcccttcaccttgttttggttgttgttatccatacatagattttttatggcaatattacaagtcaaaatgtttgaaatgttattttgtttcatgtatttccttgaccatgcaccaatgagttttctgtcccttctttatctttcaatatttctagagttggggttagcattccaacaattgaagccaggt

SEQ ID NO: 26174 - DNA, 991 bp, Glycine max
  Intron number 2 from transcript Glyma15g00950.1 (locus Gly ma15g00950) derived from phytozome v7.0 (chr-ID Gm15; pos 576730 to 577720 reverse strand)
aggtatgcattgaaactacattgctctgctcactctgatattatgttaattgttaagtcttctttacaggacgacctgtatctttatgtatgcatgtttagcatcactttcaaaagcttgttaaatgaatgtatgttttgtttagggtcctggcacgtgtgctgtttttcttagtcttttagttttgtgtaaaacattggaggtgttacataggctttggtccatgattaactttaatcatttgttgtttgaatctaatcagctgccttgggctagatccattttttttttaattctaaggttttcttgttggaatacatgcttgcctttaaaatatttccatcctttttctctcatttttgtagttgaatatgacagccaatataaaacatcattggggcgtgaaaataaaggataaaacttagatgcaatttctcaggtactcttggtgttgttctccaactagaattggaatttcacttcggtaacatatgttcacctttaatgcaaacctttattatgcaaattattgaaatggaattccagtaccaaaagtacataaagaattgcttctaagttttctccacgaagaagaatgggctattattctaaaatatctcattttttttttttaaagatgacagataaaatcacaacagatgtcacattttaaagcatagataagcaaaagtgatttccaccaagtcataggtgtgtattgtgtagttcaaacttacattcttatttatttatttattcgtttactattttatgttctgtgtcttaaaggactcaacatcaatagttttgtgatattatttacttgttactctcaactgggttggtggaaatatctgagactcctactttattctgaaacaatggcatcaaccagtctttgtagtcatacaattgaatgtacagttttttaaattatatttgtgatattagtttttgaattctgaattacaacactgtcaggtgctatcag

SEQ ID NO: 26175 - DNA, 261 bp, Glycine max
  Intron number 1 from transcript Glyma15g00950.1 (locus Gly ma15g00950) derived from phytozome v7.0 (chr-ID Gm15; pos 577753 to 578013 reverse strand)
aaatcaaagccgcctatcgaaggttagctcgtcaggtactgtctaatttcatccgttgcctcttctttatttaaattcattacgattctgaacttgattctaagaatcaaattagaagttgaaaagtaatttgagtggttatttctgtttttggaatttgaactatgcaatgcacctaaaagcatattcggactgattttgtgttcatccgtggttttctctgcagtaccatcctgacgtgaataaggagcccggggcaac

SEQ ID NO: 26176 - DNA, 574 bp, Glycine max
  Intron number 2 from transcript Glyma14g32190.1 (locus Gly ma14g32190) derived from phytozome v7.0 (chr-ID Gm14; pos 39323368 to 39323941)
gatttatctccaaggtacacatatatattatatcctgctaagattttatgtaattttgatagaataaagggtaaatcatcattttagtttctaaatatgcaaattgttgataatttaatccttaagaaaaagaaaattctgatttatcttctgaatgtataaaaaatataacaattacatcttatatataatttaatgataaattaattcttaaactttataacttaatgttaaattgatttttaaaaaataatatatcttaatgacaatatttatgaatattataatttaatgacaaatgatcccacaaatttaacgacaagataaaattattgtatttacatagtgattaaatcaaaattttaattctttagtaattaaatagtcgtcgatttaaaattgatcatctaacacgcaataaatgctttcttttgcaacaaatgtattttttttccttttgttttcttaatcaatgtccaaagccagactaacttgaggatatctttttccaaagattaatttattgaagcttggtctcaattttctctttggcaggtgccaattcctccataca

SEQ ID NO: 26177 - DNA, 869 bp, Glycine max
  Intron number 2 from transcript Glyma13g36250.1 (locus Gly ma13g36250) derived from phytozome v7.0 (chr-ID Gm13; pos 37536872 to 37537740)
aggttaaggtaatttgattcacacaacaccacataatttgttgttattttaaactatgtatactacgtatcttaattcatcaatctctatgccgtgcctctgatttgcataaaatgcattgttatccagaaggaatcaattaaagggtatccacacaaattcttccaaattgtttattttagattcaaaccccactttgagttcacatggtcctccttttatataaacatagtacaattaactaaatcttatctctaacctaatcctcaataaaaatattcataatttcttttaaaaaaattataacgggctttaatttacaccaaactattgattataatttattaaatggaaccttttttctgaagaaattatttcatagttttaaaccaccaagtaacaattggtgtggaaatacattggaaaaggaaatatttgatggaagaatatatgattgattttttgtgtgtaaaattttgttgaattaataataattacatatcgtaagtgaaattaatctctaatctaatatatttttatagaccggtgatctttgataaagaaaaatcactacataccaataattctgatcaatttttagacaatatataactgagatttttaatttataataatttatctttttttagataatctcaaattctttgtctaatgtattgtgaacaaatttgcaattagagtatctactccctgatctccattctcttttctcattcaaattaaaggacagtattctgagcataatttcttgctaaaagtggaattaatatatgtcttaagtcttaaccccttttgtctactttatgtgcattaattatgtggccctcaatcaggaaattgcctccaag

SEQ ID NO: 26178 - DNA, 717 bp, Glycine max
  Intron number 1 from transcript Glyma13g32940.1 (locus Gly ma13g32940) derived from phytozome v7.0 (chr-ID Gm13; pos 34952155 to 34952871 reverse strand)
tccacgatttctccgagattcgcagggaaattcaggtctttccgctgccctactctctaaacttctcatgtttagcttttacacgtgcttgtttgttttgcttgcgtttactgtgtattcaacactgctttccctattgtggatgggagaaaagaatccttagcctcgattgggcaaatgaggagggtgacccctttcaatcatgaagattattttctctaagtgatgaagactagcttggagcttgagcttgcttttcctgttcacccactaacaaaacaccaacccctcactgccacattaaccatcactggactcagttgaacttaggtgcgagtgtgcatatgtttcaagtttagagacttgatcctttgacattagtgaaatggagtataattgaatgaattttcaggtatattgtttgctgatttgacactctagctttgactgtaaagtcaacgttatcatcatattattaatagttaatactgtcttgatttattttggtgttttaagcttaaaaagcagttgaatttgagatttccattatttgcgattgcatctgtgtagatgtaatgtaatactcttgatggcaatgtacggataaggtatgtggtctactagtttaatactccgccccatctctctattgacttgtatatcttcactctcttttctgcaggctgaaactgatagggaagcgggtgggaacaaagg

SEQ ID NO: 26179 - DNA, 766 bp, Glycine max
  Intron number 1 from transcript Glyma13g19170.1 (locus Gly ma13g19170) derived from phytozome v7.0 (chr-ID Gm13; pos 22744363 to 22745128 reverse strand)
aaccaccacctattggccccaagagaggtgctaaggtgagttacttcaaaactcaactttttagaagtggttgttgctcatgttgtgcagaataattcacttttatcccatgaacatgatccttaatagttgttgcttgtctgtgaatatactaggctagctccctattagaattggtatgagaaaatgtctagttataaacatgtcctcttattttcctattcttttgtgtcatcaaagatttatatagtaaatagtgaaattggattttctcaaactaaacactaaaactttttttcaaactataaacaattgttttagcttgactagtgatctgaagtttgagtcctgggtataagtagctgcgttattgatttctggttcaaatttaagcttaagagggagaattcagaatagaggagtgagttatactaacatacttcttctaacactctttctattacttgttagttaaaaatgaatagaaattacaaaatcttatgtcaaacttattgaataataagtgagacctgtacaatttttatgatttttaatgaatttcagcataaaagaagaatatattcaagatcatatgctagaaagtctgttgttagcatttctctatagaatgtgtaagaacaaaggacagtgatgaaacttgtctgtttcattcatttgagctagctgtttatcaacagggttagtttctaatttttctttgcaatcaacaggtgaagattcttaggaaggaatcctactggtacaa

SEQ ID NO: 26180 - DNA, 670 bp, Glycine max
  Intron number 1 from transcript Glyma13g19020.1 (locus Gly ma13g19020) derived from phytozome v7.0 (chr-ID Gm13; pos 22610860 to 22611529)
gaggtattggtgtttagagtctttttagagctcattagtgttgttagtaccctacaacttagggggagtcatattaatctttcgacatggtcgtaaactcattgagacatgtaaagattttattgtaagaaaatcaagtagccttttatatctcttaatattaacaatgtcaaaatcaaaacataaaagcaaagcttgtcatctagtaaaactaattctaaaaacggattttctgacatcaaatagtatctaattaattgtttcaaggaagaattttttgagacttgctttaaggatgctagaattttttttattttaacaaattttaaaatgtttgtattcaacaaatatttttatcatatttattatttatttactttttaattaatcaaagccttccctagttggctagttccattcccattacacgtttccaccaagcaaaggtgcattaaatgatttcgttgaaaaacaatagtgatgcatagcgggcatgatgtgataggtaggttgttaaataagggtacccaacatcctcaaaatagttcaaggtctctcttatcctaaagattcctctatatatttttctctttaaaatctcacattcatccaaccaaacaaaaacacaacacgagcatagtttttctcactgtgcttttgttgtggtcaa

SEQ ID NO: 26181 - DNA, 711 bp, Glycine max
  Intron number 2 from transcript Glyma13g05700.3 (locus Gly ma13g05700) derived from phytozome v7.0 (chr-ID Gm13; pos 6057311 to 6058021 reverse strand)
tctgacttgcaactcgaaagtcaacgaaactgtaggtagtgaaatatttttaaatcttttctttaattggaataacaaatgaaacagtacttggccttgactttaatggcattttgggaactctttaattggataatgtgattctgatttcttggattccatgcagcatataaggtcttgaatacacatatcatccattgatattccaaattaatagcacataaattattttattatcatttatcaaggcttcatatcgcataggatgcctttctttgcagcctatctttgtgggtgggagaagtaacctccctttctttcccttaacctcgatcacccagtgaaggtgtgattataaaattactgtaaagctatgcctgggatgccaattgaatttgtacaactgctacaaaagtccttgacatttttttgaccattttacatatgatcccagtatatattattcatttgatatgtgataaccttcaatctaattttcatttgtgcatctatttttatatactcttagaatgtgagtttgggcctaactcaaccccaaaagctagctcatggggtgagggttgcccctcacttatataatctatcttggtcttgtctctagtcaatgtgtgacttggattttttccaatatatatgtttatgtatctgatttttcatgtttctttctggatttgcctctagattacaaaa

SEQ ID NO: 26182 - DNA, 889 bp, Glycine max
  Intron number 1 from transcript Glyma16g30310.1 (locus Gly ma16g30310) derived from phytozome v7.0 (chr-ID Gm16; pos 33968044 to 33968932)
ctttgcaaaacacctgataatttctcagtgttctggtatgttcaatttcaaattaagtcttccttttttcttaaagaacactacactacagtgttatgtttccatttcctatgcaatgaatgatctataagtcttgttagtggtggccatatcacaacttatgtttttatctttcattgtttgatgataacctgtttttaataggaaaaaaaaagtctttatttctattttcaaaaactatttttagttttcaagatacaactaaacaagttcttcagactgtttggtggagaatgatgtgagacacagaatgtggaattgagagggaacttgaacaagattaaaacagaagaagcagagaaaacattttcccgatgtttttgtttttttggattttagaacacttattttggatacgattctccaaacttatatattttggaagagaaattgattactaagtagtctaaaattattttataaaacagtttcttaactgagaatactcagaccctaaatcttccagttttagtatatttctaaaagaaaatcagaatatttgtggtctaagttttattattatcaagcctttcattttccttaaagaacaaaagagtgtcacattccatttactatgtaatgaatggtcaacaagtcatgtacttcaaagttttctacttttctcattcgtaactggacaataacacattttaaaggggaaaacaagggcatctaaatctgccaattttactttgtttgtgtatctgttatctctgagttttcaactccgaagttaaaattatttgaggtttgattttttctcaagaaattcttgttttaaattatttgagcagcacttctgcacttggatcctaaatcacctgaagct

SEQ ID NO: 26183 - DNA, 582 bp, Glycine max
  Intron number 3 from transcript Glyma15g13350.1 (locus Gly ma15g13350) derived from phytozome v7.0 (chr-ID Gm15; pos 9956311 to 9956892)
actccacccgaccccatttccccatacttcaccaggtatctattttctcatcttatcttcaatattattttcctagatgcagcctgagaatgtttggaagtgttttgggtaatcaaggttcaaattttcattttgattattgtgttacgaatttaatgctacttgatggatggacaaagcatagaccctcttaaacataagaagaaaaaaggcagtagagattgagctctcgagtcttgaacacttagttatagagggaccagagattctaattcatctccccaactttgctcaatcaatgtctcaataagtgttgtagaacgcacgtctaactattctgtgtgtgccttgtgtttttctgtgagcaatatgtttgcttattggacaaagtatattagttttttttaaaccaaagtcaaagatggaatatctaatcctcatatcatagtattatactatgccctactcttagtaaaattgtttgccttgatgtatgcaaattagatctggaatttgcaagttgtatatgtgttggtacatattattaagctatgatactttaactcactccacaggaagtaa

SEQ ID NO: 26184 - DNA, 520 bp, Glycine max
  Intron number 3 from transcript Glyma13g06310.1 (locus Gly ma13g06310) derived from phytozome v7.0 (chr-ID Gm13; pos 6574304 to 6574823 reverse strand)
aaaaacaggttgcttttctgttgggtaagctgtaagcatttgttgaattgttctctgactactacatgctctctctctcatttctcattgaccctgatcccttggtttttgtagtttatagataatacatatttgcttagagatgtaattaaggtttggggaacccacgttagtaatcagttgcattgaaattttcggtcatgtttattttgcctggtgatcttgtcattttacgagacaatttaatttagatatgaactttatgttacttatgtcttcattttattaaaaaattatgaattgcattaattcataactctgcacccccccaccccccccctccctataataagcacattgttgttatcctttcatgagattgatgacatttaccacattctacttaatgcttgtcttcacacttttgttagaggtaaatatttttctacatctgattctgcattttattggctttgaattcgcaggatctttctcattgcactgaaacaagcttcaaaac

SEQ ID NO: 26185 - DNA, 677 bp, Glycine max
  Intron number 1 from transcript Glyma13g29690.1 (locus Gly ma13g29690) derived from phytozome v7.0 (chr-ID Gm13; pos 32552677 to 32553353 reverse strand)
cagccaaccaagactgtgtacctcttctgcagaaggtgtctctctctctctctctctctctctctctcctaaatccttattttttattttctttgtccacaactcattcaagtgctcttgtttaatttccaaccccatatggatttcattcactatttcacacagaaaagtattagcgaccaaatttagtgacaaaagttgcttttttgttactaatgattgtgtcaaaaattttaggaccagtttacttctgtttcatttcctgtttttactgttaatttacaaaatggccatcttgttttcaacatgttttctgtttactaagaaattgttttcattatttgttgtacaaatacttaaaaatagaaaacagattgaaaagtttttgtaaattaacagtgaaatcataagtatatggtttcctagtgacaactttttttataaaaaaattacatgtaaattgtttcgtctctaattttaatttttcttagatcatttgatgtataatataaaatctcactttcttcttcttgtttcaattagttgacttcagaatccatgaaacttataatgaatccaaacttttggaataattatgttgagctggaaatttttaatggtttggttgtttgttgaatatagttggtagcagaggtggtggggacgtacttcttgat

SEQ ID NO: 26186 - DNA, 584 bp, Glycine max
  Intron number 2 from transcript Glyma15g17970.1 (locus Gly ma15g17970) derived from phytozome v7.0 (chr-ID Gm15; pos 14444575 to 14445158)
acggctcagtgtttcggtgcgtttctttttttgttgttttttttttccgtttgacacctgtttttgatatttgaagcttttttttcctttttctatttgacacccattttttatttttgacacacccgtttttggagtttatttggtgttagtacttggttattgtgtgaactcatgaaatttttttagtttatttgaatgcaatccattgtttttttaattttttatttatatttattttttatctattgttttgttaatatatatatatatatatatattttttttttattttttttttttccgccatgacgtctgccattttccgctatgccatccgccatattcttatggcagatttttggctttccgccaggaaccgccatccgccattaacaacattggtttcttcacatatttttcctgtttcttggaaaaatcgcttgctgcaatgcagtgtgatcctaattgaaatgcatttaatagtttttagaaccaaaaactttcccttgagaaatactaagtaactgatcattattcttgttacagtcgggaaaagattaggccagaaaaggagctactac

SEQ ID NO: 26187 - DNA, 413 bp, Glycine max
  Intron number 1 from transcript Glyma16g25820.1 (locus Gly ma16g25820) derived from phytozome v7.0 (chr-ID Gm16; pos 29937622 to 29938034)
aaacgatactgcccaaggtttggaacattttcaacaaattttgagccaatgagtgtgcattttcttttgatgtcataattttcatttatcaacatgtgtgacacatcaagaattaatggaccgatttatatgtgctttcttaactattaaaagaacattgatgttgcaaacattcatacagttttgctttatgcatgctaggctgatggtgaatatatttgtggttcaatccttccatttatgtctctgcaatcataagattattttgcagcccataaatgattatacattgtttaggattaaaggcctggtatgattttcttgtcatgtatagctttctgtttgtcttgacttctcttttttgttttttgactccagccaacgtccaaattaattaaagaaattgcagtgtt

SEQ ID NO: 26188 - DNA, 521 bp, Glycine max
  Intron number 1 from transcript Glyma14g17110.1 (locus Gly ma14g17110) derived from phytozome v7.0 (chr-ID Gm14; pos 18677797 to 18678317)
gctgcgtccctcttagatccctctctggatcacaggtattcacattttccctcttctctccaatgttatttcaatcactaaatttaagatctgaaatctgaatcctcactctctttttcatcacacacacatatcgagagagagagaacttttttatttttatttttttattgtgtgtgttgtttgtctgacttaaattatttatgtgttagggttcataacacgacactcttgtgtttttgtgctctcttcgtggatcttgttattttgtgtttagtttttggtaataattgagctttaatgatgtttttgcgtcttaatttgggtaagaagtagtggttaagatctggcttatgttttttgattcattgttaatgagataaaaaatgaatagtaatgttgattgttattggagtgcttattattcttattgttatcgtgagtctctttgttactttggtgtgtgcaatggcagtgagaacagtgttgttgagtttgaataaattaatgaaggggtgttg

SEQ ID NO: 26189 - DNA, 714 bp, Glycine max
  Intron number 1 from transcript Glyma15g32540.1 (locus Gly ma15g32540) derived from phytozome v7.0 (chr-ID Gm15; pos 36073147 to 36073860)
cgtgcgtcgaacccgaaccccgattcaaaggcccggtacaacccttcttttttcaaatgggttctgttatttttttatggacaaatgttagtaactagtatgttatgttagtggggattcgaacccttgatcatcttatccctgcaacccttacgcccctcctccaaccattaaaccaccttatgaatcccaaatatattctgttatgaatgtctagtgattgactaattgacctttgtggtcttctgattcggaatttgaattgtttagttcttgtaattgaagtggattcactgtggatttacatgagtacttgtaatttatgcatatgttttcttctctaattagcttgggaatgtatgggtgatttctgcgttcatttttttcttttttgcattttattttattagttttttattttgagtgtttttaaatctctacttctgtgttcacattaaatggaggtttgaatgctactcggctcgagtagagttactttcagtggaggatacctgtggtgtatagtgtctaggggtttgttatgaagttagagagaataataatgatgaatttaggtgttaaattctttgtgttctatttttattttaaagcttttaagcttgtagatgtttttattggattaattttgaactccgcatctaacaacacaaaattgcaggacatttggaacaagagctggtatccaaaagctgc

SEQ ID NO: 26190 - DNA, 486 bp, Glycine max
  Intron number 3 from transcript Glyma14g05450.1 (locus Gly ma14g05450) derived from phytozome v7.0 (chr-ID Gm14; pos 3889990 to 3890475)
tcaataacaacacaccaatacttgatacacaaacggtacatcttctaattccttcaatatagtttaataaaaaaataaaggtgaaatttatatagttaaaaaatgtattactagtaacatgttggtttgagcggaattaggcttagatccttcaagcaaggttggggattgaatcttattggtaaaaaaaaaacatggttaaaaagatacttcacttaagttggtcaataaattaccgacataaattaatcatttataaagcagatgaatactttacatcaataacatgataactcaaaaaataattacaagaagaagaaaatataataagagtaatcatgctgtaaagtgagtttattatctataggtaagaagcaaggaaatgtatacatttgctaggaaatagaggctattggtgtactgcatacccgttatttttcttgaacttatttttctgttcttgcaccttgctagggacaaccttac

SEQ ID NO: 26191 - DNA, 603 bp, Glycine max
  Intron number 1 from transcript Glyma13g16630.1 (locus Gly ma13g16630) derived from phytozome v7.0 (chr-ID Gm13; pos 20546543 to 20547145)
ctcttgctgcttcacgaaggtatttcgttatttctcgtctaccttttttcgttgatttgatccctagggtttctccttcttgcttatctgtgttcctgaaaaaaaattcaaattaaaattgtgctttcaaccaaatttagacggaggcaattagggagaactggagaaggggtatctgcttgaatgaacttgcttcagcataggcagcacgagttatcttgttgattgatgcatatttattttcctttgttttgtattagaaatagtttaccacttaggatattaattggctaaaattgcatttatattgcattatgtttttatgttatgttaaaaagtaaagactgcatggtaaattttaatgtgctgtcactgcttaatatattggtagatagtagtgcattgaactggcgaagtaaactttagaaccaaagaagatgggcgtgagtataggaaggacaaattgtaaactgaagtgcgtgtctgatgttgctgcttggcacattctgagggtgggacttaaactgttttttcgcgttgtcaaaaattttgttgattgtatgtaaagattgacattctgtttgttttttgtgaataggataa

SEQ ID NO: 26192 - DNA, 552 bp, Glycine max
  Intron number 4 from transcript Glyma13g16630.1 (locus Gly ma13g16630) derived from phytozome v7.0 (chr-ID Gm13; pos 20549594 to 20550145)
taagggtatgtgtctttgattttcccccatgcttgtttgcaagtgtaaacatgctcaatttcactctttttaattcttcctacaattgcttattcattttcttactgtttcaaaatttaaaataaatactgtacagtcataaataatagtatatatggcctagtagtatattttgattttgtagtatctctgatttacatggaaaccgccttttttaaaaattgtctttgcaaaaattgcctgctagaacatttctccagtggtattcttgaaaaaaaatatatgtagatttattgtttacattatgtattctgtctgaagcttgtaaagagctttatgttcgtttatgcctttcccattttttttctctggaaggggtgaaatataggatattctactttttcagtttttaggttctaataaggcataattaagtggtagactcagctttaaaattttgttctttcctttatatggagaattatctttcagattaatgtgacttgtaataaaaccttttgagcaaaactgacttgtttttataaatttcag

SEQ ID NO: 26193 - DNA, 968 bp, Glycine max
  Intron number 5 from transcript Glyma14g24090.1 (locus Gly ma14g24090) derived from phytozome v7.0 (chr-ID Gm14; pos 28769182 to 28770149 reverse strand)
ttgttgtcaaattctttgacaatccaaacgtaaaggtaatatgctatcttaaaatattttattcgttcaatattaagccagaggattcgtcttaatcatatattggagcagtgttttatattgttactgaattcccctttctattattatcatctccatgggggttaccttctacttttccattatttgcttgttttcatgacattttcttatttctaaatattttttattattctcttttacttttgttccctcacccctattttatatccatatcatattggattgccaaaatattataattaaataaaatccaaattttcatgggcaaatatttctctcattatctatgtcaggtataataatatgtagggttaaaccatctctcctgaaaaataagattggttttagtttactctgccatcccacctaatgagtcattaaaatttgtttttaataaaatctttggtatgaatagggtctgtcgtactgttcccattgcttctctattaatagttaggtatgaattctgcaataaaatctctcataagattttatttttgctaaaatcttcccagtttttataagcttgaggctttatttgtttgtttattaggaatatattcatctatatatggatatactaatattgttttttattacactaccttttttgagtgacccattggcctctacatgctagaattttatatcattgatatacttctctctttcactgttttagtttttcgtatatacatatacatattgttttacaattcataatcagattcattttttctttttttgttaatgcatcatttcagttgctataattttattgctgatatatcatatatttatttagatattctactttgactactttaaatgcagataactttaactagttatttagttctctagtgttctagaattctaaactcgtaatttgaaattgttaggca

SEQ ID NO: 26194 - DNA, 837 bp, Glycine max
  Intron number 1 from transcript Glyma13g05660.1 (locus Gly ma13g05660) derived from phytozome v7.0 (chr-ID Gm13; pos 5988986 to 5989822)
attttagcaaagggaagtgatcccttaaccaatccgtaagtaattctgaaaagtcttagttaacattttcttaagtattgaagtcacacactctgaatattatatatataacgagtaattcggtatgactaattatagtatatgttatactccttaaacacagccaaaaaaaattatttttatgtagatatgatgtttatgaaattgacttgtgtgtatgaaataacagcagaaagaatacatttatatgtcccttttaccaactcattaaataaattttagtattttgagacattaattttgactttggtctagggacacaagttccaaaaaacaagcaagttacaagaaagataattatatatgtcttttttatcaaaggtaattcagttagttaaataaaagacatgaattattataaattttttaacatttatctttaatttttatgaataaaaaaaaatatagcatgtcccccggagttgatctgtgacttccaaggtcctaaggtagcaaccttacattgtacgcactaagtattgaccttggattcgttcaaaaataattaatttaaaaagataatgatcactagaatattaattgtatcccattattttattacagtatattctttgcctaaataaacttatgattaattaggattacaaaacgaattgaaactagcccaatttagttaaatgccatgaatacatatatatgagatatacacattaacaaaggaaaatagtgtaccaatagaataccgtgctctattgagaaggcatctgatttataaagctaggtagatatattcagcgtcaagtgtcaactatatta

SEQ ID NO: 26195 - DNA, 869 bp, Glycine max
  Intron number 1 from transcript Glyma15g37600.1 (locus Gly ma15g37600) derived from phytozome v7.0 (chr-ID Gm15; pos 43505047 to 43505915 reverse strand)
aacaaagagctttgatactagctcttgtcaacaaggtgatttcatttttctcttttaattcaaagatgtttaagaccatttcacaaatagtttaattaagtacttatttaataaaggttttaaattgtgatggttttgtcgtgtttttcggatattgtgagaaattggagataaacaaaactgatgtaattacaattgtggttgccaacacttcaataggccgaaaaatcgcagctgcagaccatatttcgaaaccttgatttcaaagttttaaattatatatgatcagtcacaaattcattgtaattcttgatattacgaaaatttacagataaatgtgattgatttgatcgtaattgtagccataaaaaccctaaaaactttgttgttataactaaacttgcagacctggtttgaatatttatttataaatttgattataaagcatgttttcaatccttgtatttttggtgaaagtttagaattagtttctaaacttttactttgattaatttgatacttagaattttagaaaagtagtgatcttcatccttcctcaagatgaaaagtgtctataagaatgaaaaaaatcactacttttataaagtttaggacataatcaaagttaattaaagtacagatattaatattaattttcataaaaaaaatataagaactaaaaacatgttttatctaataaaatttaataaaacaagttagagaagtgttttgaattttgattaatttttcctagtacttgttaaaataagttaataaaaggttacaggttgtttctttctttggaacaactcaaatgtgtggtaaaatttttggagcttggatgtgtgagtgattttgttgaattgcag

SEQ ID NO: 26196 - DNA, 916 bp, Glycine max
  Intron number 1 from transcript Glyma14g25570.1 (locus Gly ma14g25570) derived from phytozome v7.0 (chr-ID Gm14; pos 31122105 to 31123020 reverse strand)
taagctttgacaactcaatttcaccttatcctctagtagaagaatatatttcaacagggagaattatgaatgcctttacctgacatgttacatatgttaccaaatggtagctctagtttaacatctacttattgtggttccagccttttatttatccttttgtttcttgcttgctattccttaagttttgaacacacctcaaatttgaagattgttgtgctttgttactcttgctttctttttaacattttttcttcataaaaagtgaagtccaacatatttttttttaatataaagatacaatatgtattatcataaattaaagaaaaagctaaaattaaactaaatttgtatagcagaattgtcaagggatcaagaattcatacttgttcaatctttgttaggaaataagggaacaactaaaaatgtgaaaactaatactcttaacacttagagatttcataaacctgataaaattacttggtagaaaactggtttttataatcacatcgaatgagagtaaagacctttcagcgagtattataagagtagtcgtctaattcattaggagccatataaaacaaaattacaatgccatcaatcagcaaagtcttattaagaaactaacattaaacttaaaagaaaataaattataatttacattgaaataaaaatagatagaagctgacttttatgttaaaaagtgtatatttttagcttcaaaatatgattttttattttaattttttatgaaagtttttagtctattgatgtaagtgataccacttgtcctcccgtgcacaggtcaaccatgagagtttttgtgcccacacttgtcctcccgtggaatactattagactgtaaagtagattcacttgatttgatgtttttggtcccaggatatatcactggaga

SEQ ID NO: 26197 - DNA, 820 bp, Glycine max
  Intron number 1 from transcript Glyma13g23940.1 (locus Gly ma13g23940) derived from phytozome v7.0 (chr-ID Gm13; pos 27240567 to 27241386 reverse strand)
accagagagggcacacgatttggactaagagtgtggtatgctaatatttgattcaaagtttgccatctttattagttaattatttgcagctctattgatgaatctggttggaaattttgaaatttaaacaacgtgaaaagaagtatcctattcagctgaaaatggcgtcgtcgccgccgcgagcttcgactttgatttcagcttttctgagactcttgcgtcattaccggaatgtggccagtgtaaacgacgaagccgttcacccgcgtgttggtggtgtcgttttcggaatcgggggaaacggtggcggcggtgtaatccagggggggagggggggggggggggtaagagaagggaaggggacatgggaatcggagagagagatagggttttggagtaatgttgttgattgagaagagaaggggaaatgggaatggaggagaggttggagagacgagaggggtcccacgagtttttttttctcttaactctctggtccagggaaaggaactttactaattcagagttagtaaagtctgataaaaattattttcgtcaagcatcccactcgaatattatccaaacaattcaactttaacttcagcatattaaccacttcaaccatgagtttgacccattaactctactcactactcctaagtgagagtgagtaaactgatcagctcacaaattaggggaaggaggtgcggaacatgtgtgggggatttgcttgaggattaaacaagtttgtgtgtgtgtgtgtgtgtgtgttttaatgtttctgttctttcttttttatttgtaggtatttgaggtaaaa

SEQ ID NO: 26198 - DNA, 617 bp, Glycine max
  Intron number 2 from transcript Glyma17g03020.1 (locus Gly ma17g03020) derived from phytozome v7.0 (chr-ID Gm17; pos 2013715 to 2014331)
caggtattctctattctcgcctctcttccatagacaactactttgttaggttctcgtttctaaattatttgttgattgttcgctttcttaaagagttatgaattatcaatttattaatttactgtctctttttttttcctctcctgcaatttcttttatgtccatgctgtatatcgtgtggtaatttgttccttcgaagttctgtgtcgattatttgagagataatcatggatacccgtacggctggacattttctcccttttcttcatttatttcgctactgttgactaacatgctatcttccctcgattctgcttgatgaagttattcgtgtttgttagagaaaagctgtttaatttattttgtgaatcataaattcataacgcattttgcgttttggataaatttgtttgtttttaacattttgcaacacttgactattttactatttgaagtttgagcaatcctttattttgaggaatgataacattgataaccttttcgatatttttgagaagcttacattggttgtgctaaattttgtttatttttctggctcattgcctatctggtagtctatgagatgacttagatgaacatgatattgccttagggtt

SEQ ID NO: 26199 - DNA, 821 bp, Glycine max
  Intron number 1 from transcript Glyma16g30410.1 (locus Gly ma16g30410) derived from phytozome v7.0 (chr-ID Gm16; pos 34064169 to 34064989 reverse strand)
tgtgtgagttgaaactttctgctgaggaccaaaaggtaaaaaaattataaatataggaaccaaaataaatgtttaaaattatagggactaaaaagaaaaattatcacaactatcaagactaaaagggtagttaaaccaaaataaaataaactagtgcaaaataatggtggtgtgattagacagttttaatcctaaatggctcgttgtagacatatatacctctacatatttgtgcattctgcaaccaccaccattagtggaataaaattttaaatgcaaacccttctatggtatattctatatacgcattattagtctaacaataaaatagctacgatacatggagaagtttgaagcaagacttataaaagaaaaaattatgatctctgtaattatggtagaccaagttaaacaagcattatatttcacacttctttgtatctcactaattaatttttatattaaaaagagaacaatttccagattcaaatacaattagaaattaatagacgacacaacaacctatttcaaattatgacgatgaaaactagccctttttcatatataagaaaaatatcattttgtaaattaaaaaagaaataagaatgaagaaagaaaggcagttgcggcagtataaataatagaaagaagtaagtttaatattcagaagcaagaagcacttatacaattaagttgtttcatatatgcgttgcatgaacatgaattcctcctccattatttatattgttgtgtttgtggagctttggtctttaggttaccttgcagagagagtgtgtgcatcccaagtgagcgtgagacac

SEQ ID NO: 26200 - DNA, 751 bp, Glycine max
  Intron number 1 from transcript Glyma15g07930.1 (locus Gly ma15g07930) derived from phytozome v7.0 (chr-ID Gm15; pos 5586240 to 5586990)
aaagtccaatacaccccaggtagatataaagtttatttgaaatggctttctataaagaaagaatccagtagtactataagttcaaaatagttcttagctttgaattctcatcatgcatttcatccaaaactacactggaaaaccgtatgtacttgtaaatcagtgaagcaactacatgaattcaatttaaaaaaaatttctgccttttactcgggattcaattttgtatttgggttcagattagattattaataatcacgtttaaatatcagataatgtgattttaagtaaatattcacatgtttagtccaactttgaagtattgattctagtccaaaatcgatttttagttgaagtaatttaagtagcatttgcataggataaaaaaattatactatcctgaatacaaacttattggggttatgtagtggcgcaaggctcccttgtattcacatttggaggaacgatctatctaacaagagaatttgtgtttgatgtcctctgttatgtacaattttcttgggtcagcaacaatcatggactacaagcagattagtttttgtcctagtgtgttagggatgatctctgatccaggacaaaaaaataatatttaaacataaattatttcacttcaaaactaatttgtaaaatcaatttaatcaatgccatttaaaattaattttgtaaatattcaccaaaacactaatttctcattgttgtgaatgtatctgcaggtgtattgttgttttgg

SEQ ID NO: 26201 - DNA, 967 bp, Glycine max
  Intron number 1 from transcript Glyma16g05190.1 (locus Gly ma16g05190) derived from phytozome v7.0 (chr-ID Gm16; pos 4499507 to 4500473 reverse strand)
gactcaggacccatccctacagcctttaaatcaaggtaaaattgccaggttcatgcactatctaacttttttttctttcaatttatattatcatttgtgctatattatacagccctatttatcaataatttatttcaggatcaattttttaatttcacccttgttttttggaactccatatatagagatatatgtaagaagatcgatcccaagaaattaagatctatgctcacacacacacacacagatatatatatatatatatatatatatatatatatatatatatatatatatatatatatatatatatatatatatgcgttttcaaaacatttataaatttatttttactactagcctgagtgcaattagcaaatcagagtttcttgttgaaaaaaacgaaaacaaaagaaggtatttaatttttttttaaaaaagcttgttggttgatgcacatgtaaaatatgttttaccttgaaatacatgccaaacctaaccagttgaaaacttgaaatgacactccatttatcatatgcatgtctgccttcaattaatctccatcttcggtttgtgtctatcctacattaataatgacgttgattgttgagacaactagttaggtattttcagtgatcagcaacatttccaatgccactttaatttcttactctagctagttgaggatgtgttttcataaatccaaaccacaaaaaaacaaatgctgcctaactaaagcatgattatttataaagaaaaatgattatagatttgatattgtagaaaaatttatattatcatttaattataatttatcatatataataataattactttaaaaatcatattaataataaattataactaaacgataatattataaagtgatatagactatccgtcatgacgattaaattcttatttatatgcaataataattcaaatttgatatattgaaaggaggaa

SEQ ID NO: 26202 - DNA, 319 bp, Glycine max
  Intron number 5 from transcript Glyma15g18370.3 (locus Gly ma15g18370) derived from phytozome v7.0 (chr-ID Gm15; pos 15109629 to 15109947 reverse strand)
aagagcgcgacagaattcgttcattggtactgatttcttttccgtgttacgtttgtaatgcagttatgcttatgatctttcttcaacatttgagattaaatgcctcaactcaattattgccttggtacctagctattggtatagaaattaaattgaaatgtacacaattagaatatagccacaggttgatacatacacatagtaattgaatgttattagcttatagagacatcatttgatgttggggctattagtgcttccacattaacttctcaaatcttataaattttgcagagacaatctgcattaaagaaaaaac

SEQ ID NO: 26203 - DNA, 431 bp, Glycine max
  Intron number 1 from transcript Glyma15g02680.1 (locus Gly ma15g02680) derived from phytozome v7.0 (chr-ID Gm15; pos 1834879 to 1835309)
tacactgctagtggttgtaccttcacaaagtacaggtaatccatttttcgccttcatttttttatccatgtgctctttttgccagatattctttaatgccgtgtggtcattttgatgcccatgttcttacaagtaagtaataaattagttaaatcctatcgagtatgtcattccctttatcattcgaattgtttcgttttgtaatatgaacaaatagatatcagattgacatgtaatccccccttgtctgatgattgttttactttcttgtttgttgatgagtatagttatgtactattgctatatctagtgtacctgtcttctatgtaatcccccactctgttgttgtttttgattgggcatttgagtcttcactcttcctttattatgtgtgccttactattattctgcacatatgtaggtcgaagatt

SEQ ID NO: 26204 - DNA, 806 bp, Glycine max
  Intron number 2 from transcript Glyma15g41120.1 (locus Gly ma15g41120) derived from phytozome v7.0 (chr-ID Gm15; pos 48180849 to 48181654)
tgttttttccctctgtttgcagctagtaagttggccagcttgcaaaaagagaaaccaaccattagagataaaaaggtatgagttacattgttgtgtgggagaaatgttttttctcgtgttacaattttttactttttgtacaccttctcctgtacttcttctctttatggttaaaaggaggaatgcaaattatatataagaatgcgaatttcttaaggattttatctttgaaactgatttggagttgcttaattttctctcattgtaaattatatataagaatgtgaatttgttaaggattatggtttgagaaaataatttcagttttcattttctatatttatttgtcgcataatttataccttgtttttttattatcaaatgtttgtataagaaatagtgaaaacggaaaataataaaacagtaaaaaataaaaaataaaaacaaagtgaaattaatatgcttttttataaacagaaataaaaatagaagttttttttttctaaaatcaaatgactccttactttctgataaagtataacagtggcaaccctccttcattctctttgtcacctcattatttaataatgatacaatttctttaccataaaaaggaaagtgtaagatttgaatttttttctctcagctttttcaccataaaaaggaatgtaggtgttgttgaaaaataatggtgacatggaaatatcattattattatgtgtctgtgggtcaacaaattgagtgagtaattgattattgttgcatacctacttgtgattttataggaagaagtaaaggaggacaac

SEQ ID NO: 26205 - DNA, 575 bp, Glycine max
  Intron number 3 from transcript Glyma14g00540.1 (locus Gly ma14g00540) derived from phytozome v7.0 (chr-ID Gm14; pos 257313 to 257887)
acctcctcagtggcaagcacatccctcccagtcaagtaactgccttctatcctttatctgcacctttcttcacctaaacacaggacaaataattcattaaaattttcaaatgaaacccccctaccctcaatcaacttgcctttgttgtcacatatttatttatcttttgattccacatatcactaaaagctgtaaattcctctatgtttttaatcgagccattttaatcttaacttgcaattcttactttcagtgtttttccatcttgactattattgtgtttataagtgcttgttatgaatgtatttattttgttgcattgaagttgtgaaatgatattacattattgttcaataaatgaaacatgaacttgtacgaatgacaacttaagttatggaaatctttctctttgattaaatacttaaatacttaataatggaagttgcagatgctatgatatagttatttatttgaatttaacgtcaattcatttttcatatgctcacgtgttcaattagctttcttcttggttggtgccatatggagttatctgattctgtttgcaggcacttgat

SEQ ID NO: 26206 - DNA, 636 bp, Glycine max
  Intron number 2 from transcript Glyma17g03270.1 (locus Gly ma17g03270) derived from phytozome v7.0 (chr-ID Gm17; pos 2174062 to 2174697 reverse strand)
ttcttcttcacaaccccgaagctggggttagctgccttcttttctaattttgtctctcgtttgtatgtttattgttagctgaatatggcttgttggacccgtgatggcaattgcaaaatgcacttcccctagtcactaaacgcactctcccactcttttgatatgtttttccctccttcggaaataaatttcctgggacatgtttttatcaataggtgactgttctagaaattagttttcagaaatgtagatgataaataatccatgtctgatgttcctactttcccctgaaacttgattagataaagatgaataatcagtatgtatgctcttcataaactaactaaatgccccctattaattttttgatgttgctggaatcttgattcatgaggcttggactttggtgttatgtgccttaaacatgtttgagtgttttcgtatgttttacttctgaaattaaatatgcattgcttctttttatttctttccctttgtttctgatttctatcttactttcatgtttcaattgctaaactgttcgcatcgtgccatcattttattgctcacttgtaactgaaccgatttgatgtcatgaattcttgcagcttctgaagcccgctttcacaattatac

SEQ ID NO: 26207 - DNA, 568 bp, Glycine max
  Intron number 1 from transcript Glyma15g15690.1 (locus Gly ma15g15690) derived from phytozome v7.0 (chr-ID Gm15; pos 12058201 to 12058768 reverse strand)
cttgtaagtacgttttcgtggttcattttgttctggtttttttgttgcttttgtttttgctatgttgtctttgcccttttgaccttaggccttctttcaaatctgggactcattgatgactaagagggcattctcaaatttcaatctttggtttggttttagatgttaagtcaaagtatgtgtgatgggtcatagttgggtcttgttttgttgatgcttttgttagacatgttgcaattggatcaaatttcattccatttgatctgatgaacttgcattatcctttcagattggaattctctttcaagttcttagtcatccgatgtgtattatctgaagtaaattatctgggtcaatgatgagaatgtttatttatttcaattccaattgatttgtgcttggatttggctttttcttttttctgtgtgtggctcttgagtcttaatctggggtataatcctgtggttcattattgtatttgtaggatatcttctgagaatcaatgggttgcattttgctttttctaccctctttcaggtggcattgctcttgctggtggcattgagca

SEQ ID NO: 26208 - DNA, 830 bp, Glycine max
  Intron number 1 from transcript Glyma13g22920.1 (locus Gly ma13g22920) derived from phytozome v7.0 (chr-ID Gm13; pos 26395451 to 26396280)
gcatcaaggtgtgctattttcaatttcatcttgttttggatttctgcaaagtgacagttttgtgatgggcagtaggttttatttttcatagatggtacttgaaggaaaccattttcacttgtattacctttatggattaagaaactggaactgcatgccattggcaccaattgagagtaagatgacaaaattaaaatgaagttagacctaggtcattatgtggcctcttttaaattgaatttctgagcctttatagtggttcatgcaagtattttggggtcaatgaaatgctatgttggcatgtggcttgagccaatggaaagagtgttaaagatagtagaaggctatatttagtttctttcattggaataaggatgcagataagatttaattacctgttggacctggtatactatagttgatctcaattttgttttccaaatccttcttttgggtctcaaatttatgatattcttaaaagtggaaactttgcatacacatcaccacaatggtaatattacaagttaggaaacagtggtgaagaagagctggatagcttttcctcattgaacaagtatcaaataaaattcagtgcagaaattaggaagtcttgtttaaactttcagtatgttggctttaagttctcatttctctcatattttgccccctaatgaagtggtcaagtggggattacattgaaaaggttttaacttttaaaattgttttgttctgttttggactgtttaaattgcatcttaaggcccttatcctctatttatttgtattttttacttatcccttctgttgcttggagttgattcagagaaaaa

SEQ ID NO: 26209 - DNA, 663 bp, Glycine max
  Intron number 2 from transcript Glyma16g06120.1 (locus Gly ma16g06120) derived from phytozome v7.0 (chr-ID Gm16; pos 5539784 to 5540446 reverse strand)
ttatcttacctatattattttttctttctctagatgtgagataacacattagatatttgtcaaatacttttcttttattatctttatttctctttaaaagtctcaatcttttaaattttgttcttttatataataccaaactcatattatttcatatattaattatttttttaaaaaaataattttatttaaataagagagaaattatattaagttattaacatacatttagaagacattaattacaataatatattattttggaagtgtatataaatttataataaatttattgttattaattaaattaactattattattaattttgatgaattggataattagatcttataaattatatttaaaaatatttatttattacaaattttaacaataatttaatctttatatttacgaatatttatttattataaaattttaattatataaaataaacatgtattggattaggattttacttagtttatcgatgcatgcctaattaactttcttgattcttcctcctcaaggcattctcgcatttgcgctcgttaacagcttcccaattaaattctggttggactttgattcccacgtggttaatgctttggttaggtgttactctgtgtagggaaactgcgtcggtgcccgtcgcgtgtttg

SEQ ID NO: 26210 - DNA, 660 bp, Glycine max
  Intron number 1 from transcript Glyma16g24890.1 (locus Gly ma16g24890) derived from phytozome v7.0 (chr-ID Gm16; pos 28884710 to 28885369 reverse strand)
tcttcttctccttctcttcttcttccccgcgcaaggtttgtttctccttcttcttcttcttcttcttcttcttcttcttattattattattattatttcaaccctttctgattttcatcgcaaattttcatttctgattgctgatttcgtgaaaaaataaaatatcataccaatttcgattttgctttcttagagagttcggctgaaatagagattcgggtttggaattgaatttcgttttaggtttcggatatactttggattcatggattccttgtgagcctttttccccccatgtataattagtgttgtgcaaagctttttggtttcgtttcgtttcttattttcttctgcaatgaaacagaagattgtgatttggtgttaggttagaattgtgcaaagattcttctgatttcgatgtactcaaaggaggagagaatagggggcattatataaggttagggattttgcgtttgtttgatcttttttgttacctgaatttgattttctatgtgtatggttgttctaccggattttaatttctatcgattagatatgatgcataattgaaatttgtgttcaattagcccgggagcggtcttaattcatgattggctagttattcaaattttaacatatatgtatgattttgatacagct

SEQ ID NO: 26211 - DNA, 785 bp, Glycine max
  Intron number 5 from transcript Glyma13g21870.1 (locus Gly ma13g21870) derived from phytozome v7.0 (chr-ID Gm13; pos 25391958 to 25392742 reverse strand)
gccgacgcgaggtacccaaaattgttgtttaactttgtgcatgtagggatgatggtggtgcaacattatgaatcaaaataatatagataaattatttatagggatgttttcgaaccaggtgaaaaagcctattagtattagccatggctgaacatttttgtggaatagttaaattagaggaataatctgaaatagtgtctcatggaagtcaattcgattttttacactctagaataatctgcattaaccttttgggtcttttattataattttgttacacaaatactgtaggctaatatgtaatgaagtcttttgatatattgattttgcatacaacaacaacaacaaagccttatcccactaggtgattttgcatacaacaacaacaacaaagccttatcccgctaggtgattttgcattatgttctttatactacttcggttaggtgctacagtgcattataaaaggtaaatatttagtggtaataattcaaatatggaaaatgtaactttaagaggttactctgtaatgccatattctacggtaccccttgttataatgtcaagttctgtggcataccttgttaccttggtgtttgacttagatgtagctgattgtattttcaatttatgaagatagtttttttgtatttgtaattctttctgaacggtgtttttttcttattgttgaacctatattttcttttcttttcttttaccctatttgattttagttggatagatgaaataactgatatcttagcaatgcagtaaatcggacttgg

SEQ ID NO: 26212 - DNA, 883 bp, Glycine max
  Intron number 1 from transcript Glyma15g21340.1 (locus Gly ma15g21340) derived from phytozome v7.0 (chr-ID Gm15; pos 19538415 to 19539297)
agcacaacaacaccaccaccaaacattttaaagaagtttgcggatcaagttgaccaaatcctattttcttaatcttaaatcctatttttgagctacttagaggcgtttttttggaaaaatgagttgatcaaatccccttcaagaaattttaaggggattcctccttcaatttcgagcgttttgacatattatggacctcaaacggacatttctatcaaaagttacaaccgtttgaagcatacggatcaacttgatccatgaaacacttcttaaaaatcaacttatggatcaacttgatccgtaagtcttaaaaatcaactctcggatcaaataaaacctatgcggatcaacttaaataagctgggtggacaaaaatatttttaaaaatacgcaaggatatttttgtcttttcatgttaagtgttgggtgcaccagcaataatgctgggtgcacctagcaacaccctttattgttccgaaaatctcatttgttatatccttataaatagagaagtcgttttgcgtcgccctctccaaaccgtttcagcttgttccagtttcaaccgttgccacattaattatcttccaaaattgcaattgcaattcatcaaagcaaacaagcattgaaggacccagaaggttcaccaacacaaagaagcaatcttttgggtttgtttgatcttggggggccttgtttcatcgcttttggcatcagggagagaagggcagtgtagtggaattggtttttggcaaaagggtgtttttttggtaggaatttaagacaagtatcagaagtttataacatctcacgcgtacccgtggtgttttagagggtgattttggtgatggtgattttaaaccttgggagaaatgaggggcaggga

SEQ ID NO: 26213 - DNA, 608 bp, Glycine max
  Intron number 2 from transcript Glyma15g21340.1 (locus Gly ma15g21340) derived from phytozome v7.0 (chr-ID Gm15; pos 19539413 to 19540020)
agagcaagatcattgacctcaataacactgatcaggtctggttcaatgacttcctcaattattattgctttttattcatttttaatctgtttttggtatgtggttttacaaattgggagttttcaaacttgggttttgtcccaagtcatgggaaaatttcaatgggaagcatgaattaaattctcttaaatcttctgtcacaaaacaaaacttgaaattaggtggtcctataatgtaattgggttctatatccattttgttttgcaatttttgtgcaaagtttgtgttttcacaaattgggagttttcatacttgggttttgtcccaattcatgggaagagttcaatgagaagcatgaatcaaatgttccaaaatcttctggcacaaaagaagactggaaattaggtggtcctacacttttacagtgtaatagggttctatattcattttgttttgcaatttttgtgcaaattttatgtatgtatgtttgtttctttacctctctttgcttataatttatgattcaaattaatacaaaagatcagttttctcatcttcattttttcatagcagataaagagggaaatattcaccttgaagctgctgaa

SEQ ID NO: 26214 - DNA, 667 bp, Glycine max
  Intron number 2 from transcript Glyma15g08660.1 (locus Gly ma15g08660) derived from phytozome v7.0 (chr-ID Gm15; pos 6126689 to 6127355)
gaaaatcaaaagaaggcagatcaaagaaagcaaaggtataatgcacttcttgtcagtttttgtttatttatctaatccttgcaaggataaatttcagaaatgtcaatctgttgaatttaagcttatatatctccattattctcctaaaaaactgaattaatctttgagttttggtggccccttatctgaaattcttaatcatatgatatactgctaagcctttttataactactgttctcattttctataaaggataaagctgtagtaagttagttctagaccagacttagtccttgtccagaattgaaatgaccaacttctctgttgccataaattgaagagcaaagttagtttagatgccttttataaactataaggtgattcaagatttctgactgctatatgactctaaactgatgtaattattttttaaacaggactgatagaagttaaaattttatcttagtttggaatggtgatgcgtatgagacacagtaaatgttgtttgcaacaactcaattactatgttaataatttaggctgcatcaatacattatattaccaagtataagaatttattatgcatgagagccattgtaacgagaatgtttctatctctatctggccacattttgcaacagggtatcttaactcaagagaaactaa

SEQ ID NO: 26215 - DNA, 442 bp, Glycine max
  Intron number 4 from transcript Glyma13g40320.1 (locus Gly ma13g40320) derived from phytozome v7.0 (chr-ID Gm13; pos 40832209 to 40832650 reverse strand)
ggtaagagtacattgtgtggttgaagttagacatggtttgacattgtgtaacttggttcatggttgtgatatctatttcctttcttttaatagaagttcatatgcattgtatatagttttttggtttctttctatatatgctctaaattgtgctatttcttatttacattgtgtgaagaaaaattgtttgggtgttgaatttgtttttctgtggtgaaaattctctcaggatattaatcttttggaactagatttctcccctctttatttgagtgttatcttttcttgtctcatggttttcttaaatcattctcaaatccatcacatatttatcgtttactgttgcttaaacctaatttttaatgtaactttctgcttgaatgatttaatgatattgctgtttgaatcgttcagatcaaacccagtacagagtgtggaaaga

SEQ ID NO: 26216 - DNA, 649 bp, Glycine max
  Intron number 3 from transcript Glyma13g40320.1 (locus Gly ma13g40320) derived from phytozome v7.0 (chr-ID Gm13; pos 40832684 to 40833332 reverse strand)
tcgacttgatcgggcagacccgtatgttgtgttcccttcttattttagtagatggggtggagtaaattgttcagaagatttttcttccacattcagtgctgaatattttttatccttacttgacgtgctaattttgctttttgtgttctcaagggcttctgtagttgtgttagtcaaaattatttgttttttcccccaatttgttatctatgatatcctgtatttgtacaattaactgaacttatgagatgatatcatgttgcattgtggtaacttcattgttgatggtttcttttagtggcatgttgatagttgcagaggcagttaatttatgtattttattcttctatgataacatttttatgtcttctagttatgaatagagattctaattatcatcataaggcttttaattttggtagaacattttcatttcgaagacatgattatgattccctgatgaatgccggtgtttgttttcttggatgatttcttcctcttttaatctgttatattatcttgtaattgaaagaaacttcctacgcatttattgtttaccattttctttaacccatcactcaaatttgtatattttgctcttctttatgttacaggttttgtatttcagtgacacaccttttgtttccgg

SEQ ID NO: 26217 - DNA, 934 bp, Glycine max
  Intron number 1 from transcript Glyma13g06690.1 (locus Gly ma13g06690) derived from phytozome v7.0 (chr-ID Gm13; pos 6839300 to 6840233 reverse strand)
actgctttgtgagtttttccaatcatcttttttttcaatctttttacctttctgggggaactcaattttgttaatgaacaatactaacgtgcaattctttaagtgtttttagtattgttctccaatcagaattagagtttcacctcgataattctcataatagaagtaattctctttatagaagtttacattaaatgtcggcgtaaattaccgaagtgaaactcaattttgattaaaaaataataccaaaagcacctcagaaactacattggagttttgtattttgttgatttgttcaacgtttggagagatcttgatatgatttctttcaattgaatgattaatttcatgcctccatgtaatgatcttggatgcagattctatcctgtgccttgtagatattggatcctgttattctgctctgtctcattgttctctccaattgttttcaatgtgtaactggtgctgcttctgtttttgcttttttggccattgcatgtgttcaatccatgtttttatggttaatgggataataatcttcttcacatgataagatttagaagttttaagcatggcttcctgtttacaattacaatgtctgtctgccagggtgtaatttttactgcaaagcttttacactggtccatattccctagtcagtgttaattttgtcttttatctatttatttcacgtgtcagcagttttggttatattgtgaataaataatatagatagaatcatgtgcaacttgtggaattcagaggttccctgcagccatatatctgctgtggacattggatttatctattgactttataatctaatgtccataccttatatgatttcattaatatataactcttgctgcttcttttttttttaatcatatgattcagtgtttgattatttttatttttgtgacttaggttgcca

SEQ ID NO: 26218 - DNA, 883 bp, Glycine max
  Intron number 1 from transcript Glyma15g11380.1 (locus Gly ma15g11380) derived from phytozome v7.0 (chr-ID Gm15; pos 8333672 to 8334554)
actatctctacacctgctttgctcataccggcgaggtataataataataatcaataacccttctgtttccttttttgatgctgattttgttttgattaggctcttttcttttcacagaattgaatagaccttttgttttctacgtgaatttttattcacttttaggttttttaaaatgtttgtgcttttagtttgaatagggatttctcctgtgttaatcgtggtttgaatttgatattgatttagacgtgtggctgttctgttgtcgtgatactgaagtgtaggtttttggtggattgaaggttgaattattgtattgattttgtgttagctgtttttggctaaagtgattagggttttctgtagcatgaatttaggtcctttctagattttgttttaaatacctgtacttgttgatttatgcttttaggtgtaagactgttctgttatgatactaaagtgtggattttgttttaggttggatttcgtattcattcagtgttatttgtgctcgactgagttgaatttggttgtttgtccgatctagttttgcattgagctagacgatctgttgtgatattaaatgtgttcgacaaagttgaatatggttttcgtattgtctgttttaggttttttaaacacgtgtacttgttagtttgaattttgtatttagttagacgcatgaatgctctgctgtgatagtaaatgtgttcgacaaagttgaatatggttttctgtttgtctgttctaggttctttaaacacgtacttgttagtttgaattttgtattgagttagatgcacggatgttctgtcgtgatactaaactgtgagtctgtttgattgtaggtttcgtcagttaaagtgattcggaacaagcaaac

SEQ ID NO: 26219 - DNA, 691 bp, Glycine max
  Intron number 1 from transcript Glyma15g19070.1 (locus Gly ma15g19070) derived from phytozome v7.0 (chr-ID Gm15; pos 16081112 to 16081802)
atctgaccgttctttctacaaaacggtttggaaaggtacgttttattggtttttgacagcatatatctttctttttttagcaaagaatttgaaatgcaatctatgttttcatcaagtttttatgccattggggtagtttgatttaaagttctcttaattattttataattaaatttaagcttttaatctcttcctgccattcaattaaccagctttaaacttgcctttcaaagtcatgttgtgttttaagctttgtatgtatatgtaccccaagcaagattttaacttgcggacaaaataatatattgagatcatattaattttggatatccattcatttgcttgtaggagcctctcacgataaatgcagcccgatctgtgtttttcttgttcttcaggccctatacttgatatcaatctttatgctcctaactagctagcacatactcatgcatgtgtacgctattaactttcatttcactaggatattaattttatgtttaacacgtagtatacttctctcaattaagctttgtaaatataccctccattgcacaggtaataaagagaatactagtttttttctccaaacatagaattatatgatctatatatatatgatctatcttgcagcaaatagataaattacttatttatttaccttctctatatgtgtaggcactcgtcattg

SEQ ID NO: 26220 - DNA, 481 bp, Glycine max
  Intron number 1 from transcript Glyma14g32440.1 (locus Gly ma14g32440) derived from phytozome v7.0 (chr-ID Gm14; pos 39612836 to 39613316)
tgcagagaggtctttggaccagacaatatctgaacagtacagaattgtcaccaaatgaacaaaaaggaaggaaaggaaaccacgacctaaaatggtcttctccctttaattaccaaccaaaatcccgtgcgctagcgacctttttttcctcgccccgcactaaaaaaaaaaaaaacagaaaaaagaaaaagccagaaaaatcaaaagccaaaaacacataaaaaccgaaagaagaaaccatcaaaagaacccattcccaagggaagccctattgatccatgatcacgcatgtaatttttgatttgataggaaataatttgcaaagtcaagttatgacatatctatggttcggaattaggatgaaacacttacctgtgcgagattgatacactttgagtggatttcttctatttttgtcgaacccagtgtttcctctaaatggtcatttagaaacgaaatgctaacatccaagatctaattt

SEQ ID NO: 26221 - DNA, 423 bp, Glycine max
  Intron number 3 from transcript Glyma17g04250.1 (locus Gly ma17g04250) derived from phytozome v7.0 (chr-ID Gm17; pos 2831955 to 2832377 reverse strand)
tacaactagtcaaccacgtggaacagagttagcgggtgataactagaataagaattgtaccagaaaaacaaaaatacagaaaataatattcataatttaactatataatgtcaaaacttctcataaatgaatttgcttttctttgtatattatattgtttaaatcttgtatgacatgcacggaatcaacaatagtgctaagaaacctattaaataaagttaaggttgtgtttggcttgttctggataaaatcttattgttccaagtcattttttagtactaataatcggtcaggtgtttactgagtgatgaaatttcttgtttgtctagtttcccaccacttctacttattctgtggggatcaaagaagaaccagaaatggatttatatggtacggccgaagtgaaagttgaggattttagca

SEQ ID NO: 26222 - DNA, 454 bp, Glycine max
  Intron number 2 from transcript Glyma14g28370.1 (locus Gly ma14g28370) derived from phytozome v7.0 (chr-ID Gm14; pos 34802260 to 34802713 reverse strand)
gtttataatactgatcatctaaactctatatcacggtatgcctatttgtctttcaccattctttcttatgttgtttcattattgtattttgagctttagtagtttcctgctactttgttccattattcatattagtttcaattgtattttttgcttttctagaaagtaaagtttgctcatggattccttcttcaacactgcaatgcgcttcaatgccttgttaggatggaaacttattttacaattattagtttacatttgtcaaagtaatatgtatgcattaaagcatgcatcccttcgacgattatgtcttttcttcttgaaagactggcagtttatttgttcagaacataaacagtgagtatatatttacatcattctttgtcttgttaattttttttttttttgggattttgcaggccaactattataaacaactggaaaggagggtttg

SEQ ID NO: 26223 - DNA, 828 bp, Glycine max
  Intron number 1 from transcript Glyma15g27540.1 (locus Gly ma15g27540) derived from phytozome v7.0 (chr-ID Gm15; pos 29771580 to 29772407 reverse strand)
gaaacttcaccacaggtaattacttgtcaccttggtactcatcgtataggatgatgaaattcatacttgtagataggatggctcttctcatagactccattaattttgagactaacatgaagaaattggaaaacaatgacaccagagctattttgttgtcaacccagcaagaagcaaaatgcttgcatgatatttatgtgtactttttttaaccactgtaatcagagtatttggctcttccacggaatcccgagatatccatacaaactacggatgtaatcctcgatttgaatcttagtcacacttaaagctctttaccccttcctaaagatatttactaaattgagtccaagtcctctgtaacaaattcagctgcgtgttagtctatccattgggttaattctgtccatttaagtctaggcatagtagagatcaatatgtaatatcaaactttaataaaaatgaaaacgcccctgatacaactcttttcatagctgcatgttacatctgatgaacttagcctcaatttgaataatgtcagattagacctatataactgcaggaatgttgcaatacaacatgcctatcttacaatagtatcttttgaagcacagtgcacatttcacatgaatgcataaatatacgtgcacaaaagacaaatgcttgaattttcttccacaatcttaagttcttgtcactctctaggatgcaacagtagttgcccaaagatattgaatcacaagaatgttgtggtttaagtttctagctacattttggctacatttctttatttctaactttgattctgttttgtgcaggaaataggaa

SEQ ID NO: 26224 - DNA, 749 bp, Glycine max
  Intron number 1 from transcript Glyma15g42420.1 (locus Gly ma15g42420) derived from phytozome v7.0 (chr-ID Gm15; pos 49840211 to 49840959)
cgaattgtgaaattctttttacggtatattccttgtgtttcccttttttttcttgatcaaccaatttattaatggcttacacagccttacagggattatatatataggttcctttatccacatcattattgtgttagaattttgtgttggtccttgtctaattcttggattaaacttcttattagcatcaatcaattataaaattaaaatttgtggtatatcaattaatgtatattaattatttgtatcatgttgaatgacgttgtatgatttatgtagtcgaccttatttattgggataagattttgttattgttgttgatattaactatttgaacttatcacttagtgtttaaaggagatgtctattttttttggtctggtaattataaaactgtcttctcattagtcaatttcatgtggaacaagattgagtaaaaaaacctaaccgctagacaaagaggagctcttcctcgttatgttgtttgcgattccttaatattgatttcatttcctctacaagtatacccttactaacttgtgttatcaacatgtcataactttgcatcattattctattaaaatccaccatttcatgttttcattaatcaagtttaattttgatccatttcaatgaatttcatattttgatccattagttctcaagctgttctgccataatattcctagcttcacatgcatgttgtaacttccactaacatcttgtgtggttccatattatgtcagact

SEQ ID NO: 26225 - DNA, 918 bp, Glycine max
  Intron number 2 from transcript Glyma13g23050.1 (locus Gly ma13g23050) derived from phytozome v7.0 (chr-ID Gm13; pos 26508664 to 26509581 reverse strand)
cctaaagtggtgaatctcttggaactctttaccaggtttttctacagctttttttcttttcttccttcatttgtgctttttttttaatggacaaatattaattattactagtgtgttagtttttgttaacaagatgaatggcatttccttcctagtgtgtgtgagcctgtgatgacaaacaaactcagctacttgctgtcagagactgagatttgcaaaatctctgtttctcgtcatgtaacagaaaacacatgtcagcatgttgccagcacctggtggctatgttgaaattttagaataaacaaacagaaaattggaatcagcttgctttatctaatgaaacgctgacgcatgatttataaattaaaagaaactctgagaattacaactataaatgttggagtttggaacagagctcatattatcacttgtttcacactcaaagaaggcacgatgatggaaattatttctttagcacacttttgatttaacaaataacaaataaataattaacaatcagagtttggtaactttaagattttattatgaaagaaagtgcctattatacttttatatttttttatgatataaatagttatttcttattaaaattttatcagtttttatacttcaagaatcaatcctgtgatgttaatcagttttcttatatttaagcccagcaaatctgcagttggtgtaccaaaattattatacaatttgcgttagacagatagtttaactagaagggtactcgggaaaataaacttctactttttttttgtcattttatgtaagtcattgtggttaggaatttatattaggtgaacttcctagctaatggtatggtacattttaccagaagtcaactaaatttgcatatcatcttttgcaggtctttttcttcaagtgcggaaaaaa

SEQ ID NO: 26226 - DNA, 818 bp, Glycine max
  Intron number 1 from transcript Glyma17g05020.1 (locus Gly ma17g05020) derived from phytozome v7.0 (chr-ID Gm17; pos 3375122 to 3375939)
agactcgatcggtaatgcccttctattcttctttccactgttttgaaactgttgttgtagtttgctgtctgcttggggttctctttgattttctcatgtgatttgatctttctgtgttgtagaatttagaaaatatttgtggatacttttaaaagtattatcaatacacttgtttcttgttcatattcatatataccatgttttggtgcatttattgtcctatttatgcaccattgtcaaagctggctacttggcttttgttttgaatgcttttagaagagacttgaccagctggtcatccagtgtgttggattcttgcatgatgatagacttaaacgtgtgtttcgaacttccttgctttcgttgttttatgatataaaaattagtttgggtaaagtagaaagaactacttaacttggtagcctcattccatgttttgatgaagttctaatcctgtttctagtttaatattcttatgtatgttttttgcctttctgaaatgcttcagaatgaaatctttatgcctctgcatttgatcatctatgtggatgcttcataattccttcttaccttaaattggtatatgttatttatctagctttgaaagtgggttgtctcttgcttttcatcatgctttagatccttggatatgagttatcatcctttgtaatctaatatgcatactaagcttggaacatcccatttgagaaatttaatttgcaaaattgaatgtgttattgaagttgcagtgtttatcatgcctttcttgtatttaaaatatttaacttctgcgtttttttattccacagaacttttac

SEQ ID NO: 26227 - DNA, 914 bp, Glycine max
  Intron number 3 from transcript Glyma15g10210.1 (locus Gly ma15g10210) derived from phytozome v7.0 (chr-ID Gm15; pos 7419248 to 7420161 reverse strand)
tttgtctgggagggaaacccttgttcgcatcactggtatgagttattctcttctcatcgcaagacctagtaaattatcggctaattccaaaaaaaatatgttggttattgtttatctgcttaattttttcccccgccttttagtaaaatttcacatttttttatattattgaaattgaaatagtccatattgtggtttcagtggattttattggctgagagtgaatatatgtgttttttaatcccctataggtttttctcttctttttgacgtatatcttttttgtgagatccttatgttggcacttaggtatttccataccccacaattgaggtagcttagtgtatgtatggtttcacattggagaagatttcaaaattgattatggatccagaatgttgaagcaactttgagtagcttttgcgttgtatcaaaaaatttataccaagttttattcctaacttgattttgtaatgaaaacatccaaacataaatcacttcacttcaaaatcatcaattttgtcaaccctcatccaaacatgcacttagtgttctgttttgcatattcttaatatttttggagttttctattcatataacttcgtatctatttgtatatcaccaagctaacattcttctccaataaattaattttggttgaatctttttttagaatggatacaggaaaactggggattcatttgtatatcaccatgctaacatttttctccaataaattaattttggttgaatctttctttagaacggatactagaaaactggggattcatttgtatataacctagctaacatggttcaccaataaatgaatttgggttgagtctttcttttttagtggataccggaaaactgctgtaatttacttatgtctttgttttctatcttcaggtggg

SEQ ID NO: 26228 - DNA, 729 bp, Glycine max
  Intron number 3 from transcript Glyma16g09330.1 (locus Gly ma16g09330) derived from phytozome v7.0 (chr-ID Gm16; pos 9162379 to 9163107 reverse strand)
caacacataccgtcgaaccttcacaacaaaagttggtaaagtttcattgtgctagtatatttgccttttggttttgtcatttgatgtacccaacctgccatcaaatagataagggggaggtggatattttataatgagaaaatgagttgaagtttagtgtagcccattcatattttgtaacctgtctgtaactcagctgtctaggtctttttgttttattgtcataatcatcttgcctataagctagtttttatctagttccaaagtttgatagtgataacattcagaggtaatttattttttcgtctgggatacatttgcattagtgatttgttttttgtatccatgcatcagaaaagacctggacatgtaatgtgttttcgggaatgtttcttctgtctttgggtgtattagaagttattactgtcataaaaaaatgataattatgttgcttgagacttcattccttgggaagcaacagtttatatgatgttgttaagaaacagcctcctgtcatttcaaatttaaaagcaaaaacatggatatttatgacagttcgaattacaaccaaaatccatttgaattgaagagttgctttaatcaatatatgtgatgtttcctcttcaatatccaattaaaatcggatcagttcatattatgaattctagtctcagtaatggatttttggttgcagggaaaaaggtaagcaaagctccaaagattcagcga

SEQ ID NO: 26229 - DNA, 993 bp, Glycine max
  Intron number 1 from transcript Glyma16g06650.1 (locus Gly ma16g06650) derived from phytozome v7.0 (chr-ID Gm16; pos 5964674 to 5965666 reverse strand)
ccgtatcctaatcctaacccacttcgttgattacggtaagtccttattgatcagaagctattaacaattccacatgtattagttgagtagttagttcatcttcgttggttgccttcgaaaaaatccatcaatgtcttaataatattaataataattcttttgtgaatgccatgacatgacccgtaaatgctactattgccaccaaaatattgtataattattctcacattgcacgtggcaaggttcgttctttgcaatttttctatgttctcaaaggctttttttttttttgtgggcaaagttttgtgtttcacttttatttgcttttcggttccaatctatgtttgggtcgaattgtaatcaatttgagtcttggttgatgccttgtataatatgtatagcgggctgtatcttctttgggatttattggacatgcctagttgcccgccacccttttgatgaaatgcttgaactttccagaaatgaactagtgtgtgatatgttggaggttgaatttgtgatgctagacccgttggttttcttgtttacatctgaagtaatttaacaaaaacatgagagattttttggttattattatattgatgatggtgttaccggctgagttttggatacatggctgtctatatctgtgtttttaaaagtgcaaggttaccgtcatactatgtgtgttttgagacctgaacctgaaatcaaaccagtaaggcctcaaggttgttgctggattggtttaactttaaccataggttacacaaggcttttggcttcgaatttggttcttataaaattactaacaatgtaatatgtgaaattacacatcccaagaagatccattgccattcttattcttaagaagcctaagcagagtgtttattttttgaaaaaaaatgaaatttgttggtttgatattgatatggtaaattgttttggctcttgacagttagaaaagaagtggctgtgaatccgaatccaaat

SEQ ID NO: 26230 - DNA, 853 bp, Glycine max
  Intron number 1 from transcript Glyma16g09430.1 (locus Gly ma16g09430) derived from phytozome v7.0 (chr-ID Gm16; pos 9301998 to 9302850)
attacccttgtaagttacttgttacttgttattgttactaggagagaattctgatgtgtattttgtatagctggcgttattgttttttgagaaattgaaacaaaagattgtctgtaacaaaaagagtagaaaaaatgagctcccattattaaatcccgtgtaacccactctcttagatgatattagagcccatcgggctgctatccaccacccgtagatgtctagtcctgtcaaacttgctctagatgtccagtactccgcgtgaggagtgtgtgttggaggtcgtgcattgtctagaaatatggcctaataagtttatataagcggtggataactatcatcttataattcggttttgtaggattgagttagacccataacccactttctaagagtaacacaaatctcttctatgttatggtttattttttcattgacccaatagtgtccatacacttttttgatttgaaggtacttttaatagatttctccttttcttttgttacattttctttttggtttttctctcaagtggctcataagtatcttttctttcaggggcttctaatgttaatgtatgatataagtttctagtggttatgtttatttcccagtggagggaaagaaggaggctatgcatgccagccatgtagattttcttgctgaagataactgattatatatatgtgtgtgttagtttttacacaattatgtgcagcatgcagtttttcttttttctgaaaatatttattgttcttggatctttgcatgacacgtagtgaatcctagtgtgtgatgttgtaacgattgcatattaagtttatttgtataaatttgtatccagttggaagac

SEQ ID NO: 26231 - DNA, 526 bp, Glycine max
  Intron number 1 from transcript Glyma15g11040.1 (locus Gly ma15g11040) derived from phytozome v7.0 (chr-ID Gm15; pos 8072023 to 8072548 reverse strand)
gccgcgtctttgatactgacggtacgtactcttactctgctccattttaattacatgcggggtactgtaaattttaattttttctccttccatttttttactatactcttccctactttactcatcccctgctttaacccctctgtttctaagcaaacaaaacatctttcattccctccataatccatatcatatatgcacatattattcctgtatatccattttagactaagccactttggtttttttttttttctctctcccttagtagattctcctagttttctaataagtaaaggaaattatcaaatacaaaatttaattgtgttacaattacaaaacaaaatttgactagtcacttgtgtacttatccatttggtgatggattaaaatttgaaaaccatcctgtggtaacaaattgtttataaattaatgggagcatgaggtggattggattacgcaaagtgaattaaaaagatgaatggtttggtcaactttgcaggtatagttttaaaagaagaaaaaa

SEQ ID NO: 26232 - DNA, 754 bp, Glycine max
  Intron number 2 from transcript Glyma13g30410.1 (locus Gly ma13g30410) derived from phytozome v7.0 (chr-ID Gm13; pos 33052763 to 33053516)
tgccttacccaggtattgccaactttctgaattcatatattaacattgttcccagattcaatatttatgaaagggaaaaaacaacgaaactttgatgtgatttcttaattatttttttgtactatttttcagttactattagtgttattaaaggtcagcataagttggcgtgaaattgtagttttgatcaaagtacaactttgaaataattacattttatgttttgaacaatatggaaacatatttgagcactagtttatataggtaacattgaaatatagctttcatatgttgtatctccatttttccacaaaaaaaataacttgaaatagattaatagtatgtttggattcacggtaagaataaaatctggtgatatcatcacaaaagtaattatttgttgcttcagaaaatcatggcaagttcaactcagcttgttaccaaacattcactaaccaagtgaattttggaagtgcttgataaatgggatttggcaataattcttcaatttgattctgtggaagagaccaaccacttttgtttccagatttcacgttgaatagcacaattgagaaacatgtttaaccttttactctcttgtatatcagcctactcatgtttgtttgtttttttttggtccctctattattcttatgccaaactgtgagggaacatgactaataaaactcttctagaaagtgtttgataaatgactttttgtaaatatcacagcgatatttctggtgtaggttcg

SEQ ID NO: 26233 - DNA, 689 bp, Glycine max
  Intron number 2 from transcript Glyma14g05440.1 (locus Gly ma14g05440) derived from phytozome v7.0 (chr-ID Gm14; pos 3882741 to 3883429)
ccaatactagatacaacaacagtagaaattcttaattattcctacaacattgtttgataaactctgtcatgttcaaaattagaatttaactaatggtaccctaaacttttttttggaactttgcttgtagtccctattctaaatttgattatccaaccttcttaaactttttttattctcaaattacacgtagttatctcattagattaagtgaaaatgatgttgcaagtcattatgtttgtaataatgttgttacgttatcaattaatgatattacttaatcacaataactaaaagtgataatgaaaaaaataatcaaaaatcaatgaatttgaccaaccaaaatttaaattagggattgaaaatataaaaaaaatagtgacaaaagatagtaaatccttaaataatgtaattacctttaaatttgatcctctataaatataaaattagattaacaagtattttgtgcattgctcaaatattttttttggattgaagtataaaattgtaaataatttaattagatttgggagaaaagaggaagttttgaacaaaaaataatttcagactacaagcttatttaaaagttgctataaaaattatagtatttaagaattggtgtagtatgtacatgtcaatttttggtgaattttttttctcttcatgcaccttgctagggacaaccttac

SEQ ID NO: 26234 - DNA, 877 bp, Glycine max
  Intron number 1 from transcript Glyma13g29630.1 (locus Gly ma13g29630) derived from phytozome v7.0 (chr-ID Gm13; pos 32503474 to 32504350)
gttgttgttggtgaccagtcttctggaaaatccaggtaacattttgtttgatttttttacttgttatgcaaatgcagtaatacatataaatatgcagtggtgtaaaattattttccaatataaactaatcacaaatcatgatatgtacggcttttaagtaggtttttttacaagtcgatgaattttttatgtataaaaaagatgaattttttatgtataaaaaaatttaatgataatgtaaaaaatttcttgctctggtttcaattactcccttcaatctcaatgataaacaaacaaaatatatatttcacagttttgaaaaagagtagtgaatttattatgtataaatttttttaatgataatgtaaaaaattttcttgctatggtttcaaatataaataataaaaatctcaaattttttattttaaatataaacaaattacttatatcttatttattgagactcttcaaaatacttttcatttaataagatgaaaagcttttttatacttaatatcaaattttaataagaaataacttagaaaaaatatttattttttaattgaaaataacacacttgaaattaattactttttttcaaaactgtgaaatatatattttgtttgcttataattgagattgaagggagtaattgcattttttttttcttaacactatatgacacttaatcctctatgactatgagacaagattcttgtaaaatactagtgtgtgaatctaaaagacctatacctcaaaataaattaattaaatagtgaatcaaagttaattaaataatccactaaacttcattgatgtaattgtttcattttccaaaacagtgtcctagaatctctggctggaatcagcttacccc

SEQ ID NO: 26235 - DNA, 545 bp, Glycine max
  Intron number 1 from transcript Glyma14g35020.1 (locus Gly ma14g35020) derived from phytozome v7.0 (chr-ID Gm14; pos 43716516 to 43717060)
cggggctacccaactctttttcaaccatttatgtacagttttaattttattccttttcttacatgacttacttctcatgcttatgtatgatatatgatatgattctagtgcttcctaattcatcttctttgcttttcttttctttgattattatatatcatatcatactattttgttttgttcgtcagatataattgtttttgtacaactattttcatgtatgcaaacatgataccaaccaaggttttggagatttgattacttagtaataaaaaacatcattgtagactataggatccttgattatatcaattagagttgtgtatattataatttggtaactttgtctgttattttttagttgtttgattacggtttcttctttttttcttctctatttaaataattggatttcctttttcatagtttcatgagaaaagtgaagttcatcccttcagcttcatgatgatgatatcaaagtaagtaagtaagtaattatctgtgttgcagatccgttgtcacttgtgagggatcacaaagcaaag

SEQ ID NO: 26236 - DNA, 723 bp, Glycine max
  Intron number 2 from transcript Glyma13g05140.1 (locus Gly ma13g05140) derived from phytozome v7.0 (chr-ID Gm13; pos 5396921 to 5397643)
tagtggacgtaattggggagaagttgatctaagttggtgaaaattacttgaactgacttatgtgttgtgactgatattctccgcatgttgcgtcatgtcacgtgtatctcaaacatctctctttgtcatccttactagctaaagattttgtaaatttagtgtctggggaaaaaagttagtttgacattaagttctgtttgatatagcatcactcataaggaaatggtatgtaatattttcagcaaagggtagaggtttacattttcaaacaaattcagttaatgtcatccagtttgttcttggagagcattggtttttcttgatagtgcaggatgatttccatatatgaagaaaggctgtgcacttatgtgctgctacgtttttctctccccaattgcttcttttcttttgtcatgctcgtaagtgtcagatgcattattttagtcaccactacctcctctttggtaatcacattatgtgcaattttaactgaaaaaactttgttaagataggaaaatgttttttgtttttgtgtgtgtgtgtgtgtttgggtggtggtggttgacttctcaaagaggaactttatctcattcttgttttcttcttttgcaatcaaagcatttttcttatggtggagcttgcttgataaaatttgacttgactacttctatagttatactagtagagtagatgttcttatgttttatttctatttcaggaaat

SEQ ID NO: 26237 - DNA, 867 bp, Glycine max
  Intron number 1 from transcript Glyma15g12690.1 (locus Gly ma15g12690) derived from phytozome v7.0 (chr-ID Gm15; pos 9388256 to 9389122)
attcacaaatcacaacatatccattggtgagttccaacttctttcatgtgtttctttgcttttagcttccctgagggatatactatcatatatctcagtatatcctttttcttttgattttttgtttagttgaagttggatcagtgtgccaaaatgctaaacacacttcacttgtgattgggatcgggatctttctcttatatccactattctttgttttatttaatgtggatttagtgatttactgaggaatacacccttcattcttcctcacttgcttacttctcattcggttcaatgatctattggtttttgtagtcggtacttccccttctttgctttccgaatgcttttgtgattattactatagcaaatttggaatatttagttacttggaaaagctaaaaaaaactcaacttttggtatgggtaagtaagtaaagtaactgagtattttccttgcactataagctcccttctctagcagaatcctattttattctcttctcttgtttggttcatttttcgttatgcttgcattgaataattttgctgcataaatctaattaacagaaagggaaaagttccatttttttcaaccattccttttttcttttcttttttccaatttggggtggaagaagaaatgagacttccatgttttgtctttccacttggcgttgataactcgcaattctttgtaaaggggaagtgttttcctccattcatcatacacacttggcatccttgcttttgttttgttttgttttgtttgtttccgacatgaacggtgaatatttcaactgtttttttttgtagtgtggtataccatgtttgactattagtttaacttgttagaaggagtata

SEQ ID NO: 26238 - DNA, 426 bp, Glycine max
  Intron number 1 from transcript Glyma13g42650.1 (locus Gly ma13g42650) derived from phytozome v7.0 (chr-ID Gm13; pos 42573287 to 42573712 reverse strand)
ggtacgtctctttcatttccctcattcatgcatgcattttctatgtaaatatactcatcaaagccttctattgtaactcctttttcttccttttttttttttttgtaatttccgtttattacaattgcatcaaatattaatggtgttagtggctagctataacggataacgatgttttcagttgtttatttataaatgtttttcaagttaagattaatttgttattaattgatgttggtttgatttgattaatcttggccatttgagccgtaacatggcaaaattattagatcgttattgtttatacgtgaaagtaaaatgctgaggtgaaaactaatttaatatgtgcttgaaaattttactacaagttttgtgcttctaatttgcgtcccaactaagattgagtatgtgtttatccagcgaaca

SEQ ID NO: 26239 - DNA, 644 bp, Glycine max
  Intron number 1 from transcript Glyma13g29560.1 (locus Gly ma13g29560) derived from phytozome v7.0 (chr-ID Gm13; pos 32455377 to 32456020 reverse strand)
ctttcattgagatcattcaggtatatgcctttataaaacccgttgtttattctgaatataaaaaacattctttttgtgtattcattagtggagacaatcttattcgaactaaataagactattatatgcgaaaaactctcattctgaatattcaacacaactacgtataaaaacaataagaagctcttgggcttatactcgatactcgataggctgtttttttcataaaataaattctagtgcttatacaaccatttcttatcaccatgacaaggcactaaaagcaagcaaaagtgtatgtaaacacagagggattgagatttattggttcgaatcttttggaccatatatctcccatgtttgattatgatacaactcagtccacacttttctatatattgggcctacccttcacatcacatttcaatatggtgttagtgccattaaaatctttgaataatacagacttataatggaaacaacttctagatggattcaacatctttttaatttttataatcgggaagaacaacaggacgtgtttcaatttgaatttgaaatgaattaagtaaattgaagtttaaagtaggaaggttttggaggatcatattgctttggtcaagctgtttgttctagtctttgct

SEQ ID NO: 26240 - DNA, 857 bp, Glycine max
  Intron number 1 from transcript Glyma13g28730.1 (locus Gly ma13g28730) derived from phytozome v7.0 (chr-ID Gm13; pos 31721674 to 31722530 reverse strand)
tcctcagtctcacctccccagcagggttaactcaggtctgcctcctaatgttccaactttccttctcatgccctctttgattctatgatggcttacttgccttggctttaattgtcctcaattgccccttttctctacttgttcttggtttttctggccatgtttttcaatccaagttgttggctgctttgatctggttcatctgaggctgtgcttgtactggtgctgccagtgaagtgatttgataagtagtggatgtgttttagctacacttaattggattttgttcctactaatggctcctagtaacatctttggggatctgtccttgcctttgggtgtgataagtacatcacattgtttcataaagttttccattttttttttgacaattctgggatgcaaggcagatgcagcgtctaattcaattgctgcattttctgtagattgttcaatgtggtagtctagtagataattataaccttgatgatttgtacagaatgcccttatctaatgaaacatttggttcattcagaagatagttactgaaaatttggcaatccaggcctgctatttttgctgccggacaattggattgttaaaacttcttgaatcacattctaactgacagcaggatgtgatatatgatttaacattgaaaatcttgtcatcaagcaatttaaaccaacatagctcaagctgtgtttaagtactacatgtaattataaatttagcagtatcaacgtcgtgatatcaccttctgtacatattttattctctagttttatcagatatgtttctctgtagctgtaactccttatctttcattatccatttagataaatcaaaatcacgaa

SEQ ID NO: 26241 - DNA, 610 bp, Glycine max
  Intron number 3 from transcript Glyma15g40750.1 (locus Gly ma15g40750) derived from phytozome v7.0 (chr-ID Gm15; pos 47731429 to 47732038)
agtcgacagttgtgaaagcaatatcaggagtccaggtattcctttgtctttttctcttctgttcgggagtagggatgagggtgttagtgtgtagctatatattggatatatgtaatcccttgaacatggggttctggaattttgtttttaccaggaacatatttaaatatagattattgatgtgatttatttaatatgaaaagaaagtatttactcaatatcttaactcttaaggttattgctatatatatatatatatatatatgtgcagcttgtggctagtgggtttgtttcaatatgtatatatcaatatatgtatacatgtatattttagtttgtcatggataaattgtatatctatattggggacttaggttctcttgattaactctggttgattgaagccttcttctgagaagaggtcatcttttcctagaggctacatagtagtttgacaacattagattttttcatcttcattttgaaaaaaaggattacacgtaagcatgccatatattattcttcatacacattctccgttagccttggatatttaaactgttgacctctgttgttttcatgaatgttgtgcagactgtgcgtttcaaaa

SEQ ID NO: 26242 - DNA, 864 bp, Glycine max
  Intron number 4 from transcript Glyma16g18420.1 (locus Gly ma16g18420) derived from phytozome v7.0 (chr-ID Gm16; pos 20225277 to 20226140)
acaggaaaattcgactgaataacccattattccaggtaaggcatattgttctaaacaaaacaattttgttggcaacagttttagttagaaaagttaaagcttcagggtagacacattcttgaagattcattcagaactttatctgatagagtcaagtccttcactcagcgaacatgaactttgtacgatttgttctcctgcattggattcattttgaattggtgcttgaaaattttattttcatattttattcactatgatcctttgagaaatgaaccaatctcattaaggtgaggacataaaaaaattgttggatactatacaagccagttttattctacatctaatgctaaaattagtctaggatttccaaatttttgtagccaaaaaggaaacatgttttgaaagttttaatcagtagtgcaaaaattgagagctaccaaaacttataagtgagtttttgttggccgtactttttctagagtctttgttatcgctggaattgtattagccttttcaacaacgtccaatgtaaaatctttatctacagaacaaaatgtgcttaaagaagagttcgataagtattaaataacatcaaggattcaggagttttacatagccctgaatatatttttagaatttaattaaaaagctctgataatataaaaatttttatactattattcaattataaattgtcatatatgataaaaaaatattttttataataattattttaaaatttatatctaagctaatttctaattcaataacggcgtaacaatatttacattaaactcatttttatcggtacatttttttctacatgtatgtttttttaacaggatagagttggaagtttaa

SEQ ID NO: 26243 - DNA, 897 bp, Glycine max
  Intron number 1 from transcript Glyma16g23230.1 (locus Gly ma16g23230) derived from phytozome v7.0 (chr-ID Gm16; pos 26959152 to 26960048 reverse strand)
acgttgatcaggccactctcttcgatctcattctggtgagggttttccttcgatgtttcttttttggctgtttttttatggtttgggttttggattgggggttcgggtttttgcgattgggggtttcggtgtttgttagggttatgtggcttgaaggtttggtttggattcgattattattatgtgatgttttttttttcttgaaatttggaattttcttttgatgttgttttattaatacgttggtcttatgatattgttagtgagtaacgttgttgtgctgttgtatttgtgtgatatggattgaaaaattgattcttaaatttagttttctggttcttttggtatacaagaccttcttctaaagtaaacaaagagcattattgttttattgatatagtggtttttaaactctagtaaatttgaggatatgtatgcatacccttgtgtttaggcaaaattgcatcagaaaaatattattcataattgattatagcatgttttatgtagtttctgaaaatcgtggttacattctcatgataatggtttttctttggtctgtggttgtctctgcccatgggaatggatactattctctctagtgaaaatcactaccctcaaaaccctatgctcttttttttcttccttgtttttaatgtagtgttgattattatttagatctgtctcttgattttttaagatttcaggggatccaaactcctctgcttatgattgtgtcttatagtcttttttccaatgtgttaaccattgtagacttttgtctgcctgtgtttgcatatttttaatcttaggtttactctttattatgtcaattaacactctttcaaaatttcctatacaggctgcaaactacttgaacatcaagagccttttgga

SEQ ID NO: 26244 - DNA, 619 bp, Glycine max
  Intron number 2 from transcript Glyma16g26470.1 (locus Gly ma16g26470) derived from phytozome v7.0 (chr-ID Gm16; pos 30594670 to 30595288)
gtgtgttttctccagcaatttcaagtaagatacttttgtaattgaaaattaggagcgtgtcgatctttttagcaaatcattttagagtaatcctagtgttcaattcaaatactttgttcaatttacccatactcctctatgttttcttgaatgaattagaagttgaactagaaattaaatttagaatttttcatgtatgttaatgttataatctcattgaagagctttcaatagatcattttaatttatttattttttgcattgtttgctatatatatatatatatagtttgagggtgtctggatcctgggtatttaatgcaagaagttaacctctcaacctgttgattttgtgaaaatttgtgaaagaactaaaagctaatctagtaaaattgatttaggaaatttccactcatgctgaatgtttcaccattgtctttagtagaataatacacaacttctttagtttgtttattgttgctgaaccaaattaaaactcaagtaataacatcaatttttgaactttttacaaaagaattctcttgcttctaatgagaaattgtcacctgcccacttaccctacagttctagcagcagtatcaggagttcgagttaccaaa

SEQ ID NO: 26245 - DNA, 502 bp, Glycine max
  Intron number 2 from transcript Glyma14g04420.1 (locus Gly ma14g04420) derived from phytozome v7.0 (chr-ID Gm14; pos 2987336 to 2987837 reverse strand)
gcagaaaggaagtttggaaaatcatttattcagaagtaagtagtacattcactcttcaacaatcaacatatttagtctcaaatgatccactgagtactaatggacaaatgagtggaaatagggcaggccagacttgcctatggtaggcctgagcccgatctggtttataattacaaagtctgtttgacttgtaagcctaaaagtccttcagaaaaatcaattttaataataatgattttatatttttattaggtgcaaattgtagtatatgtataatgtattatgtattatttttataaatagacagacttatgaggcttaataggtttttttaagtcctgaaacttgatcttttcactagaacaaactttttataaagtttaagtctaaccttttaatatacgggacaggcttgacacatgccctgaaccataatttcttctttattcacaatacctcaaattttgttttctattactgcagaaggtgttcaacctattcc

SEQ ID NO: 26246 - DNA, 641 bp, Glycine max
  Intron number 1 from transcript Glyma15g40100.1 (locus Gly ma15g40100) derived from phytozome v7.0 (chr-ID Gm15; pos 47053457 to 47054097 reverse strand)
aagactgacgccgtcttctcggcctctgaaaacaggttcgtagtttgaagtttgaacccttctttgctctgttcgaatccctttattgaaccctcatgtgctctgttcaaacccctgaacccttacgtgctctaatgagatcatgaagagataacagaatctgtgtgcaactattatcccgtttattagcatgtaatcatgtaaatagtctagacgttatcttaggagttttatttggagaatcaagttgtatagctcaatcttaggagattttgttgtaactttcttgtatatatttatgccttagcaaaaatgaaattcagaatagaattattctgtcatagaatcctttagaattcctttgttgagttgaacacttctttttttctcactgtctgtgcgtttattggtttgggagtctcattaattatctttcccttggttattttgttttggccgtctgattgttagatgtatattttattttttttatacgaaacaccacttatttcctgttattttacaactaacacttgttttatttaggttataatttcaataggaattcagatcttataatcctcagtttgatcctatgaaggacagacacttgaagaaaagaatcaaaagattgaaagaca

SEQ ID NO: 26247 - DNA, 924 bp, Glycine max
  Intron number 2 from transcript Glyma13g21330.1 (locus Gly ma13g21330) derived from phytozome v7.0 (chr-ID Gm13; pos 24807975 to 24808898 reverse strand)
tcatatccaaggaaaagcagaagctcgaggaagaggtaggttaaatatatacgatagtgtgattatatatagatactcatatatgtacatgctattaattaacgactattatttttctccatttctctttcttattatatcatataattgttgataagttaagagctgatatggctcatatctcctttcccagaggtttctagttctctagctttttaacttcaccaaaaaaaaaatatggcatatcatatctgtatttctctgtcttctgttactttttctcagctaattgtccactgattatttttacatacaatatgtatatcaatcccaaattttgaacttttgagatcagagcaaacacccatttgtcactcttctgatttatcatgttatcatatcatcgatagtatcagacaaatgataaatttgatatatatgagtaatgatacttgaatatcctattattttaaacactcttctaatattttttatttctctttttctttctaccacatattcacatcatattattttttttcttttttctctatttctcactaggtgttgaatatatagtattgtgggtgtccatgcattttttttctcacggtataatatgacaaaaaggaagaagtagaaagaaatgatgaatgccatgagtagtttcactcggtgggatgtccaaaaatgagacctatatgtatatatagttatttacacacacacacactctccatgcagctcttgcaagatgcaaacacatagacaaactttatcttagtttttgcttttatatgtatgtttttgctttcaaaatcctcaaacactgttttctttttgcttgtattggcgtaacgattgatgctttggtgaagtagacattcattctttcaaactggtcattttccttgtgtgcaggta

SEQ ID NO: 26248 - DNA, 882 bp, Glycine max
  Intron number 1 from transcript Glyma16g04030.1 (locus Gly ma16g04030) derived from phytozome v7.0 (chr-ID Gm16; pos 3389205 to 3390086)
gagaaactgtaagtttccatatttcttctattgattagtttatccttgaaaattatgttaacattgtcaaatggatcaaaattatgttaaaaagaaaataaaattgattgctaactaggaatcatacctaggggtgtaaataagctgagtagttcatgaactatttgagctcgactcattaagttcttaatcaagctcaagcttaactttaagctcaattatatgaatgagttaagctcaaccttgataggtttgatattaaaagcccatgaaaactcaagtgtatatatgtaatggtagaaaaatgttaattttatataaaaaagacatatacttggtaaattgtacttgtattaaaaattataattacataatttatgttcaaacattattttattctctgtctcttacatttatctcatttactaacatgaaaatgtctattaattactgaattaataaacttcaaaaacacttcaagaatatatttgatatataagaaaaaataatcaaactataaataagctaaataacaagcttaagcttcatatttttccaacaagtcaagtccaagctttaaatttggcttgtttaaataattgagtcaagcttgagcatcatattttcccatactaacggaaggactaatctgttctaaaagagacacttaaaggaccaaagtgaaactttttaaacttaagggaccaaactgaaaccaaaaatgtagctgagggaccaaaattctattttagcttacattgttttaggatgtaaacaattattaattattaatttatgcacgaagaattctgcttttattcatttgaaaattcaagctgttgtttttcttattgcagattgtgtacacaactgtttgcttgg

SEQ ID NO: 26249 - DNA, 949 bp, Glycine max
  Intron number 2 from transcript Glyma13g26740.1 (locus Gly ma13g26740) derived from phytozome v7.0 (chr-ID Gm13; pos 29942359 to 29943307)
aggttagtttcgatttatatcaaattcgaagaatttagtttgaactttgaagtgatatgttcgttcaatttagttaccatagtgacattcatatatgatatgggaataagaagaataaatattgagttattgactgttagatattattattatgaatgattaagattaaggatgcaattggatgaacatattaattaagcacttattacatgataagcaagtacatatgtataggtcctgtttggacgaacttcccaacaagcacttaaaggataagaagataaaaagatgaaatgaattatacttctcccttaagttagaattagcttaaaatcagcttttggggaagttaaatgagagaacttctaattgcattagctaattttaacttatgggagaagcttttttgcatttcaccttcttatttttttgtcctgtaagtgcttgttgagtcatttatccaaattgggactatgttgcttttataatcgaatagtgaacatggttaaactattttcacacaccttgtaagttattttcataagttatcctacagaacatatcgaattttgctgaaaactgcttatggacttatcatattcattagatattttcactggctctttcaaacacttacacaagtgtttatgtcataagtctaagtaatctgtaagtagatcttccaaacaaaccataaaacacacaggtcatatgagtttttaagaggtcatgtgactttttgaagggacctatattatgtgattttaaaaagcttataatcttgacatccatgaatggttgtatggcctagatttgttcctatcatttaaaaatggctttgtcactagctatatatattgtatacctgtctgttttatgtaaacattagcaaaaagatgcaagggattccgatgagtgacttttgggttaaatgttgcagggaaaactt

SEQ ID NO: 26250 - DNA, 1010 bp, Glycine max
  Intron number 1 from transcript Glyma14g39080.1 (locus Gly ma14g39080) derived from phytozome v7.0 (chr-ID Gm14; pos 48209714 to 48210723 reverse strand)
tgatctctataagtgtgaaccgtgggacttgccaggtaactaattagatgcttactcacacacgtaacatttttattatatatgttgtgcatggatatttatcttgtagtactgttttatttttctggctagtaacgtttttcttggagaaatcattagttgaaaatttacgaaaggtcgcatggctgcgtctatattatagttgattttaaaattcgatcttattctaattaacacaccaggcaccagcaccatattatatgtaaaatttattttgttgactttagtcttgaacattgacgatatggaaatcccatgatgacaagcaaattttaacatcatcaagagaagtttctataagaaatctcttttttttttttttttgcttatttgtaaatcactattccttaatgatttggtacagcttattagaactccaaaatactatatctttaaaaagtgggcacgcgattttgcttccgatctttattcagtgatgatgaaacacatacttgctttcttggtcaagtatattttcctgctttaatttatcataaaatatctaatgtgatatatggtggaaaggactgtacttaggacttctaaagaggatggtcccttcaccttttagggttcctattgtgaccgtcaagattagtaataatgagacaatagtagattcccaagtcaaaaagcgtatgataaagaaaaggattgcattgtacgcgacataatacatttatacacgactcccatgcaatatactttgcgtttcttattctcccattgccatttgctttatcaccttaccaattttgacgtgaaaattatgaaatatggaagaaaaaaaatcaatattaaaaatattcaattttttctgctttcgcttggatatgtatgataatttacttcatgttcttgtgaaaatattgaagttatttttgaatatttaaccttttttttaataaatgacagggaaatcattgttgccgggaaaggatttggagtgg

SEQ ID NO: 26251 - DNA, 856 bp, Glycine max
  Intron number 1 from transcript Glyma14g37130.1 (locus Gly ma14g37130) derived from phytozome v7.0 (chr-ID Gm14; pos 46426960 to 46427815)
cacaggtttgtataattacacaatacacctaattaaatttttttggcaatactatagttttagagattttcatgaccgcattcacaactataatttaaaacctcaagtaatgtatccaatagcaaaatttagacacagtttcttaattttctttacactatttttctattaaacttgaaattttattttaatatataatctatattatgaacatttattatgcacattatgtatatatataaggtggaattttatttctagctgattgaagaataataatagagaaagtttacgatatactttctaaatttcaaaggttttgtcaatatctctcactttcttagtgtatcaaaactaattcaacaactattaacaaaagaaaaaaaaattgtgccaaatctttaaacctatgagtacgcaacgtaacaactctcacaataaagttaacgatgttagatatttagacacccacaacttataaatacttcatcaacatatttctctctttctatcatatagtaaccatataaataacttaattttttttttttttttatatatatctctctaatcaagatctaaacactttgtatacaagaatcattttgccagtattaaaaacacttaaaacaaatgtatctaagtgttgttgtatataaaattaattcttaagattattaatgctattgtttgtataaccacgtacattcacaattacaatctagagctctatgttatatagaactcagaaattttaatataattaattatgtactactatatatttttgctccccttgttaaacgttttatggagtacaggttcctctacccgggactagtgtggagattccaga

SEQ ID NO: 26252 - DNA, 663 bp, Glycine max
  Intron number 1 from transcript Glyma14g03530.1 (locus Gly ma14g03530) derived from phytozome v7.0 (chr-ID Gm14; pos 2304176 to 2304838 reverse strand)
ttctggcatcactcacataattgtacttgtaaattattttttatctttagctagagcataaactatggtacttaatctttggtaaatacttcttctataccttatttttttgagtcatttggatggttaaaaaactggttattaggtatgactggtaagttctcagataaattggttaattgaaaattcaaattgacttggaaaatgtgttcaaatccaagacattattttttgaaattgttgtaaaatttggagctgtttggtttcagaaaatattttttgtttttacttttaattacaaaaatggcacttgttttactttgtttcctattttcaaaagtttgtataggaagctgtgaaaacagaaaataataattggttttcagatgggtatctcctgcaatgggtatttgtaatactttgaggggaagtgtactttgaaactttcttataggttattatcttagagacttcgttgtgatgagtgagaagtgaattcaaatgtcttcatatattccctcttcatgaatcttggcatatgaggcatttcctgcatatactttccttggaaagtatgccttggcactgcaaagcatatcttgtgcatcctttccttggaaactatgcattgcaaactaaggtgacattcattttttgttcagg

SEQ ID NO: 26253 - DNA, 805 bp, Glycine max
  Intron number 1 from transcript Glyma13g32660.1 (locus Gly ma13g32660) derived from phytozome v7.0 (chr-ID Gm13; pos 34764454 to 34765258)
atagagttttctttgttgacaaatctggcaagaaggtacccttttgtatttttttattgggtcagttttgtttttctaatttgttattaaacgggcattgaaattttagcttctctttttttgtgtgtgtgggttttgctttcaactagaaaaaaaaaatgcgattttgggtcttcaaagttttttcctattcgcatcattgcagtggaaagaggatggtggtggcctctgtatttgattaatggaaatgtggaattgaaatgtaatgattttcagttcctctgtatttgcttgttatttgtttgatggaagtgttaaatagagtaatgtactatggtgtaatcgttgtgttttctttgatgtatcaatagcttgctaagttggtatggatagtgttctggctgaagttaactaattctgaatatttgttatactacttcacaagctgattgtgagatattctgtttcgtttctctgtgtgtgttttcccttttttgttgacatttcttctgcttttataaaagaaatgtagggcaggtgtcgagtgagctgttactttcaacatgttacaatgttttctggggactctggatttagatttgctcaatatgttggaagctaagtactgggtagttatgtaataatactcggtttacaatgagatattggccttttcaacaaggaaaaataaaagtaatgttgaatgaatgagattcctgctatgtgggctacctgtaacgattaagatcctgtatacttgtacctaatgaaagtaatttgtaaaatatgtaggtttctccctggc

SEQ ID NO: 26254 - DNA, 898 bp, Glycine max
  Intron number 2 from transcript Glyma13g29820.1 (locus Gly ma13g29820) derived from phytozome v7.0 (chr-ID Gm13; pos 32667275 to 32668172 reverse strand)
aagcagagcatctacaattactaggtatatattattgaattggtaaatggtttattttctgttcttatatttgaaaattatttaataatttatagtgaaaccatttggacacaactaaattgatatatccaaataaagatattttcaagaagaaaaaatactaaaggatcgaattatataagaatattttaggttttcaagttagttttgacttttgagttaaaaaattgttcagatatttttcatcttattgacatcacccagcaatacccacatcacccagaaaaatgacaaccgagttgaaccagcatactgatactgctagtcaccgctctgtcgacttgatcaccgggttcttctatttactttacaattattctttccactttataaattacaattccttttatgcctaaaaactgcattgcaactgctacacaatacagtcaacatattatttattaagagaaaatttggataatttgcattaaagttataggttttattcttattgttgtcatagtggagaaaaaaatggtattttggtaatatatatcatatcccgttatatatccttagtcttatatagccaagagcttcctcatgataagaggagaaacactaaataattctcttgaaaccctaacgatcgacaaaccaaataggatgagtaaaagagactaaatatataatttgcatgtcttctccttcaagtttaggttggctagcttaatctcgctttgaaaaactatttttttcctactaccccaagatcattctactttttgtatcatgtttttaaaattaaactattcattattcgaatctattaattgaggtaagtcaaacttaattctaaaagaaatttgattgtatgaagtgcatatgagatgcagga

SEQ ID NO: 26255 - DNA, 755 bp, Glycine max
  Intron number 1 from transcript Glyma15g08780.1 (locus Gly ma15g08780) derived from phytozome v7.0 (chr-ID Gm15; pos 6196834 to 6197588 reverse strand)
gttctccctttaataaaaccagtgctagaacccaggtatgtgtatacatggacttatttctttttaattctcagggaaaatttctcgttgattcttgaggaaattatgtaattccagttgataggaagcaatgatataaaggaaattgcttcttgaatccaattgaaagaacataatttatacaactgaatttggaacgtaacttctagaaaaaaaatactaggtagttttgaatcggtggtgcgtatctatgattctagtctatttttatgtgatatgtatttatttatttttctttaaggtgagagcactgagagcactgagaggtagacaaatttcgataggatattgcatatacagataattttttttattgcaaaacattgcatagagatattgatttaatgttttaatattcaaataatgaaacttatgaagtgacattcggttgttgaaatcagatcgcctatccttttcatatgtcttctttcttgttcttttaactaaaaaaactaacaaatatgcgaaaaaagtaagaactaatgattatttttgctattcaaagagagagaaaatttagtgatatcgatatttgatactaaacaaaagcaagtgaattatattaagttgatgaaaataaatgaatatttctgctctaaattaaatgatagaaaaacattgttttcttgatgttgatttatttattaatattaagtgcaggtcctaagtgaggtgagaagactggtggagctata

SEQ ID NO: 26256 - DNA, 792 bp, Glycine max
  Intron number 2 from transcript Glyma13g30860.1 (locus Gly ma13g30860) derived from phytozome v7.0 (chr-ID Gm13; pos 33379967 to 33380758)
catttggggcacccttaggtatggtctttgattctttgacttggtggatggttgggtacttgggttgaatttagtgaactctatcaatgtatgattgtatgtttattttattgggtttttatgggatatgcaattcaactgtttaaatgaacttgtcttgcatgcttgctttagttattgtcttttcattgtatgtttctacttaggtatcatgataatgacgttaactatggagtttctatttttgatatgtatgtgttttttattttgttaagtggtaatgggtaaattagtttcttgggtgttctgtttaagagtatcataggaagcagggatgaaatgttcttttttagctttgcttgtcttctttctgactgatttttcaacctgaaagtattgttagaagcgttacttttatgtaataacttataagtttctgatgattaatgagtaaactcacgttttagtatgatattgtatctgctgattatttgagtctaactttactaaaacttcactttagttcctatatttgggaaacacaattcacattggaccttacatttttattgacaagggttaagttgaattatgtgttccaaatttggggaccaaagtgaacttttagtgaagggactaaaatgacgaaagcatattagatactacagtgaggtttactcaatgaatacttgtctgtgatgtgttgcatgtgcacttgtttgactactcacacttctactattttcttttggtgcagctgttacggaacagcagaagcggccaagtcttgcc

SEQ ID NO: 26257 - DNA, 932 bp, Glycine max
  Intron number 1 from transcript Glyma14g18450.1 (locus Gly ma14g18450) derived from phytozome v7.0 (chr-ID Gm14; pos 20520238 to 20521169 reverse strand)
aagcttaagcaacaaggatccaagttcatttgctggtaagttaatagtcatttctgttttttcaccaacagacttagtttttaatttgtttgttgtttgtcgttgcatatttaatttattttatttgtttttgaaaatccatgtttactcataacttatttgaacctcactcctttgccaaactaaagcttttgcttcctatcattccttgctacatagatcatatataaaatttaatagcacatttgggaaactcttgcagtgtcattagcctaacaataaattttaaattacattcagatacaacttggaaggttttaaattataattgtggtttcttcatgttccttaatagatattacaggaaattgtggacaaatgtagccggtatagtcataattgcagttgcagacatataaaaaaaaccttgaggttgcagccaaaattgcagacgtagaccatttttcaaaacctagtttagatgctcgatattctttctgtttgtttgatcttgaattcattttgttattagtgaccctcctttgtgttcttttccttttctattttgagagggggtaaatattagtcaattaccattgactttgaaaattcattgaggtattgtgtttctggttcacgtaatattcccagaggtttataaataaaagtgattattacgtgtgaaagctttatagacttaattccctgatacagaaaaagttactactggtattggattcagatttatgcatcagcaacttgacttagtaattcatagatcatccattcaattacacatactccttaaagttatcttagagaatatactttaaactgaatactagatactgttttttttttcttcttcttgttggatgttatcttacatgttcaatttaattgttcttgtgcaacacaggcaacaaaggcct

SEQ ID NO: 26258 - DNA, 690 bp, Glycine max
  Intron number 1 from transcript Glyma13g27690.1 (locus Gly ma13g27690) derived from phytozome v7.0 (chr-ID Gm13; pos 30849530 to 30850219)
acccatctactgtatgttgtgatccaccactgtttttttttttgctttctgcatttgagtttctgaaaaagttactaacttgaaccagtgatcgcatgcccatgaacttgttgattcagtcctgttgaattttgataatgttttggtcaaaagttgagaagtttgatttgtgtgtttttttgggaattgatatgttttcactttttctttttctggcttgggttgggattatgtggtttcggttgaacttgcttagaactttaccgtgttttgttttgctttaatttgagatatatgtgtggatctgcttctgtcagcaacagtgttagcacctacggaaaattctgccgtgaagttatgtgcatattcgaagaatgctgtgctgttgtttgttcttattcttgcaccaattgataattttttgtgtggatgagttaattttttattttctagatctcaaagtgtccaggattaagatcgttgaatcctgtgagtgttacaatatatttttcaataatgtgttactgttatctatctattttgatgtgtttgattgtgttttgcgtgcggatgaattgcgacttgtagataatcaaaaggaaaatttgtaaactgcagtatgctgatattacatttctaacagagtattaatatgttttttcttcaatttccaggtcacctgttgcaaac

SEQ ID NO: 26259 - DNA, 915 bp, Glycine max
  Intron number 2 from transcript Glyma13g05550.1 (locus Gly ma13g05550) derived from phytozome v7.0 (chr-ID Gm13; pos 5896101 to 5897015)
ccctcttaggaaacaggtttggtatctttctttgttgagtagtaggatatatcatatatgctaattctatttttgactttaaaatcaagtcttttgcatcttagttttttctttgagaaaggtaccagatacacatattcagaactcaagacccattatggattttttttttctcttttgaaaatgtgaaagtgatttttttttccttccacaaatattttcctatgttttggaattttacaacaaaacaaatgaaaataatgataactatgtcactgcacttcacacctcagcttgatatttcatcccatactcactctacactaaatatgaatcattcatttttcgtgcgagagctataatttctcttctgttcctgtgcccttgctgtgcagcagaatgtcttaaatgcaatgacctctcaatttcttcacccaactattccaaccctcccccaacaatttttttttcagaaactgtgctctgtgccctgtgccatttccttaaattttctcccagacatacaagttttattcgagacgaatcttaattgcaaaatgatatatatcatattcatatatcttctgccacagcaatcaaaagcaaaaatgcaatggctatattattatttttataggcaaaaagcaatgtcatatagcatgtgattatctaatgctctcaacatggcatacatacacacatacatctcatcctctcataaattaagtcacatttttcttttataaaaaattaacattaaattatcaattaaaaacaacaataaataatctgttttagtagttgatggattactctagggtttaacattggctttttgtggtgtgtctgcactatatgcttgtgctgtctttgtactcaggtggtcggcaatagccacacacttgccaaagagaa

SEQ ID NO: 26260 - DNA, 900 bp, Glycine max
  Intron number 2 from transcript Glyma16g17700.1 (locus Gly ma16g17700) derived from phytozome v7.0 (chr-ID Gm16; pos 19320176 to 19321075 reverse strand)
aggtatcgagttcgacctgtgttcatcttaagttccacggatttagatgatgaccttgtcaagttcgacctgtgattccagcacatttaaaagtctaaaattcacttttggtccttattttattttttggttttagtttggcttcatgagtttaaaagtttcactttggtctattaaagtgtctctgttagacaaaattctcaagtttaaaagtttgtctaaaggattaacatgtcattaattaaatgagggcaattttagaacttttaaaaattaagggaccaatttagaaacaagaaacaagtcaagggacgattcttatattttagcctattttaaattaggagaattcttttttttttttttggtctagaccacaactatcctccattggaggcaattctatttgaaccgggtatgaccactatgggcggcaaagctcaggagaattctttttgttaatattgagttatgataaatattttgatcaatgtatgaattatgatatcacaacacgtgtagattttctaataatattgacttgaactaaattagttgtagcacttacttgtttatttgttgaaaaggttacttgtcttcttgacattttatttatttggagcaattgtgaagtaggtgaagaatctcagtgcttggattgttttagagtatttgtccttgtaatactataggcttattgttatttatgaaagagaaattatacttatacaacaaaatatacaactatgagagagaaagagagaaaaggaagataaatttgaaatgtaataaatgatagggtggagagagatagacataaaatgtattgttgtatgtgtattacttctctttatgaaattgtctcattggtgtaaatgcagtttggtgaggttgatattg

SEQ ID NO: 26261 - DNA, 841 bp, Glycine max
  Intron number 1 from transcript Glyma16g15790.1 (locus Gly ma16g15790) derived from phytozome v7.0 (chr-ID Gm16; pos 16711993 to 16712833 reverse strand)
gagtcttccacattattttccttcttctcatcaaggtttcaatctcttttttgttcttgttatgatattgctttgaatgccttttgttcacatgtacgtgatttcttttcattttctctctccattgtatgcgtgcggatataaaaaaatggtgatactaatcaaataaaatctaccgacattttttatatggtaattctcgtaagacaatctcactagagacggatttcgaatgctggtgacatccaaaaaatcaaattaaatcttacaaatatttgagagaaatatgaaagagaaagtaaatatgaaaattttgcatcaattttttttttgaagtgtattagactttcatgaaatgttgttcttatgttaataaaatgtgatagttttcatggagatgtgataaattgctttttatttggaacttctaaattctctccatttctatttagtttttcttcattttactaacacggctcgtaacgtttcaaaacgatatgttcattatccaagttttcaattgggtaacgcacacaaaaagttaatacaggataattacatgcatgcagctaaggtattcttacaaaaccacaagcgttagttgctgagcaataatctatatggtatacataaaaaaatgaaaagaaaaaaagaaggaagaaggattttgtgtcgtttctgaagggaaataaacgtttaactaattttgttcatgtattatatctggtttatgtaaagttatctgagattgtgttttgaaatgttcttatttttttatttcggttttctaatgacttgaatttcagaaattttggtggcagaccctgtgagaaatattaaa

SEQ ID NO: 26262 - DNA, 732 bp, Glycine max
  Intron number 3 from transcript Glyma15g13090.1 (locus Gly ma15g13090) derived from phytozome v7.0 (chr-ID Gm15; pos 9755815 to 9756546 reverse strand)
tgtcgtcctttagagacaagaggtacaacaatcctctgtcattagtttattttcagaatttggattctgcagacttagtttatttaatgaaattagaaatgttagtcacataacatctaatacactctttctttgtattattgactaaaatttatttgaaaccacaaaattttgtatcatatttaatgaatctcattcataattttgcagttttcaataaattttaattcaaaaataaagactgtcttaaaaaagaatatattactagcattcctcttaatgaaattctttgctttgttgaagacttctagttttgccctttattgttgaagttctaatatttctcttctacttatttttgaagatttctctgggattctccaatagatatgcattaaagtgtagtagaacttgtattctttgttttagccatatagtagagcttgttacttaaaatcatttctctgtaaacatgcataatataattagcaactttccctagtctgttttaacttttaagttagggatcttgacatagaatctatatgttgtctactgatcatgcttcaaatggaatctttttttgcatgttaaatatcagacagcaatcattcttgtgttgagaatatgcatgatatctttagtttttttaggaaagaataatttagtttatcttttaagaatttgttaagctgactttcctgatttacttcaatatttttcagcataatc

SEQ ID NO: 26263 - DNA, 178 bp, Glycine max
  Intron number 1 from transcript Glyma15g13090.1 (locus Gly ma15g13090) derived from phytozome v7.0 (chr-ID Gm15; pos 9757046 to 9757223 reverse strand)
tgatctcaaccgtgacactccttttggagtcacaggttatttaattatcttcccttttgttttctttgcttttgtttttttttttcactttgtatgtggtgtgagttcaaagctaactgttttttttttttaattttttgcaggaagcatttttctggtcttcactgccccaattctc

SEQ ID NO: 26264 - DNA, 948 bp, Glycine max
  Intron number 1 from transcript Glyma13g29280.1 (locus Gly ma13g29280) derived from phytozome v7.0 (chr-ID Gm13; pos 32202067 to 32203014 reverse strand)
cttggtacgattttatcatcttcatattcattttgagcatgctatataggataaaaagtgttgcaggatagattttcattgtgatgatgtaaactgtagagtgagttgaaaccagaaaagtaaataggtttagtaatcttggaactgatggaataagagggaaaaagaagcaagataaaatgagtaataaggagtgccttgttgcttaaatgattagcaaaagaaaacctattgtatgtttgtttgttgttgtatgctattgatttatagaaacacagcagatgtaatgcttattctcgtcataaattatatggttaatatatagtagcagggcatgtttggattagcttgttttgttttctgaaaagcctttaatgaaaatgttgcagtgagaggttttggctgaaaagctgttttggggtaaacattgatcaaatccaaacactaagaatcacgccagatgcaagattgtccttgcttgatctggttttagagatacatggttccatttccagatttcattgatgtaaaatccaaggatgttaagactatatcgacatgacaacatatttttgctggcagtgtatgtccatcatgattatgcagccatgtttgatcagtttgtagaatcacaagaaagtaaatgactaaatagacaaggatattaatataacttcttgagttttgcaatatggctattcatttgatgtttattaatatttaataaataatagtatggaggaagcacacaataattttttagtgtttgactattttataatgtagtggagtaataattttgtatagaatggcattaggtctaaaataatgataatggagttccataatcttttaatctctttttctgcagaattctttgatcttctttgtgagtgttaatttgatatttgatatataagtaaatcttttgatcatgcttggcagttg

SEQ ID NO: 26265 - DNA, 852 bp, Glycine max
  Intron number 1 from transcript Glyma16g10270.1 (locus Gly ma16g10270) derived from phytozome v7.0 (chr-ID Gm16; pos 10337806 to 10338657 reverse strand)
tgagcaataacaggtacatcattcaataacttttttggctttataaaattgttttttttttttgtttttaattgtttactttggtgtctattactcttttttttttttaatgttatcatttaagtcggtcaataattaattgttctatcatataatagttcataattttaagattgtaactttttttgttaaattgtattttttgttgacttttaattcctaattcacgattttgattttctattttagaaaatccacactattatcctaatttcaattttgcatataatttttttcttttacattttttttcttaaatatgttttaaatcgttgaaaaatttacaaattttatatttggttcatgataaaatttttctacttttggtctatgaaaatcttttttattttgtatttgatctctattattacttttgattttgttaacttgagatgtcatcattcggtaaacaacacatatgggtggttgtgataaaaaaatgtagggacaaaagaaaatttgtaaagttttatttttaagcctgtgtattttataatacatgaccactgtaggttatgtggcagaaaattataataaacaaaaggagaaaaaaaatgtgaagaaaatagaataattttcttctgaatcaaattattctaatcatccaatgaattaatccattaaaactaacttattccaaaatcaacttatttattaaatcctattttataaaccaaaaaataaaatattatggaattacaaacatatatctttaataactattctaacagtcttataattattaccgaacttgaaggaacgaggctcaattagtgaaggaaattgctgaag

SEQ ID NO: 26266 - DNA, 861 bp, Glycine max
  Intron number 1 from transcript Glyma15g40670.1 (locus Gly ma15g40670) derived from phytozome v7.0 (chr-ID Gm15; pos 47648780 to 47649640 reverse strand)
ctcccacaggtttgcttcaccttctgggattcaattttgttttcatttttgcctaaccatttcttcgatgggtgtttgtgtgtttttttttttaaattcagtttgttcatatagatctggtctgttttatccactattttaatttgaattataggaaaattgatccaatattacccactggctattgttgttatgaagctcttattttttaatttctattgttgattggttgttatcttcagtttacatacagcagccttttaagcttcacgttccaagttcttacatggcccgctgagtagctgaaccaaaacattcagctatagttgatagttttgcaaattctagaaagtttaacatgctgattatttcatatgaattggaattttgtgttaatttttgttgtcatcttttggggtgtgttgttgactgctttagttgatgaccatggtgtttggtggctgtgaaacggttttctctgtctgctttactctggttgtttattcatgacagttttatttgctgcaaatgcagatagtgctgagttaagaacagtttcgccgcgtgtgaatgctttgtattggaatattattttaaataatatttttttccattttagtgaaagacctgttgcacttccaatgatatttttcacgcttttcaaaattaggattactatgcaatttttctccttgttgttttgtgttacttgtgttttttttttcacttgatgttatgttttggtgtctcagtcacatgggaattctctgctatgtccaccagtgcatcctgtacttttcatgttaaatagttctaatggttgaaaccattttttttcctatgcagagggtgcagtttttg

SEQ ID NO: 26267 - DNA, 967 bp, Glycine max
  Intron number 2 from transcript Glyma15g15470.1 (locus Gly ma15g15470) derived from phytozome v7.0 (chr-ID Gm15; pos 11886159 to 11887125)
gcaggcagggtttttcttcattacaacttggtaagaaaaaaaacatttttttgttgttgttgttgttgttgttatgttctttattttattacagaaaaatacattcatgtttgcttttaaatttcattgaccttatccaaataagaattgaaagattaatttgctagtgctaactggaccatagatgtgctttgaggattcaccctcaacaacaatgttcaatggggcagtggaccaaactgatttaagattagatggaaataaattgagatagagtagaagaagaaagggctaataaaaactatggggaggggaagagagagaaaaaagaaaaggatggaataagagaggtgtgaggacatcaaagagaagaaaaaacagactgattttatggtcccagcatgaatcaattatttgaaatcttaatttcatacatagttatcttttaatagacaaacttcagccttatattattaggaaaggaactaggaacattatctttacagctaagtatccttaatttaaattaagcaaaacctaattcaatatgaatttctgcatatgttaacctgtggaataatccaatataagtcctcctaacaacaacctgacaattctgattataatgccattgtctaacaataaggcacatgtatatgttaaagagtttaatatctatggactcggaatgtaaacaaaaatttatacggtaaactaatcataaattattattaatgagtcttaatgttaaaatattataactcaaaatcccatatttgcaaaaagtttttaaaaaaatcaatttcttaacttctcttcttgtattgctttcaattaatatccgagtaattcataaccaaaatctttactgttttagcaattaacttaacctctagcaaaaacatgtgaatttaacttgttgtatgttgtaggatttgttttggagtagcagagattttgttgctgg

SEQ ID NO: 26268 - DNA, 948 bp, Glycine max
  Intron number 1 from transcript Glyma14g06810.1 (locus Gly ma14g06810) derived from phytozome v7.0 (chr-ID Gm14; pos 5018254 to 5019201 reverse strand)
tccccgtcgtcaccggcgtcgtcattgccagcggggtaacaagccgccatcccccgatcttgcttaattgcaattttcttgcttgtttgtggcggtttgttttattttttcatgaaattattataaatttaaattatctttttcgttttcttattggctaattgagggatatgatattataattacaattatagcaccaccgacacttacaaacaagtcttcaaagactaaagaagatatgttccacttattatttatttataatgaaaaataaaaaatcttgttgaagtcgcctttatccaaatacagtattttataataactagtatattaaaaagtcttaaatagtaaggatgatttttcgtctattgactgtaaaagctttgatactgtttgtgtatagaatatagacgatttacctctgttatttttggaggtttgagtttttgattggtggcacttgcttgtacgatcataaaatgtagggttatgctgctgctccatttggaaatgttttttacttttcagtaaagtggtgtgttactcggatagtacataagaacttgttctcctatattttactttatttagagaaatgtctggtttaggtttgtttgagaaagcagagctgacatgctttatgtgatattcaatgacatattcttgatttatgttgtgtagcattcttggttgtcagtatacttatttggtgtcctcagtttgatgattgatttgtttgaaaagaaactaggaaattgtcatgaatcaaattcaactttgcagagagacagcttaagcagagctagatattttttccttttatgtattattattcaagtgatattgatgagtaaaaaacaaaaaaataatatatggcttctgatgtatttgttcttttgtttcttgcttatagggtgagccgagcttccatttatttgggttcatagt

SEQ ID NO: 26269 - DNA, 736 bp, Glycine max
  Intron number 3 from transcript Glyma16g27770.1 (locus Gly ma16g27770) derived from phytozome v7.0 (chr-ID Gm16; pos 31727279 to 31728014)
tctttcgccggattgcctggcatcggctgaggcaggtttttgtcttcctttcattattctttttaccttggttatgtttagtatattagatatgaaaacttttatgtgtaattttgtgaatgggatgcaaattctaggttcttatgactacttagttggaatctcacgaagcatagatacaacacaagacatgagtgtgacatgacaccaacaaaagaaactgcaaattctaaaaattataggacacaacttggttaggatacaacacaaaaagatgatattgagctaacataaaaacacaaatcttacattacaataaaaacatcaagtttcaatagtcaacatttttcattgtgaacacaataaaatactatcatttatctagttattagcacacaaattcaaaaataaagtaaagaaattgaaggatttaggctagcattggtatggtaacagttttgacgtgttcatgattcctaggttggaaagtattatcatatattgaattattgataaggtaagcgaatgtgttacatcactaataactacagttataatcaggaaatatatgtgataacaaacttgaaagcaatgatcttaagtcagattattgctttagtcaattttaaaacctacaaaatcaattaatctcttctcttgctgatgagattaaaatcttatgcttttaatgttctgggcagataaaacagcttggtgaacctatagaagttagaat

SEQ ID NO: 26270 - DNA, 834 bp, Glycine max
  Intron number 1 from transcript Glyma13g08770.1 (locus Gly ma13g08770) derived from phytozome v7.0 (chr-ID Gm13; pos 9423072 to 9423905)
tccagctgcagaggaaggtgattttaggctcttgggtaagaaaacaaagcaccaaaaaatgaaaatgtttttggctttaactatttttgttactccctttttaatgttgttcctattttgatatttttctcttccattagtatatacattttaagagtaaattcttatgtttatcatataaagaaataacttattttaacctagccttttgtattattaatccaaatttaatgattataatagaattttcttattccatttattttttcatttggccttttgttccctttcaatttgatctcaatagaaaagcaatagaatttatttcgatatattttacttcatagttcactctatgtctcattatatttcatttcttttttcattaaatattcaataaccttaaaagaaattgagttcaaaatctaattcaatctcataaaaaacatgagactaagatctcaaaacactattatgtttaggacaagacatctaaagagtatacaaataaaggtcatcagaaaatgaatctaaaataaactttattctatcctaaaatttgagtttaaaaattaattcaattttataaaatgtactcataagatgaaaaatgttctaagtattataattcaacagcgtgggatctcataggtttttaaaaaatttggggggaaatttttaataaaaaaattagataaattgtgttttgaaacatgactttatactgcaaagtcttgtatttgttccaattaatgtcatgggattcattaattccatacctcaatttttatcttattatttattatgtagaatccagggctattataaggtact

SEQ ID NO: 26271 - DNA, 844 bp, Glycine max
  Intron number 2 from transcript Glyma16g00870.1 (locus Gly ma16g00870) derived from phytozome v7.0 (chr-ID Gm16; pos 531008 to 531851 reverse strand)
aaatttccaacccaattgtatacaagcttgttcgggtagatatttaattgttcattggattttctgttcctcattggaatttggatggatatgcatgtttttaaggctttttagtttgatactttgatggcaacaaatcaagatgaaatgagtgaccttagtgctttttttttttccagcataccggtaccattttaagagttgtaatgctaattttttagccttataatttacctgtttattagacgaaaaccctaaccattgtccatgaagtgttctaatgtttcatttttctttgattcatttgaagaaaaaaatgttcatggcaacccttatctaataattaataatcccgaataaataattctaatatgcacaaatatcagcatgattgcttgttattctagctgcatcacttttttctttgcctattaaaattatttattatagcattcataataccttgataccctttttttccagaaatggccagcgatctcagctacgaattaacaaaattcctggcggtttcccatcttccttttgtagtatagttgttctataaattactttctttgatcactatgtttttctctttaagtaaattaactcactttccctaatcttatgtaatggctgaaatgaaaatgtagaaatttgaaaaaggaatgtgattgtgttaagatttagtttaattaaatccaagaaaaggggaagtttatttgaaagtaaatatattttttttatttggttctacattttcttttgtgacttatacttctgtttaggctatattcataattctatgagttgtctgtctgatatgatctttaggttgaaggtg

SEQ ID NO: 26272 - DNA, 359 bp, Glycine max
  Intron number 6 from transcript Glyma13g05050.1 (locus Gly ma13g05050) derived from phytozome v7.0 (chr-ID Gm13; pos 5289395 to 5289753)
cggtaaattattgctttggtgcttctgcaaaattctacaaacctatattacgctgtattaagttggaagcggaaggtgattatatgatatagtcactgagtttcttttgatcttttcttaggcaattaatatatatatatatatatatatatatatatatatacggcatagatccattttatcttgcttgacattttacagaactgtgtttatggagaagaaaattttggtttagcttaatagttggaaattggaatgtttaatgagtctgccaaatgggattgcatgttcagatttactctatctaatatctcctgttgatttagtatggagttgtatcaagacagccacacacaatc

SEQ ID NO: 26273 - DNA, 793 bp, Glycine max
  Intron number 1 from transcript Glyma14g09850.1 (locus Gly ma14g09850) derived from phytozome v7.0 (chr-ID Gm14; pos 7917872 to 7918664 reverse strand)
gcgcgtgccaaagctgctgaagccgcacagaaaaggttttacctttatccattcctcaattttccctttttttattaattcaatttcgtgaatattctcaattcctgcaaaaaagtaaaatatactgatttggttttttatttgtatacccacatggtatagttagatccttaatcattgtagtacttgtgttgattaaatatgtatatgcttttgatttctcttttgcttttatttctagccagtcacactttttggtgttttttttatcccttcagaacattatgaaccccaattttaaataaattaaagaaaaagtgaattttgctaactattgtctaaacttcaattcagtataatattttttttacagtttcaaggccttaattttgtttttagagctcattgctgctaagtaattcattccatacactacagacattaaacaactatctcaaatcacaatcattagggaaaattcaatttcaatgtccagggggattattttcttcatgtcactgttaggtactactacatgttctgaaatgtgtttgtggaagtagtcacaatagaaaatgcgtgcaaggctcactgcaattaacaaatagataatggaatgaagtctacttttagaaatgggggtgaagcatgaaacaaccagagacatttgaatgttgttataaaggttttttattggttaatgaatgcataggtaaagtaactgtagacaaacttataggttttgattggaattataggcaagagcaatttgagaattctgcagcaggacgag

SEQ ID NO: 26274 - DNA, 866 bp, Glycine max
  Intron number 1 from transcript Glyma14g02030.2 (locus Gly ma14g02030) derived from phytozome v7.0 (chr-ID Gm14; pos 1197095 to 1197960 reverse strand)
cattccgctttgactttggaggctaagggcctaaggcaggtatgttaaaccacaacaacttaatcatctgtgtttttaatcaaagtctctccttttttttttgtttgtttcctgtttctctttgaattcttgtgtgtgtctatttttgctttaactgtttccctcccttggattctgctggtattttttctgcatagagcagtagaaaagaaaaagctagtagctttattagaatctcctcaaatctggcactaccctttattcttattgataacttataagttttggccggctctgggtatcttagtatttatctagaaagcggaaagtttcaattttgaagctgaggttctggttcctgggaatttgttttactctacttgggttttgtggaccttgatcctcaattccgtgtttctctgctcttagctataaagttaaggtttgaactggggttgttgtttctgaattgccttctttcctgttagttgacaactcaaatgacagtccttaggagaaattcaaattgaagcttcctacttctctttcacatttgggggttgagtgttgcctttcctttttctatttttttgttcttcacaattcacatactaaaaattttctctttttttttatctgcttaagccttcctaggctgcaacttgtatggaagtattttcaagctgagttttagcagttttggtcttggaatagtgaatttttagttcttcctgttcctgtttgaagtttgggtttaagttcaaataatcatttgttgtgttggtttgaagctttgcttaacatagagtgacttgaatttgttgaaggtttttttgctttgtcaggttcccaatcactgtgatatc

SEQ ID NO: 26275 - DNA, 671 bp, Glycine max
  Intron number 3 from transcript Glyma14g26940.3 (locus Gly ma14g26940) derived from phytozome v7.0 (chr-ID Gm14; pos 32965111 to 32965781)
atattgataaaagaattcgtgctctcaaaaagaaggtgcgcaatttatgctttcattcatacttttttagtattacaagtgattgctggcattcaaatgaaatctggagtacgctattaaattgcttttagaaccatgccaatggttaccttatttagggttattattttcaaatttcttgtttactttgatcctatgacatatatattagtatattttccatccaattgcagataagtgacatggttgctattgcaaaaattatgaaagccactttggttttgcctacattggatcatgattccttttggacagattctaggtatggagtctcatctacttaagttttgtgtcaaaaatatgtgcatctctgatttcctattgttctaattttattgtctcagtgattttaagcaaattttttactagaagaacttcattgaagttttaaaagatgatgttcaaatagtggaatctctaccaccagaatttgcaacaattaagccagttttgaaggctccggtttcttggtctaaggcaataccacacattatctacatagaaacttctagcacattcacaatgtatctacttcggtttttaatctaaattctgtgaccgttttgaatcatgtaggcaggttattacgcaggggaggtgctgcaattatt

SEQ ID NO: 26276 - DNA, 360 bp, Glycine max
  Intron number 1 from transcript Glyma17g02230.1 (locus Gly ma17g02230) derived from phytozome v7.0 (chr-ID Gm17; pos 1424485 to 1424844)
gtccatcactgaggtacttgtaactcccagtacaaaggtactgagagagattttcaaagttgtatcttttcatgaaaacatgtgtctatttatgaaaaaatataatccaccataaaatttgattatgggtttgcaaattatatcaatggacttgattatatcttgaaggagattcgtcactacatcctgttgcattcaatttgtatagagattatctaaaactcacgtacatacgccttgaagacttgcgcgttttttttcttactgtttcttctttgttacaagactattgccattaatatttttgtctttgatatttctgtttttttttttttttttggcagaaccatcaccaccaat

SEQ ID NO: 26277 - DNA, 1007 bp, Glycine max
  Intron number 5 from transcript Glyma15g13030.1 (locus Gly ma15g13030) derived from phytozome v7.0 (chr-ID Gm15; pos 9702455 to 9703461 reverse strand)
accttcattgcttcaattgtaacgggtatcttggtgtaagtttttttttttaacctccctttttgaatttgttgtttttacacttggtacacatgtcttgttacggtgaattagttgtcaatctcgggttttggtgcttaagggctaactttgaaaatgctatagtgggatagtgggaagcaggatgaccaccatttaaaggttatgaaagttttaaactgcggtcatagtcatggttgtggttttgctgcgatccctgatatttggaaaattgtagactaatgtggtcaatgcagtcacaattgtggggttgtggtgatcgtgaaccctaaaaccttgatgaggttgttgcaaaccggtatttaaagccttagttatataatgcatattgcatggaagtgtttgctacacatacacataaatactcaaaatcaaaacaaaatacccaatattaaagaaattcatgataaataataactcacaatttacacacaaaatcaccagcaatcttggagtaataagaacatagtaatgaagtaaaaaaaattaaaagacgatagtaaaattaatagaaaatgaatacaacaaattagataaaatttagctgaatgtgaatttggaagtttaaagaaagaagagaaaacagaacacttgaaataaaaaagtcctataaaatttgaaggaacagaagtcaaaacataggtaacttttttgtggaatattttatccccaaaacctgaagcaaggctgctataggggcgaaaatggttttttgaaggctgtatcatggtagcactgctataccacaaaaatcaatattttggctgctattggtgccgctattgaaaaccgctcctctatttgaatcccatattggttgagggccactccgctccactattccactatagcattgctatagcatgccattggcatcaggatttttcaattgattgcttattgtttttcctctatgctgcagttatcttggtggcttgctctttctg

SEQ ID NO: 26278 - DNA, 473 bp, Glycine max
  Intron number 2 from transcript Glyma15g06580.1 (locus Gly ma15g06580) derived from phytozome v7.0 (chr-ID Gm15; pos 4653472 to 4653944 reverse strand)
ccgcctagaagagaaccgggtttccttgaggggtaagctattacatgagaaaggatttgctcttcaattcaccaaaagtaacgttagttttggcttaaatattttttagtttttcaaatttgatcttagtctcaaaattaaaagtgattatttttcttttttaatttgaaaataatttacttttaatccttaaaattattattttgtatcattttagtatgttaataaggatcaaaagcagactatttctaaattaaaggatgaaaatatttatttttaaattttgaaaactaaaagaaaactagaaccaaatttaagagaataaaagatattcaaaccttaagttttttacttttgattcgagcatacatattaatattcttttcttgttcaatactcctcttaactttgtttttgtttttttcccccaatttgcagcctagcggctttgtgttgctgctgcctcttggacg

SEQ ID NO: 26279 - DNA, 209 bp, Glycine max
  Intron number 1 from transcript Glyma13g29070.1 (locus Gly ma13g29070) derived from phytozome v7.0 (chr-ID Gm13; pos 32022671 to 32022879)
ccctctgattctggcccccgccaccaccactcaatgtaagcaacttaatttgttaatttcatttcattttattcatctatttatctatgtttataactatatatatataactgccatctgggtattgaaaattaattaactttgtttttggtatggcttttttcttcattgaagggttgaagaagctagtgaaataagcccaatccaaa

SEQ ID NO: 26280 - DNA, 984 bp, Glycine max
  Intron number 1 from transcript Glyma14g21120.1 (locus Gly ma14g21120) derived from phytozome v7.0 (chr-ID Gm14; pos 24377207 to 24378190)
ctctctccccttcttcctccgacaaagctcgattggtactagtactaatcttctctgtctctgttttccgtttcatcatttttttaactgcgttgttttttgttttatttaatagaaaattccagcaatttatggttaacatggtaaataccaattacctgtggcgagatattttcttttattatattattactagtttcatttcaatggacaaatgcttattatgcatataattaaaattaaaattcataataaatcaatgttttttaatatataattgtactttaaattttacattgagcaattgaaattgtaaaaaagcttgaaggtgataagtagttaagaaaaataagtatatatagatgaagacaaaaagagagttttttgagagaactaagagagatttgtttggctagctgtgagactgaaatgctagagaagagagaatatcggaatctgtaattgagagtctctattttctaagtgtgtattctaatttataatataggagtagataacccacagattacaaaatggtaaattggtggttttaagaaattttgagataaattttatgtaaccatttgttaagatagaccctctttttttaagagtaatttagcaagttataactttgattttaccaaaatatacccaatgtatagtttgctaaaagttccttctgattagcaagtctgataggaatttttaaatctattctcacttggtttttgaaaggagtatttaacaagatatataagatttttttttaaaatacactcaaagtatagttggttaaaatacttatgtttaaaaaaagagggtatatgttagcaattcgtgcacgagcatgcacacgtgtgtgtaatgtggtttcattttctcaactatgtgaccaattatgcttggtggattgactatacagactgtgatgagatgatcaatattctcacatatattattattgaatggtcagattttgga

SEQ ID NO: 26281 - DNA, 388 bp, Glycine max
  Intron number 1 from transcript Glyma16g27940.2 (locus Gly ma16g27940) derived from phytozome v7.0 (chr-ID Gm16; pos 31880721 to 31881108)
tttgatttttctctattgtctcgtaagatttagaggtacaattttaatagggtgcttcgatttttttattttttttgtgtagccgacctaattgatttatttttatattgtataaataagttgtgatttctgtgttggcatagctcagtttattgggggtgtcgtggtttcaagagatagattaggggtaattgttttgatgtatgaatcataagggaacataaaaaagagaaagtgttgattgaggtgatttttgaagaagggggtttaatctggtatctgtaaatggtctttgtatgataaattttccggaatggtccttttctcttgcaaaattttaatcggattgtttatgcaggctgctaagattctcgcaaacttgattgtg

SEQ ID NO: 26282 - DNA, 1032 bp, Glycine max
  Intron number 1 from transcript Glyma14g04010.1 (locus Gly ma14g04010) derived from phytozome v7.0 (chr-ID Gm14; pos 2673058 to 2674089)
cactgatttcggtctctctgttttttacaagcaaggtcaatatttctcacccttctctcttctagtttagtttccgtggaagaacgtgcatgacatgtttgttttctagggtcatggaaacgatttgcttagcatggaactaataattggctcttctgttatgtttttttataattaaattccaccatgcataaaggttttaaaaaacgctatgtgactacaatttcgttcaagatttttggaatttctgtgattgtattgattacacttatttagttttttaccaatgaaaatttcttaattgaattaattgaattttttaagttattttttatgatgatcatgatgtcatatcatttgtaagaaattgatacacgatttcattcaaatgataagaaactctcacttttatatttttaaattattaaataattaaacacaatgacattgaaaaaaaatagttagataaatatattttttattgatgataaatagtttattgtagaagagacaaatattaattttaagaaattctctctatcacatagttttactccaataaaaaagaaactgcaaaagaataattttttcacttaacaaaccctccaaaaaagaaacctccattggagatgttgtaagaaatcctacaagaaacagtttcgtctacaacaagatatttgaaatttctgtgattttattgattacacttgttcgtagttttttacaatataagaatcacgataaaatcacaccgtgacaccaatttaaaacttttgtagcagatattgataagagaactcataccatcagtgccgccttttaatagaacttctctttgatttttatttagagtttatttgctataagattgaatgtgtgattaaacatcaatatcttggagaatgcttaagctataagtgaacagaatcatcaatatatttgttgcttgaaataatcttaggatgataacacaatcttcaaattcgaatgaagcatactctaacatggaattcatcccttttgacaggagag

SEQ ID NO: 26283 - DNA, 904 bp, Glycine max
  Intron number 2 from transcript Glyma13g08010.1 (locus Gly ma13g08010) derived from phytozome v7.0 (chr-ID Gm13; pos 8261495 to 8262398)
tgccaatttactctgttgcatttgttcctctcactgtaagaatctaaacttttaagttgagcatgagtaggtagctagttgctaggtttctgtgatgcattagtatgatgagataagatgtcacactgtgtactcaaattatgttgtgtctaatgtgtggatgtgtgttgagaatttgagtgtgagactgtgagttagatgtggaactggatgaacaagtcccacacttggaaaggaatggacaaatataagcagaaagactaatagacttcttcttggtaagtccataggatgccataacagtgcggtggagtccataggaactaactatgtgtccagtgttcttgtgcatgtgaattatgcagtaaatcattatttctcatatcaataatatatcacctcaaatctcaactatattgtcttacttagtcagtgctaagttaaattcttttccctagtaacatagaaacttgaagagggcgacccttggcataacggtataaggttgttgccttctgacctggaggtcacaggttcaaatcttgtgaacagtctctctgctgtggtggaagcctctgtacctaagcttttttattaccccaggaagtaggttaaaattagttatatggacagaagctactatattttgaagcatactatagaagattttcctcaagtggttatccctccctttcctatctttatgatgaacccatatccatagcttacagtatttcaattagaacttattatagtcttttcattgagaattcatgtcgttttaagcgatgcaccaattttacagttttttttatatcattagactgtgtgtgagcatctctaatttgtttctctgtttacatggataggtaggcagtgcagcagcttatttgcagacagggat

SEQ ID NO: 26284 - DNA, 900 bp, Glycine max
  Intron number 1 from transcript Glyma13g35860.1 (locus Gly ma13g35860) derived from phytozome v7.0 (chr-ID Gm13; pos 37222299 to 37223198)
aggccctcagggcggttttcagtggaaccactttggtacttttcttttcttttttttttcgtttttatacaacttctgtgatggacgaactctttgtgctctcacatttaatgttctcaaaattgtctcccaaaaaggaaacacgaggaaaaacaaaaaattctccttgtcattgacctttattataattattgccatataagtcattacaatatagataacaaaacaacatcgtaactatattataaattatatttacaattgaagaagattatgacgtaagaacgctcatttcaccaacaatgtctatttgttttaccgtcaacctgtttttccccctctaactttcttactttctgggtgtttttgtgaaactgactcattttaattttaaaaaccagcttagatagagtttttctagagttatccaattcgttaacctctttctatatataatagatttttatagtttttaaaaataaacgatatatatatttatattatcattcaaatcagtatattaatttgttgagttgaaaattatgtctgatttgttaaccatgcatgcaagcatgttgaattcttctaaaattaaattgtaaatacattccctatagtttgaaatatgtatagctggattcatgcattgattttattttgaaattatagacttaaatgcaatatttttaagtgccaacgatttcaaagttttttaatcgaaaacagttgaaaattttctagcaataatcaccccctgagtctgaatatgaagttttaaatatagatcgagttgcaataaaaaaaattacttattaagtaatagtatatttttttcttttttttgttttgttttagtgagttttgtggataactaactccctttttgttgggatcttacag

SEQ ID NO: 26285 - DNA, 674 bp, Glycine max
  Intron number 1 from transcript Glyma13g33320.1 (locus Gly ma13g33320) derived from phytozome v7.0 (chr-ID Gm13; pos 35211432 to 35212105 reverse strand)
caaaattgttagatattggtaattcttctaacttactttagctgcaaatctatttttttttctcccctattttcttaaattgtgtggaagcatgctttgaatacttatcacaatatctgccttgggaataaggatacatgtctgctagttagattgaagttttacaccattaccacgccaccaaatgaagaatacattaccttaggagttgtgctcaattagttctcagataggtaattctactcagttttctctaattgctatgaaataataaacccatggctataaaaattagttcttggccagtaaaatgtgctagtttttttcgattgtttgtcacattggcaatttgctaattttgtgcttttgttagaacaactctttatgttgatttctccatgacattttgattaagagttttcaaggcttcaactaatggaaatgaagcagaacgactaaatcttgttttccgatttggaagagagaagaagaggggagacagggtatattgtaacctatattaaacaactcttctatctgctcttttataaattttcttctataacatgattgttggggaaaatattatgtttgacctaaagattaattctcaaaatttgagctgtaagtggtttgcagctctggaaattgtcaaataatccattggaggctaa

SEQ ID NO: 26286 - DNA, 837 bp, Glycine max
  Intron number 2 from transcript Glyma14g38580.1 (locus Gly ma14g38580) derived from phytozome v7.0 (chr-ID Gm14; pos 47722312 to 47723148)
aagctcttcaaggattacttcgttgacgagaggaagtaagtttttttctgtttcatcatttcctttccttcattcattaattctaaagtcatcatgtacgctataaaaattcagtaatgatacagtttagatacaaattttggggcatttggtcttctaattgaagaacaatgttggaaacactgagaaaatgttaggagtatgaaaaatatttgtaagtttgacgttgctttaaatttttgaagacatagtgtaaatgtttttctttttcgtaatcccatgttttttgtgttttactttctgatactacttttttttttttttggatttggacctccatctagtttcaatcacttgctttctgtttacttttcttttctgcactttactatgtttctttccttttttttttttttttggttttaattcgtgtttgtgtgattcctaaagtacctttttcagtttggtactctgattgagtcaactagtttttcgctttttctaggcgtagaatcttgaattggagatcgtttatctttgaatgggtatgaaagagtttagtttgaactagtggctggaaagcaaattttatactttgtttagtaataatgtattatgcttttttatttaattttgcaactgcagcttttttttatatatacgtcattgatgacatgatcctaaattaaatagccacttttacgaaagtgacaatttatgttacggagtagtagctaaaactatagagtttggcttagtatatttatttctaataaattaaattaaatggacaatgttataacaggaagcttggaagcataaagagcagcaataaca

SEQ ID NO: 26287 - DNA, 492 bp, Glycine max
  Intron number 2 from transcript Glyma14g15240.1 (locus Gly ma14g15240) derived from phytozome v7.0 (chr-ID Gm14; pos 16130821 to 16131312 reverse strand)
aggcctcgacatagaagaattggtaactctatctggtatatttattattttgacaacatatatatacaactttctaaattgttgttagcacaattttctaatcaaaattagtgtcccacatcttcataaaaaaaatagtgacccaccttaatgaattattgaaatgaaactaatttttaattgaaaaatagcacaaacaaaaccccaattgtaattgatgaataacacaaacaatacctataaatactctaattttgtccttataatttgttcaaattagtttaatcaaatgttaatattttggggctctgacaaaggaagaagagattaagcacgtagagttcttgcttgacaaaatacatgtagccatactataggaagagcaagatgtgtaagcttcaagcagagcatatatgatgcaaaagacgaatatcactatggctatgataactacaaatgatacataagtttcaggaaaatcctgcggtccat

SEQ ID NO: 26288 - DNA, 637 bp, Glycine max
  Intron number 3 from transcript Glyma14g07390.1 (locus Gly ma14g07390) derived from phytozome v7.0 (chr-ID Gm14; pos 5615667 to 5616303 reverse strand)
gttaacacaaattcaaattcaagaatcttttacaagtaaggcttaattatgtttttgatccctaataaatattttatttttgagtttgttttttaataaatttttattttgcgttgaatctctaataaaacaataattttgtttttgattctttatactttttatagtccctcataaactagtgaattttatgtttgttctcgaataatttttttaatttgggattagttggaactaaaaccaaatttattaatttattgaaaagtaaacataaaattcactaatttatgagaaactaaaagaaaatatcaatgatcaaaaataaaattattattttattacaaacttaatgtaaaacataagtttattagaaaagatacataaaacttaagcatttgttagggataaaaacatatttaattcactagtaattataaaagtgcactttgcttcctacttgcagacatccctaatcttgtagaagttttttaacaaacaaaaacacatttggcatttttgtaattttttttgtgctcaattttctcacaatgcggtttggatatgtgctgaacagaatatgaagtgccaagaaggagcagtgggaagatagcaagagaataccctatgcatatagaag

SEQ ID NO: 26289 - DNA, 757 bp, Glycine max
  Intron number 2 from transcript Glyma14g10940.1 (locus Gly ma14g10940) derived from phytozome v7.0 (chr-ID Gm14; pos 9145728 to 9146484)
acctaaaaagaagcgaagtcttccaggtcacccaggtcatacataaataatcaaccatatatactactattttctattttcttttaattgatagtggatttgctgcaaaaaccaacatttaatttatttcctacaactagtgccaatttaattcaccttattctgaaaaataataatttgcctttttcagttttaccagagaatttttttataggacattttgttttgcaatatacagcaaaactcaagtgctatttgttaaatgtttttagtgttgttcttgactgagaatcggtgtttcatttcagtaatttatgtaataaaatattgtaataaatatatcatctacagtagttatgaaagtaaaattccacttctagttaaagaataatactataaaggtacctaagtaattgcatctagatttttcatttgatatgacaaatatcttctacagagtttaatccggataaaaattatatacaataaaactcttcctctgactattacaaagacgtacaatcctacatctagattttatcttatattatatatatctgcgaacaaacacttaattagttgtatatataataatatatgctgttttagaattaaatcatgttgtagtatgcctgatctgatggcatagctagatttgaatcttagaattgtgtcggtctaaatttttttcactaattaattgctggtttaatatggtacagaccctgaggcagaagtgatagcattgactccgcgg

SEQ ID NO: 26290 - DNA, 548 bp, Glycine max
  Intron number 1 from transcript Glyma15g04400.1 (locus Gly ma15g04400) derived from phytozome v7.0 (chr-ID Gm15; pos 3074241 to 3074788)
gttataatatatatactccctccctctcttcatttgtaaagttcatgatcttgttcaacaactcgaaaagatttacatcaataaataatcacataaataaatttaacatcacataataatttaaaatcttgaaatttaaatttgtaagtcttgtatttacttatatgacattcaaatttttcattcttatatttcttttattatgtggaactttatctcatatttaaactttaacaaaattatgctaattactcttttatcaattatacacttatttgttttttaatatttaattattttatacatacatttatatgataaaatgagaagaaaaatagatgaaaaagaaaatttcatgactattttattaaaatcaacaaaatttattatctttgttgatttctatataataaatttaatctacacataaaagaaaaagagaatataagcgaagcatggtacatatatatgaaaatgtcttatggactaaaagtatatgtttgtttgattcagtcaacggggtctttttttccggaccaaagtaccac

SEQ ID NO: 26291 - DNA, 339 bp, Glycine max
  Intron number 2 from transcript Glyma16g17590.1 (locus Gly ma16g17590) derived from phytozome v7.0 (chr-ID Gm16; pos 19111340 to 19111678 reverse strand)
aggtaatgatctacatttcttttcatcaatattatgttttgcatcatgtcacccttccattatatcttatcatgtgagagcatttttataagactaattttcactatacaatggtctagattatctttaagcaacacaattttgatcattcatgtaagattgtatggttaaggttactcctttcacattgtcgatcttctcacttgatatgtttcctatgtatttagaaagaagacaactcttgattcatttttcacaagactatattgtattcaagattaacctgtataatttgtttgaacagcaaagagattcttcttactcaagattgacatctgc

SEQ ID NO: 26292 - DNA, 664 bp, Glycine max
  Intron number 4 from transcript Glyma13g24140.1 (locus Gly ma13g24140) derived from phytozome v7.0 (chr-ID Gm13; pos 27468967 to 27469630)
tgcctatagtgctggtgggaacaaaactaggtaagataattccattcaagtagcataacaatcatcatcaatagttaacaagtaatgattttttttttgttttacttttttgcttttgaggcaaataataacattgggtatatcaggtgttcagtttgtgcgtacaaaagacaatctttttgcagattctcaatttttaatcaatgtttgtgttagttatgcattattcactctgcaataatcctcctgtgaatcttcaatggatgcaatactcatcaacatatatccaattgaatgttatgacttatatgccatggcagaaaacagaggaagtaacactaagttacaaaacttggccataatggacttattttattttattttattggttaattgatatacaaagtttacccagaaaagaaaaaaaactgtctaccaaccattcctttgttttttgagaaaaactgttcctttgtttactctatgtatttaactttaatcagtttcatgtgtaagatcatcaaatatcttgtaaaatttcatatgatcgttacttacaaaacaagcaatacttataactttttctcaaacctaatactagtttcaatttaaatctcatgtatgcacagatttgcgagataacaagcaatttctgattgatcat

SEQ ID NO: 26293 - DNA, 553 bp, Glycine max
  Intron number 2 from transcript Glyma14g14450.1 (locus Gly ma14g14450) derived from phytozome v7.0 (chr-ID Gm14; pos 14565218 to 14565770 reverse strand)
ccacatagatttggttttaaccgacctaactctaggtcaaattatgacattttaattttgtcaggactaaaaacgtacaaaaaaattgtaaagatgaaaatcaaacttttccaattttataaggattaacaacatattttagcctttgcaagaattttttaggctatgttggttccttttattttctcttccatttaatttaaatcatgtatttaattaaagaaataaggtaaaatttaaaattaggctcaaatattaaagaacttattgacattgatggttctacgagaaagaagaaacaacaaagcaaagacgtaattctccaagacatgggtaaagcaccaatctttagatcaatttgcccccaccaatttctatagaaattggatgcaataggatgtttcaggaataagttccttttattttctcttccatttaatttaaatcatgcatttaattaaagaaataaggtaaagtttaaaaataggctcaaatattaaagaatttattgatgttgatgattctgcaagaaagaagaaacaacaaagaaaag

SEQ ID NO: 26294 - DNA, 743 bp, Glycine max
  Intron number 1 from transcript Glyma13g17470.1 (locus Gly ma13g17470) derived from phytozome v7.0 (chr-ID Gm13; pos 21257379 to 21258121 reverse strand)
ggtggtcatcgagtaaacgttgcatggagcagtagcgtggggtggtgtctctgcgtgatccttcaacatgcagtttcacgaaaataggatcgaaaactagggttttccaaaacttgcaaacgcacctcaaccgcaaaagtgttttctccggaagccatggcggaatttccacttggagctcgcaagggagaacaactactgcatcatcatagcgaccacgattcattctcgtgacaaatgtataccatggactgaaccctaccaccaataaatagccaaaatatttaacagttttcttcagaaaattaattttcatgatttcaacgttaagaggaatatctattttaaatttaaattttcatcttatcatttcttatattttaaatttaaattttcatcttatcaaagtgtacaagttatcaaattaatatttttaaaagataaatgatcaaattattaaatctacactacacaaaaaaggataaaggggtgacaatttaaagtaaaatatattagtatcgtgaatttatttgaattaaaatctattagaatatataactatctaatcaatttaatgtttttttttaaagaaatcaacctttttagataacaaaagaatatggttggtgtgaattgagatattttggctatttattttcttaatacctgggcacaggcccatacgtacatatgcattggttaattaaggtttctagaattcacaatttatggcattagtgaga

SEQ ID NO: 26295 - DNA, 692 bp, Glycine max
  Intron number 2 from transcript Glyma14g39530.1 (locus Gly ma14g39530) derived from phytozome v7.0 (chr-ID Gm14; pos 48622544 to 48623235 reverse strand)
ctcaacttggcaataggttatttcctgatccactatttttcctttgtttgctttttctgcatgtttatttttccttgaaggacctttctaatcattaaaattaatgattactacagtgcttatttgaaatctactaggctaggcttatctcaggaaatgattcaaagctctaaagatatattaagtttcaccaaacgcaccaacctaattgaatttattattttaataatacatacaccccaagttgtaattttctttattcatcttaggcacaagccgtggtcccatgtctcacacctgggagggaaagtaggcgtataaaaattgcagaataagctcttttcttttcattttatttttcattttttcaggactaaaaaaagaagataaaagaaacttctcatgattgcagttaaaattgactaaaatgaggtgtcatagacgtagaaaagcaaattttggccaaatttgtcttgtggggaatttttttgtgatttcgtagcttgcatggcatatggagcattttagtggctataaagtcattctacctttcaagtgatctccgcgtgaaccttatgttaatgatggaatctttctttcattttcgcgtgttttcttttgtaatcaatactatatactatttaatactactatatatcattttactaattgtcattttcctttttactcag

SEQ ID NO: 26296 - DNA, 912 bp, Glycine max
  Intron number 1 from transcript Glyma16g04150.1 (locus Gly ma16g04150) derived from phytozome v7.0 (chr-ID Gm16; pos 3536290 to 3537201 reverse strand)
ttcagagattgaggcacatactcagtatgatattactgatactttttatattttttatcatcagcatgatatatactactgatactaatatttgatggggttggataagaaaatttgtagtatcttttgattctataaaaggagatataagaaggttgatccagtggttggttggttgggaaagagtgaaaggaggaaaagagtttggttcaaaaacatttataacaaaactaacaaataaatatttttcaataaaaaagtttgatcttaaaaatttgtaatcacatgtctccaagttttggagagacagaattttgcatttgtttttggatatatatttaggtgattagttaagaaaatttatattttgacatctaatttcccgaattacataaaattacaaactagaatgccctcctcaaattttctttgggacatggcttctttggttttgcaccccattaacggatcaattcattttcttttggctgcaatttttttctttgttattattcattaattcaatttatttattgtctcctattttgttcattccaactttgaagaaattgatgatataatttcagttcgtcagtgcctatatagagaaatagaaattaagtcattctaggaccatctcgtgggatgagtggttgcaatggtttgagcgttttcctaaatatgtacagtttgaaaactataatatgcatccaatattttcgatgtatattctagtgatgtattgtggatttgcaatttattttctcttaagaatttaggcatttattatttattaattcatggttgtattattgtatatttaatttattttctcttcagttaaatcttttaatgtctgacttcgatttgataaaaaaatagtggtctgattctttaatatcttcagataac

SEQ ID NO: 26297 - DNA, 678 bp, Glycine max
  Intron number 1 from transcript Glyma15g39090.1 (locus Gly ma15g39090) derived from phytozome v7.0 (chr-ID Gm15; pos 45665439 to 45666116)
caatacaaagtgaagaagcagaagcatattcagaggtaaattttattttgtgccttttcaatatttcaattcaaatatattaataatatttatttatatttggcaaaaaaaatttaaaaatcgtcaaaatcttttagtaatagttttacaagtatcaagaaaaaaatgtgctaaagataatatgtgtaatattgatgagaaaatcctttcgcttaaaagatttatgcacctatttgttaccttggctgcaattgtttgtaaatcattccttcataggtttatacatcgactatagtaaagagagtagtgctataataatattgactgatcgtcaaaaagagaaaggaagagagatgtcgttagttttaatctttttttactaacattttaacaaaattaataactaatatttatctataaaataacgaactacaaaacaaaccatgtcatccttgtaccggtttccagatagaaagctacccagtgagttttggatatttttagaactgaaagtaaaaacttaaaaagaaatccttggaaacgtagttcataaataatttattgataaatttttttataaatttataaattcaacccaaaaaaaataatatacaaaatttttatatgttaaaaagttcacaagtgaataatttttttttttcagattttttaaaagtt

SEQ ID NO: 26298 - DNA, 722 bp, Glycine max
  Intron number 1 from transcript Glyma15g42750.1 (locus Gly ma15g42750) derived from phytozome v7.0 (chr-ID Gm15; pos 50180016 to 50180737)
tctaagaggtgaggttgatcatcctgtgttttgtattgggttaattgactttttcttgatgtgggtcttcagttttgtgttctgcagtttctccaatttatgttgattattgatttttatatgtttgtgtaaattattgttcttataatcctgctttcttgatctttgaacccgagaaaaaactattgtttttgttttccatctggggtgtgtcattcattgagcagaattcagaaaaaaagggttgaaagttgatactttttttcttgccccttttgttatcgaatttggaaaatctttatttgatttcgatagcttttgttagtggaaactcaatcaagttataatttttaacatatcattcattccagagacttctatggtcatgacagacaataaacctttcgtggatgttataaaaatgttgaattctgtaaaagcaaaatttggcattgatatctagtctgtggtttgtagttgacacttgatacgatttaactatgaaatcatttgaattgagccatttgttttggtttgtggaaatctggataaaaggttttaattggggaccttggtttttgattctttggacaagtgttgtgtggtccttttctttctctgttaatatgttctctattttctaatgcatcttgaagattattttaatttttgtaatttcttatcttctgaatcatgtagggttctttgcaagttttttgctc

SEQ ID NO: 26299 - DNA, 974 bp, Glycine max
  Intron number 2 from transcript Glyma15g01820.1 (locus Gly ma15g01820) derived from phytozome v7.0 (chr-ID Gm15; pos 1200962 to 1201935)
aagctgcagctccggccggaggttatgttccggctgatgtattaatgtctaagatcttacctgaaataaacaagtcaacaaattatggaggtctcatgttgtggtcaaggtactacgataaaattagtggatacagtacccgcattcaaaatcctctaagaaatgggacagcaaaccctctatgcacacggaaaagtcaagcatgtaggagccatgagggcggtttcgcggagcttcttggttacatgtccacgctcggtatcaaagtttatgaagacgacaacaatggaacacagtgctgtgagatcatatgtaggaacaactgttcctgcgacgcgtttgctcccttaaatcacattaacaatactagtactggatgtcagatatggctcaaaggaaccaaatttgttagagcttctggaaatatagctctgccaatcaacgtttctgttgcattgctggaacacaaaggtacatttaatttaatatatttcttttttttttggtcccctaaaggaactggttatggaacaaaaaatgcttactttttggctcctatggttataaatttttctcttttagttcgtatatttataaacattcatcaaagaatctagtttagttaattgaacaaaatatataaattattgtaaaattccaactttattttcaattcctatgaatcaaacagaatatttataaacaccatattttagtctttacatttatcacttttaatcttttttattccttatgcatatcattttaatttctacacacgttatcttctgcagtaaacagctggtggatttggctcatcgttggggtgggagcagcttttgtaatacctgtgatattctatttatcgcgtgccttcctgagaaaatacaaagcaaaaggtaagtaaaatatggatatggttttatgatcattttaagcattttaagactctttttcaaataacttatattttc

SEQ ID NO: 26300 - DNA, 831 bp, Glycine max
  Intron number 1 from transcript Glyma15g28430.1 (locus Gly ma15g28430) derived from phytozome v7.0 (chr-ID Gm15; pos 31170752 to 31171582 reverse strand)
caaacgcaaagacaaggtttttcctttttcatcaggtactagattaattttcatgttctgttatctgtttttgctgtgtttagtttcgatggtagaacgttagagtataagaaggctaagttgatgatgatgatgatcttatgttgatgacgtgtcggtctgttgtgttaaaatcatcaaagcatgttgttatggtaatgaaattcattatataaaaaattagatgagctaaattgattgctgagattataagtttacataactgtagttgcaggactagatgtttgtgtgcaatttatttagaacttaataaactcgcacagaaatttttcacttgttagcttgcattttgtgacattgatgtattgtcatacaagtcattcccaaatgaagataggttatcaaatgtgtgtgtgtgtgagtgagagagagagaaagattttagatgttatacccagttttatggccacacatgagagacataatggtcctctagccatggaaaggaagctagagttgtccaccaaatggcatttttctactgcccaaattcattgttctgtctcaaaatttgaagttgcttattcttcattataaattagtaattacttgacgtcataacgaatttttaatgctatcttttagtcagttatccaggctatcaatatgtaacttggcatttatggttgaccatagaggtgtaattcatttgtttccatctgtaatgaccatattggtgcattttattttgttgctcttgctcacactacctaccttgattccattttgttcacagggcaactgctgtacaattaagttgcattttgttgg

SEQ ID NO: 26301 - DNA, 710 bp, Glycine max
  Intron number 1 from transcript Glyma17g03830.1 (locus Gly ma17g03830) derived from phytozome v7.0 (chr-ID Gm17; pos 2526872 to 2527581)
atacgtttgcgatcacttgtttcgccattttcaaggttcttcattcggaagctccactttatacccacagtttcgtttctctgtttttttatttatttatatgtttactttcacggttgttgtagtgtggatttaatgttgccacgttttcagcttgatcgtttcctcatgaattacgagtagcagtagtagtagtaactgttaccagttgttttcatgaattcgcttttctcgtgaactttttttaaaagtactttttatacttttatttttctcatcggtcttttgatggagtctgagatttcaccgggaagtacacagttcaacatgcagtatgatactgtttagaagcttttttttcttttaatggtttgtgttcgtttttaattatgaatcgattttaattggtgaattgtgtgtaactttttattgactttcctctaatgaaacgaattcgggattccttggcacataatgttgtaattagtaaagtgttttggtctcttgactttttttgtgttgaagacccgtgattttgatgtggagcattctaacttcaatcttggttccttcatggggtatgagcgttaggtgttggttggttccacgttgtctttttctgttggtaaaggaatgcttctgatgctagctctcttagatttcttgtctgtgcagcaatatcggctgagtcacgcggggttgtgacacct

SEQ ID NO: 26302 - DNA, 853 bp, Glycine max
  Intron number 1 from transcript Glyma16g29880.1 (locus Gly ma16g29880) derived from phytozome v7.0 (chr-ID Gm16; pos 33521297 to 33522149)
gtattggtatctgatattgcctaccaaaaaaagccattgatgttaatgttttgcatgggaagacttgaattcccaaaccatgagcacatgcatctacagattgaattgtgaggacatattttggctatgtctcgagtaattttatattaatataagaaagtaaagtttgatatcaaaagaaagaaagagtctaacaaaatttcaagagtttagatgagattgtttgatgagtattttgtattcaaaagtcaattaaaatccatcaaaatctattataaaaaacaattcattaaaatttatatacttttgaatactaaaagactttttatgagttgtaaaaaatcttaatttaataccaaccgattttattgtactctttaaaaaatcataataatcttgattaaataccaaaagacttatttttattatttaaaaatcttaattgaatatcacttaactttttcatcataaaagagtcttttaaaattcatcgatatcttaattgaatacaccccccttagaatccacttaattaatatttatatgatagttcctaaaattggtcgtttggattttgatgttttgcttgtcattgttttctagcacttattttatgtatggctgaatgcaggatcccaatgatgataggggtgaaagtagactctatattggtaaccttgatcttagaattacagagtgagacttgctaactactcaccaagagttaacttcatttttgttttgtgcttcatgcacatactgacatacttactcttttcttttcaataatttccagagctgctctgcttaaaatgttttctccttatggaaagataatttccgaggacttctt

SEQ ID NO: 26303 - DNA, 777 bp, Glycine max
  Intron number 1 from transcript Glyma16g28370.1 (locus Gly ma16g28370) derived from phytozome v7.0 (chr-ID Gm16; pos 32338594 to 32339370)
gagcttgctcttacggatcccaaaagagctaagaggttatttttctttcctaaagaaattaatagtgataaatttaagtgcaatttaaattgtttttgtgttttcgaccataatcatgtcataaacttttgattttaatgttatgttatttatttttggaattggtaggtttaaataagttgtttctgctgaaaacaatatggttgcaaattatatgaagctttaagctttaatgttgccataagctttaagttattcctcttcaaaaaagaaaaaagctttaagttattattatatgattggagacggcgaagagtttaagtgtgactaacctcggactgagaaatagtctcgtagttggcttacaagacaaaaagttgtagcgacattttggggtcccaccaaatagccaaagacattattattattactattactaagggttgtttttattatgagaaaactgggaaagaaatcttggttggatgcactgatattggtttggaatgttgtgtgcttgcaggatttttgttagttggaactggtaatgaattagatttagtttttgtgtgtgcttttttaattttgtaatttataattttatataggttgtttctgctgaaaataaggtggttactggttaggaattacagtattctttatctttttaagttttgttaacggtgtttggactttggattgtgggaaaactgggagaagatgattggtttggtgcactgatgttggtttggatttgggatgttgtgtgtttgcagg

SEQ ID NO: 26304 - DNA, 635 bp, Glycine max
  Intron number 2 from transcript Glyma15g19690.1 (locus Gly ma15g19690) derived from phytozome v7.0 (chr-ID Gm15; pos 17073822 to 17074456 reverse strand)
gggtttattgcacagaaacacgcccattcaatcaagtgagcgcaccttttccaattatattcaatatttaggtataccccgagctcttttgagagaatatgtatcctcttaagttatatttaaataggatgatctgtttaagttgttttatgttttattatttgacaacttggattgatgacatgacttgagaacaagaacactgaaataataaatattcttcgatctgtatcttggtgatagttgtagtttatctaattgtttatatttcagcttaatagtcattcatttgaaaaggaaaagaagacaataaaagatctgggccaattaaactacaatactaaattttcattaacagattcagggtatcacaggtgatgatcattctgattacagagctccagtgttttttatgtatttattttttagggcagtggattaatgacatgataggatatgtatctttcttttgagaatgcatatctaacctttaatgtagccatgtaggctatctgtgttaagaattacatttccattccgcatatcaaatcaaagctaaaatgatttggagtatgcgcttaccaatcataatgtttaattgcagggatctagactcactgcttttgagttggtgc

SEQ ID NO: 26305 - DNA, 603 bp, Glycine max
  Intron number 2 from transcript Glyma14g09110.1 (locus Gly ma14g09110) derived from phytozome v7.0 (chr-ID Gm14; pos 7093024 to 7093626 reverse strand)
aaaagggtaggtttaatttttgctgcaaacataatatgtgtgagtatgtgtatagcttttatattaaattgactcattgacactggaccaatgattggatggattattatattgctatttatattcaagcactggtgagtctcgcatttctggcatttgtttatgtatattttactatataagtgtgatagtgatagcaattcagcaacagaacaccacacaggccacattgcagaagctactaacaggccaagaagagtgagtaagaagcccacttacttgctttgcgcgaaggctccaagtgcttgaagaatcttcctgagtttgttatagcattccactagtttgttggtagtgataattcttttacagcaatttgaatttctgttagctatagtagtataaatatgtaaaagaagtggaatgaaaaatcaagcagaacaattatctccattagtttccttcttagttccttagaagtagtatgtagaatagcgttcgtaacagatagtgtaatgatagggtcaataatttaagtggtccaacacccttgaatgcttgcttgcagttttcttttgaagttggaatcctcacagtttttgg

SEQ ID NO: 26306 - DNA, 1013 bp, Glycine max
  Intron number 1 from transcript Glyma13g11400.1 (locus Gly ma13g11400) derived from phytozome v7.0 (chr-ID Gm13; pos 14109434 to 14110446 reverse strand)
tcaaagtaaaacccaactctatttccttctctcaggttttctactaacccacttctttcgttctcttcttttggttcatagtaggacttgttcatatttcttgcgtgtggctaatatttatgatcatttaatgtttcgattcttttaagtgctcaatatttgcctaagatatgtttctgaattgagaaatttagattggtgtgctttgtgtaggaaaaatcgaaatttctgttgcttgcacaccatgtgtttgatgatatgcctgcacaaagcttcattcttagttttgtaatttttttttgtttattttaaggtttgtttgccttggaagttagatatagccgtggaagttagatatagccgtgtatttgaactgagatttaattgcttccttacattcctgtcctgtgataaaacatggatattgttattgcttctaattaattagtttgtgtctaagcttctttttatatggtttaggatagttttgggataaatatgtttttgttccatttaaatatttatattttttctattggtcccttgtttttgaaaaagttgtaatctagtcttggtaaaaataaaaaaaaaatcttttgcatatagtccttttttttgtaagaaacacatccccatggttaaagcttcccttatcttgcttggacaaaagcaccattgagtttggtccctttttgtgtttgaaattagcaggcttcaattacttaaggtgtggtgtagattaatattttggttttgatagaaattgaaattcgaagcaaactcatttatgcatttaatatgtatttatgactttgagctttgtttttggttaataaattggtttgatttcctttgttgcattttatacatcacaatttttatgatgtttgctatttgctcatgtggtctttgaaaccgtttttttgacacaagttgctgcccattgggtggacccacataaacatgtactctttgcttcctcaggtctcagagtggcaaactgtaaagttttg

SEQ ID NO: 26307 - DNA, 507 bp, Glycine max
  Intron number 1 from transcript Glyma15g18640.1 (locus Gly ma15g18640) derived from phytozome v7.0 (chr-ID Gm15; pos 15576849 to 15577355)
tataaaccaaagatatactatcttcataagcaaaggtaaatcattcatgtaagattttttctgttgcttttgatgaagttgtttgttacataaacatatctccatggtgcccccatcaaaaccaaacttgttttattcattgggttacatggttaaaggttaaagaaagaaagactaagagatgatggaatatgaatcactagagttatattatatgcatcatctatttcattttcttcatttgaagtttgcaccaaaaaacaaagaaagaaagttttctttcaaatcattgcgatcctggttgtgatagattcttccttcttttgttctaagacacttgaaacaagaacaattatggaatgaaattaaccctacaaaatgggtagttctataaaattaaaatttctatggtggatttgtagtctaattacatataactcatctaacactaacatgtgtgttatatgtgcaggactcaaagtaatagttttctttaaaaaaaattga

SEQ ID NO: 26308 - DNA, 826 bp, Glycine max
  Intron number 1 from transcript Glyma15g13550.1 (locus Gly ma15g13550) derived from phytozome v7.0 (chr-ID Gm15; pos 10146510 to 10147335)
actgttttgttcaagtatgtaaatttacttgcttattcatcctccctttctatctaatttagttaatcctttcctgctttaaatgacaaatcccacaattaaaatcaaaataaatcccttgctccaattttattttttttatctctgagtgggtttattagtctcaaataattaagctcgtagtattttgaattcttttatcactttaggtactctttttccatttaaaacatttaatgagtcatatttgagtttgattttcatgtattgttggtataaaattgtttatactattaaccaaacaaaaataatttaggtatgacttttaacttagttattatgtaaaaaaaaaaaaaaacttagttattataggtaagtttgtttaagtttattttaaagaaaaatccttattttaataaaataaatcattttatactttatgatctgcctgtctaactgtttttactttttctttacaaccacagctcctctgtaatttaaattcgttatattttgctattagacattcaaataatgcatgagatcataaaagcagggaacaccttgtttatttcaacaaaatcccacaacagaacgcgaccttataaaaattatacccgaattttattttattttttaaagaaaaaacgtttgtctcgtctcaaattaaaagtaagtggtttggattttggaatgtcgaaaatttctagtgggaactacacaaatgttcaagaaaagaaattgattcttacttcgtcatgtgtatttgttgagaatgaacaagaaatgaattatgttgtttatgcttgtggcatgcaggggtgtg

SEQ ID NO: 26309 - DNA, 410 bp, Glycine max
  Intron number 1 from transcript Glyma17g02070.1 (locus Gly ma17g02070) derived from phytozome v7.0 (chr-ID Gm17; pos 1299936 to 1300345 reverse strand)
gtgttcttttcaagtacggtcccaatcctattcaggtccgttaccttattacttttttttttatataaaaaataattaaatctgatttaatcgtggatgattttgattttaaatcagtaaaatattgcacctactcttctacattggcttcggccttcgagatctctgatttttcaaacaaaccaaaaaaataagtagcaattattcagttagtgtgctgtgtaagcgttaatgtcttcatgctttttcctctattgtgttatttcttttgtgattctggttcctgagatgccatggttctctttacttttcaattcctccttttttctgatttttgtgtagtggcttctgatagatttttatttttatttgcaggttgcatttaagactggtgatttcaagcggcaagt

SEQ ID NO: 26310 - DNA, 684 bp, Glycine max
  Intron number 1 from transcript Glyma14g24290.1 (locus Gly ma14g24290) derived from phytozome v7.0 (chr-ID Gm14; pos 29099557 to 29100240)
cattcaggttcttgactcccttggatttgaacttttttctgtttttcgtggaatgtttctctttggttgctttgtgtacatgatgttataattataaaaaaggaattagtacttcagagtatatcttaaaccttgtccctagtttgagttcttatgttttagtgtaccgggagttgttgtatctccttaaaattaggggttaactattaattttgaatgtgattttttatataatattatattcaagaattgaaatgcacttgtagtttagacgtttttttttaaatatgttgtcatctaatcattaattgacatataattggaaattcttgacttttgtaatcattactttaaaagtcacacctgagattatttctgattggttcaccgtggaaaaaaatctatacaaggtcaagtaacatgtatcaaatttaaacacttttcaaagtgtattgcatttttgtgttgcaatgaattttaataaaaaaaaaacttattttgtttttccccctttggtgggagtttatgttatttgttaagctccaagtatgttttgcttgtgggagatttgatctgaagatgtttagaatgaattttggttgatttaacatgttgaattacatgataaatttggaatatatgtgagcagattggttttctccagcctcagtgcatcgacttgag

SEQ ID NO: 26311 - DNA, 998 bp, Glycine max
  Intron number 1 from transcript Glyma16g32760.1 (locus Gly ma16g32760) derived from phytozome v7.0 (chr-ID Gm16; pos 35898067 to 35899064)
cgccctacgatctcgccgtttacctcaaaacgacggtactcttcgaatccctctgctttcatttccgccgttttcgaaatggaaaacaaatttgaagtttagatggcgtcgtttcgatgtgtggatttactcgagactgtggaaatagaaaatcgtgtatgcttataattttttgacggcgtcgtttcgatgtgtggatggatagggattagaggcagtgtttactgttttcaaagagagaaaagagagagagagagagagagagagagagagagaggaaattatgacaaagtgaatgttcgattttggttgctgacttgtgttgtttcgtttgtgtgagttggtccctgaagttgttaatttgttatggagttcactttgctgaagctgttgactatgctgagaagttgttcattaggtctgaaattgtgtgtttagtgtgtgatcctttttaaaatagtatgtgatatgatgttcaatttgtgcatgagtgatttgcccattgtttcctgttatatgcagaaccaaggttttcaaaaacagccggtgactttttggggactccgtgaccgcaattgtggccgcatcgtttctgaaagtctgtcttttccatgacaaataataatttgtggactgcatttgatgggccttaattttttttagttaattttattactgatttcctttcatttttgtagagagattggggcggtggtgatcggttgatttatttatttgggtgttcctgaattgtgtgttttcggttctgagctaaattgtttgagatcagcacttgtatacgttatcatcaatatatgttatgatcaatatctgaatcctaaatggttgaaatcagaaaagtagttgtggcagtagtaatggatgcattgaataactctgtctctatcatctaattttgcaagtagaggttttttttttccagcttatctcaacaatgtttataaggggtcttgttcaattttctgaaactgcaggac

SEQ ID NO: 26312 - DNA, 709 bp, Glycine max
  Intron number 1 from transcript Glyma15g14860.1 (locus Gly ma15g14860) derived from phytozome v7.0 (chr-ID Gm15; pos 11292700 to 11293408 reverse strand)
accaagatcaagacaagactaagaaacagtaagtgttgagtaaggaaaatgacaagtatacagttttgttgttttttttttctttcaaaaaacttagatgcaattcattacctgcttcttcattcaagattaaagttttacgaaaattattagaatgaaacttcaattttgataaataataaaaaaagaagcagttttaggtgtaggagataataacaagagcataaaaaagagagttcattgaaattgtgaaaatataataaattatttttatataataatttttttaatataaaaattatgtgaaagtagatgaaaatacgaaaaagatgtgtgaatatacagtttagtagattataattatcggtatttcttttctccaattgaaaattttcttttatttaattttctctatgctattcattgccttaatatatgacaaagtaaaaaggaaagtgagagatatacgtcagcttcgggaaattcatgaggcagtttctgttctctgatcagtgaagttaaaatgtggctcccgctgcttttatcgttgttagtgtcgactctgtttttgttttttttttttttcccatttcttattattgacaataataccgttatttgagagggaggtgttgactactgtttaattatgaacaaattttgtaatctaacaggctgaaaccgaagaagaagaaccaaaagaagcaaa

SEQ ID NO: 26313 - DNA, 404 bp, Glycine max
  Intron number 2 from transcript Glyma16g05830.1 (locus Gly ma16g05830) derived from phytozome v7.0 (chr-ID Gm16; pos 5205596 to 5205999 reverse strand)
cctgtgaaaacgcaactgttattcaggtaaagcttgtggttcctctttgtctaggtttcacaaaattgagttgacaattagaaagattcttcttttttcttctttcagtttttcatatgatttgatttgatgtcataaagctggtgttttcctctgttttggtttcacaaaattgagttgacaacaagaaagattcttcccgttttcttttttctttcaaattttctaatgatttgatgttgttgaatccttggttgtattttttttcttttttctttttaatataaaatccaaaattgtttcctgagttgatttctttttaggaataataataataaatcaactatccacttttttattatctaaaatttaaatacttttgcaggttgacagtgtcaacaaac

SEQ ID NO: 26314 - DNA, 546 bp, Glycine max
  Intron number 1 from transcript Glyma16g05830.1 (locus Gly ma16g05830) derived from phytozome v7.0 (chr-ID Gm16; pos 5206003 to 5206548 reverse strand)
aacccaccaaggtgagttgtttttgtttcacactctttctttcttttttgttttttggggacagctttttatgttttgcttaattatccaaatttggcaccacaattttattacttttttttttggtttatggaagttttaatcaagtggggcataaaattaaacctcttttttgcagtttggtgctttcagttttccccactgatagggaagttccttgcttgattgattcttcttttctacactctcactcttcagtttagtatcccatgtaataattagcatactatgtttccaaaacggttttttttttttaagaaaactatttttggtcaactgtttttagatgttgaatttttccttacatgtgttcataaatcataatcaaattagccgtttatggcatgatttttcaggtgatttgatgtgataatcgttatttctgtgtttgagttcttgtgtgtgtatatcatgtttatgtctataagattggtgttgttttttgtttaactagcttattgctatgcagggttgtgattgacaaca

SEQ ID NO: 26315 - DNA, 364 bp, Glycine max
  Intron number 1 from transcript Glyma16g32620.1 (locus Gly ma16g32620) derived from phytozome v7.0 (chr-ID Gm16; pos 35800256 to 35800619)
ctcttagatcccttctccctcttgagttcatcaaggtgtgaaaaacctatgttcgtttgttattttcttctttttctatacattgtcttgtagaactctttgattaaaatcactcaattatttctattttagtggatacccttttggaaatcatgttactccttcatctaattactagtattaacaatttttttccttaagaatctaaatatattgaatctcctatatttctgtgattcacacaataacagctgttttttgtttttcctttttttttttggttatctgatatggttaaagttttctgggttgtttagggttattgtgatggttttttcagggaaagcgttcaatatctgaccac

SEQ ID NO: 26316 - DNA, 733 bp, Glycine max
  Intron number 1 from transcript Glyma14g07920.1 (locus Gly ma14g07920) derived from phytozome v7.0 (chr-ID Gm14; pos 5981472 to 5982204)
ctgtttacacaccagacgtgaacaaagagccacaggtaataataactacatgcaaaacattttctgatgcgtgcatccctgcctctttttctatacactcccgtctttaattataacacatagatgacttatttacatttattaaaaatttaatttagttattaacattaaatttatttataatttctaatatttttttttaaatttattcttaattttatttgagaatctattcatcttcttcgattttcataaaagaaatataagataattttttttatcaaaaatcaattaatgcataaaaatgatgaaatgaaatctaataataagagacataaaattttgttgactatgtcttattagggaaaaacatatcaaatgagtatatatatattttttttgtgtgaaaattaagaactaaaaatatatatagattattagatcatatttgaatggttaaaattatacaggtaacattgaaaagttttcactgccacgaatgtgcccatatatattcatacagagaaaaaaaaaaactaggaccattgttgtgcggttatgtgtgtttattttagtcattttagtgacgtgtcagtgcctaagccattattttttcatagtgttgcttagttttgttggtccttttggatgctaaatcgtaatgctgcatatgtattttgatttcagatattccagggacccatttttcagagtccaaaagcaaacccggaaa

SEQ ID NO: 26317 - DNA, 787 bp, Glycine max
  Intron number 2 from transcript Glyma15g05770.1 (locus Gly ma15g05770) derived from phytozome v7.0 (chr-ID Gm15; pos 4096320 to 4097106 reverse strand)
ttttgcagtgtctgcaacgcctgctgctgctcctggtatttcctaacacattttaatccttctcgcttcccgtttatgccatgtaccatctttggtttcctatttttatgttcagttttgtaccaaattattacggttgggcttggtgggggtgtatatttgtttagtcccaaaatattgagggctatatctgatttgttgttttctttcttctggctgtctagataatcattttgtggacagttttcaaattaattaaacatcattatattgtatgtacttgtggaatgtggaccttacggcatttgctatttgcagaatttctgttcatgtgtgcatgcactactgactttcacaaaattctgtttaaagaatcgggtcaataatttaaacttgattgtcggcattattcattcttgtcaataatttagttcttcttttcttttgggggatttagtgtatgtttatttgattacgacaaagaggcatttgattttctttacggtacggcatcatcaaggtagaaggaaaatcaaaagctgttatgttattcatcctatatatatcttctgcgtgtcaattaagcatgttattcatcaatcacttgttcttttcccacacatgctaaccgtgtgttaataatctattgagttgtgtaaaagatcttgaagcttctgatctttgttgttaggtactcaatttctcacatgattggtgtttctgatttgaatcattacaaattttgcttgcaggcccctctcctacatctgctactgcaactattggg

SEQ ID NO: 26318 - DNA, 727 bp, Glycine max
  Intron number 1 from transcript Glyma14g39130.1 (locus Gly ma14g39130) derived from phytozome v7.0 (chr-ID Gm14; pos 48242022 to 48242748 reverse strand)
gcgatacaagtatgtaaatatgagttttttctttgatatagaatatttgatgctgtggggaatttttgtaaggaacatgagattgttgctggttttgattgtacttgtgtgttttatggtttgttctggatttccagctaaaaaagtcttttcatttgggtaggatatgtttggttctgtttgaaagatacaaataaaaagtcaaataaaataatgaaaaaagatacaagataactttatgaattgtgtttaccttttctcaaatgccaaatatgtgtagtttttaattttataaattggataataatttttataaatttttggaaaagtaacttttgaatgtttcaggtttggttaacacttaacacagtttgttaagaacactttgcctgcgtaaggtcttatgaatgatctaatcatcatcaatttcgcattttcccttttcattaaaaatagttaaaaaaggtcatttaatgaagaaattgtgattgctgattgatatttactatgggatgaatgattcgttgctggataaatactctttggttatgatttcatttaactctacttgaattttcaattatgagaaaattgtctttttcttcttgattattgtgttatgatttcatttaactctacttgaattttcaattatgagaaaattgtctttttcttcttgattattgtattatatttatttgctatttggactggatgcagggccaaa

SEQ ID NO: 26319 - DNA, 861 bp, Glycine max
  Intron number 1 from transcript Glyma13g21210.1 (locus Gly ma13g21210) derived from phytozome v7.0 (chr-ID Gm13; pos 24712343 to 24713203 reverse strand)
ggcgttggaggaggaacggtatgatcctattatctctgccaaattttaacctctttgtatattaccttattaaggtcaattagtctagcagttaggaaacctgaaattcaaatgcattgcatgagaaaatgaaccctatcatttccattatttctgtagagatttacagtttcaaaaaactatttattctcttgttgattgttctaagtgaacaggttcttccttttataaagaaggcagttcctcttatacacctctacgacaaaatttgtcacatttatgttaagtgtgttatattgcctagtagactaactggtcttgatctgataaaaaaagctcaaccttgaatcacctttgaatattagattcaaaattagatgctctttcctcttgaccaaaatacttcactgttttgtttacattccaatcatagcttttgttaacaaaccactgaaattatgaatttcctgcattacttactggttgtataattgaattgttatatggtttgacatgaaacatgtagttctataattgcagaaagatgcactcctacctccacttatactcaatattgttttaatattaataatagacgtatgttttgacacaatgtgcaattgtaggcttgctgtaatgtattttctttttgcatattattcgtgcccaaatatatgtgcttatggtatggaatgtgtgtccacctgatttctgattccatgtcttttccttgttacataatgataattgataacacttacagaaaattcaggatgatcattatgcataaatccatgatacctttttgttggaaaatttacttgtcaattgatgaggacatgcttaaattattgcagccct

SEQ ID NO: 26320 - DNA, 899 bp, Glycine max
  Intron number 1 from transcript Glyma16g07750.1 (locus Gly ma16g07750) derived from phytozome v7.0 (chr-ID Gm16; pos 7011058 to 7011956)
caggagcaagagaaaaagtggttgcaattgagaaagtagaaactctgaaagatatctgaagaagcatttccacaagttgatggggtggacaaaaataaattttagtggggcaaaatgtatatggaagaggaggaaacaactcaaatggggctcagagactattgaaaaaaaatcaaaacttattcagaaaaacatgatagagacaacagattcatggcagaaaaaagaaaaagaaaaacatagagaacatgtaattctgattccagaaaagactgaaggggaagcttcaagcaaaaaagcagaaaagagcattggagacaaaagacatcctgagacaggaatgtagaaaaagaagagaaaaatgaatcaagtttgatgcctaataggagtgataattttttctttttttaaaattagtaatgatgcactttgtttaaataatatggaaaattttcaactttgcatgagaccgtatttaatttagataagttattcgtattgatgttataataaggttgttttgtttaaattaaaagttatgagctgatagccttcctttctgcagagtgtcccattagttaagtcagttacaaatattggatgtgaagaaataaaatttctacaaaaatttggaaatgatgtaaattctaaatatccattggttgtgacaactaccaaagaggggcagataccagaaaataaagttcccaaggtttgagaggaaataaaaaaaataaactaaaagaaaaacatagatgctatcttgcattttcaaacttgaacaagttaattatgttcccctgataaaatattattttcattgcattcaacatctttgagctctgacactatttgttataataggcatttggtcaacaccaagtgacagaccaaacaag

SEQ ID NO: 26321 - DNA, 959 bp, Glycine max
  Intron number 1 from transcript Glyma15g24060.1 (locus Gly ma15g24060) derived from phytozome v7.0 (chr-ID Gm15; pos 24621108 to 24622066)
acaccaccaacatcagtgttcaaaattcctttcctgtaagtattgtttttctctctgagatcttctatctcaattttctcccttgtgttcttttttttttttttgtgatgtgtggtagttttgtggaaactcttttagtcaaggtcaattgtattttagatgtcttgaaaagtgtttttcatctttctttcgtttttttttaccaattttcttttggttttttgttgttgccctttttgtgaagacatgaattttctgaatttgacattggtttgtatctaatgcttttcatcaacgattataatatttccttggtggaagaaaatttcctagcaaatgaaacatgactatgatatatggtgtgtgtctaatctagtaatatttgtttggaattggatggtacaaaaatattggacagtaaatgtaaacttttttcctaacaaccaattttctcttgtgatggaatctttgagcaatgatctgatctcggggttttgtaattatggattttctcgcatgtgtttttgaaaggctagatggtgttagttagaagtggttgtgacagaaattagtttagtcggcatggatacactgtagcttactttgtgaaataattgattgtgttgccgactgaatcagcttgcatagctggcaattaaattgtcttcgtttgttgcattcatttttgtacttaattgttgcccacagaatttgttggtgttctccgtgagtttacctttttgagatgaaaggaaataactcgaggaataagctttaaaaacaaccccatttttggctctctgttatgttgtgttttgtgtatgtactcagagtaaattcttttactttttattgctttcttgagtttgcttagcagattcaatttcctaacttctccactgtttctgcttctatcatcttaattgccttcttctgtgctgcatttagctagaaagcat

SEQ ID NO: 26322 - DNA, 359 bp, Glycine max
  Intron number 1 from transcript Glyma13g20930.1 (locus Gly ma13g20930) derived from phytozome v7.0 (chr-ID Gm13; pos 24430685 to 24431043)
gctggctctggcaaggtacaaagcttccattttttttttggtttctgaatgaagtttattatcatgccctttttaaaaaaattaccactttctatcattgaattattcatttctttgagcaatgtgattcttcttgatgggttgcgcttactagttcctaatcaattccattgttgttttgccgtgtataataactcaatgtattgtgatacgattttgtgtatgataatctagctggcatttatttacttctgagttcttgttcgtggtaatcggtttttattgtgtatattgatattttccttcctttctgtgtggatgcagttctttgttggtggcaattggaagtgtgtaagtgt

SEQ ID NO: 26323 - DNA, 847 bp, Glycine max
  Intron number 2 from transcript Glyma16g08360.1 (locus Gly ma16g08360) derived from phytozome v7.0 (chr-ID Gm16; pos 7688917 to 7689763 reverse strand)
caccaggtatataaatatatatatatatatatatatatatatatatatatatatatatatatatatatatatatatatatatatatatatatatatatatatatatatatatatatatatatatatatatataatttttcttttcattgtttttgctttattacatctttgggttactcattattagtcattacttattacaaatttacaatcacttgactgattgagttctgaattctcttgtagttgtaaaatttgtgatgctgcatacttggaagcattgctaattaactaaacagtggcgtctttgtaaattacatataacatatttcaccaacaaactgcagtgaaaagggatatatatttactgttgatttaaagtgtctcctaaatttaacttgcttttaatcaagggtagatacattcttttttcttactttaatatatgttcactctaaggaaggagacaaatccataatgcaattacatacaaagatagggattgcttggctacaaaaacaaattcatgggatgagaaagattgactttaatttgaatctttgatggtggtaattagaattgagtttcttgtagagacattgttgtcttcttgtttgcatttatcgacaatctcttaagtaacttttcttttttaaagtaatgtatgatatggctttttttttttttttaactgtgtttgaaacttgtttgtgcttgttgaagttctcttaattattagtttgatttatgcattggctattggaaaagttttgtgctgctggctatgacaatgtgttgtccttggaagtttttaaaccaagttttctgttttccccaccaggttctc

SEQ ID NO: 26324 - DNA, 929 bp, Glycine max
  Intron number 1 from transcript Glyma13g27260.1 (locus Gly ma13g27260) derived from phytozome v7.0 (chr-ID Gm13; pos 30435809 to 30436737)
caattctctctaggattgaccgtttggataatgtaagtgcaccatctttagtggatttattttgcttagctttatcttcatgataattaatatggttatgcaattcttctttgaagagtataactgtgtaagtaatatactcttaacattttttaagcacacattcgctcatacagtgggaattcatgcatgtagaataaagaggtaaacatgatttcagttcaataattttttttaaaaatagagtattaggtagtgtgatgttattcttttatattagaagttgaaagtgaattttaagtatgttagttttttaaagtcacttcttaactcacaagcaaggtagagggggaacaaagactaaaagggtggatttagacataaggtattgatatttttaaatagagaaaaaatagaattagacagttattctcattatatgaacagtgtagagtagaagatgcttatgcaattccaaaattcttatgattcaaactaaattactttgtgaaagtttggtttaccaaattttagtatagagttacacaattttgtctaaattaatatctttagccacggaagagatcgagatacttaaacttcttttgtcaaagatttgcgaacaattcacatcgatgcactaggtttgtatcattgtacattagaaacaagttgttgttgtttttattatgaaattgagcattgcaaggcttttcctaatggattatacaacaacttcataattgttttttagtgcactgaaaagcaccatgttttcttaaaaaaagggaaattatatagcacaagttaatttcatgttgggtcatagtccttgaataaaatagaagttttgatatgcttttcattttcattttttaaataaaaatacttcagttgaggcaattggaggtaatcagagggtgcaatcc

SEQ ID NO: 26325 - DNA, 656 bp, Glycine max
  Intron number 2 from transcript Glyma13g36980.1 (locus Gly ma13g36980) derived from phytozome v7.0 (chr-ID Gm13; pos 38175825 to 38176480 reverse strand)
tggaatctgctgtacccatccagagaagttgccaggtcaattaaatacaagccagttgagattattgatttccattatcttttactctttcaacatttctaacgagggatatcgatcatctcatctcctataaatcacattttaattttcgttattatatattgtttgccaagcataatatatatatatatatatatatatatatatatagtcagacgtttgttttctttaaaattcagtaacttcaaacgaagaaagcatgagctttgctgaagtcatacttttgggcagaagacgtgaccattacatcattatgttatccatttttataacatcttttattttgttggatacaaatgcaagccacaaaaccttgcgtttacaactgtttctcttccttgatctggcacaagaaagctcttcatattatatatatataaaaaaaaaatagttttgaagaaaattataagatatgcactaatggtgtaaaacagttttacagtgtcatttaatcttaaattatcttagaagtcatataagagatggtgtttgattggttgacagtaaataccttatatggtatagttttaatttaaactttgatgtaaactaacatcttaatgcttcaatgaaattgactgcaggagttagcaaag

SEQ ID NO: 26326 - DNA, 608 bp, Glycine max
  Intron number 1 from transcript Glyma16g03660.1 (locus Gly ma16g03660) derived from phytozome v7.0 (chr-ID Gm16; pos 3077912 to 3078519)
gcttcttctctctaaaactgcatccttggaatcaggcgagacagagttttcttcattctcgaaagtcgaaactttcccctcattttcattcttctttcagttatcgccatccttcactctttgcttctaataaactctctatttttgtttcttgaaggaattagggtttttattttcttctttttttctgtgtcgttttggtaattaatctgataaccgatgattttctttggtttcatgcgctggaagtgtttgattaggtttacatgtcatgatatttttttttttttgctggtaaactttttagacttgcgtggttgataatcgctgtttgtatttggctgttgtttgaagttttatggtttttaaggttcctataattaattccatactaatggttttggttcctcatatttttcgttcttgttaatgttaaatgtcaatgttaatgtttatcattcttgctgatttgattttgtttattctcaacggtagttgaatcataattgatgaatttgcttggctttctgaaaataatgatgtgtttgtgtttgtgtttgtgtttgtgttagttcagattagcaaaggtaggtagttagttatttgca

SEQ ID NO: 26327 - DNA, 564 bp, Glycine max
  Intron number 4 from transcript Glyma13g37070.1 (locus Gly ma13g37070) derived from phytozome v7.0 (chr-ID Gm13; pos 38243881 to 38244444 reverse strand)
accctcaaagtaatcctctaagttcttttttagatatagaatttaattttgattctatttgattgtaaaaacttttgtacttttcaactaattcaatagcaccttatattgaagtaatttataggttttatgtgaactgatgcaaaacgttcaagaacaaataaaacaagctgagaatgatagtaagcgataagaaacaaagcaacagatttcactatatgagcatgaatacagaaaatatagattgttcacacacccctccctccaccatatctcactctcagattctgaccctatgcattttttgttatatctcattgcgtgactattttaatttttaagttcctgctttgatgagtttatgagaaccattcatacttgagaagcattctcataaccttaagtgcagtggtttaggacatgattccacaaaaggattgaatttcctaattaaattcttaatatgtcaggtcaggtccataatttttttataccgcctaagtaattagttggtcttttgtggttgcaggtagttcctttccttctactaggagcggagtacgg

SEQ ID NO: 26328 - DNA, 863 bp, Glycine max
  Intron number 4 from transcript Glyma16g17500.1 (locus Gly ma16g17500) derived from phytozome v7.0 (chr-ID Gm16; pos 19009653 to 19010515)
ggtccattcgaactgccattgatactggttgtggagtgagttttttttcttctttttcttttttggtatttatatagagaattccttgcaaattacaattctcaaagttcctgcataaacaataaatttctagtttaattacatgtgctgcttcatctacctggattcttacgggctcctactaaataattaaaataactgtaattagaattgtcagtcattccaacgatgaattttttttatcgatatcagttaaaattttaggttaagaatgaggaagagaatgttatgtaaacaccacataataaggtttggtcctattcatccattctatatatattccatcccaaaaagagaaaaaaatcgaaacaattgggattttttggagaacagtgggagatacatgttacaccatgacatcatagagatatctcaagaaatgacagatctattcactctatcaataactgagccggatctggtgtatcataagggatttgctttttctattgattcttccggattgggtcaaaattttttttaaaatcaatttaatttttaccccaaaacagaaaacctattagttttaatttacacctatttagaaggtttacagtaggaagaataaggagggggacagtggattaaagcacttccactgtattcttcatgtattgtacattactgttctccctctaaactagggatttggtaagtgccagcaatataattcctatttcatccttctaattttgatctagttttactaatcaaacatgttatagacaagacatacgttgattaatccacaattctatttcactttaggttgctagctggggtggtgacttgctagatcgtgg

SEQ ID NO: 26329 - DNA, 866 bp, Glycine max
  Intron number 3 from transcript Glyma15g17330.1 (locus Gly ma15g17330) derived from phytozome v7.0 (chr-ID Gm15; pos 13697995 to 13698860 reverse strand)
gcagctgttaattttgatagtgaagctccaacaatgtagcagccctttcacttctagcatcattttttttaatttattttatcatggttttcttcttattcatggaagtatagttattgtgtcatgattattgattaacctcaattactcaaatacaagggagtgcaaatctctttgcatgataccaattttccaaaagattccaccaatatttaacttctctgcttccatctccctctaagaatgatgttaaagatagcattgattttaaatttaaagggttcactgggatgtgaagattttaaacctcagttctgctaggtttcccactcaaatgatgactgtgacagttaatttgaatttcagggactggtaaatataattatggagaattatggcttgaacccttttggactccatgctgtgagcaagatctgtatttcttgatagttgtacacacactgactcatacatgcacgaataatacttgttttgctggggggtggttagtcttttttgatgtctagaacattggtgggggaacagatgtatgttggggtatcatggctctgttccaaattttttcctcatgtaatttgaacctgtcttgggttactggaccatttgtctttcgggttctctaacttgaggtatgtacattgagggtatcacttatacccttagaaatacaatattttcactttgctgataaaaaaaaaaacaaactgactcatacatgcatagatgcatgaagacttataatggcttaatcattttattgtgtttcttttctttatttgtgtaattttgtaacttctgttttcatttcagatttgataagatcataaataaggaaatcccttcga

SEQ ID NO: 26330 - DNA, 633 bp, Glycine max
  Intron number 2 from transcript Glyma15g17330.1 (locus Gly ma15g17330) derived from phytozome v7.0 (chr-ID Gm15; pos 13698884 to 13699516 reverse strand)
aactttaatcttcttctccctcttcaaccacgcaggtttctattttttttcctcgcccttttcttcgtttgagcaatttgtgttaattttttggactgacagtgaaattttagcagtgaagaacttttgattttgtaattatttctgaaaataggaaatgaaaaaatgttttttttcaaactaaacctataatagaaggattaacgagcacacattcccgtgcatgttttgtgagaagtaggaattcagagctttcgattcaactgtcgtttgggggccttccaactttaaaccaaacacgcactagcactaagtgtttttataaattgacttgcctactgttacttcaaaggatgtatttgaattttgattggcattgatacgaatgcgggtgattcatcgtaaactgagtgtttctgttgatttggattatacatgtttgatttttatcttatgtgaacttctgttctaacttgaccacacaaacatttgttttgaagccatatactgtttgtttagattgtcatattttcattattccccctttttttggaataagttttaactatgctctgcttatggttattttgcttactttttacaggttggtctctagtacctgtgctgtgaaca

SEQ ID NO: 26331 - DNA, 986 bp, Glycine max
  Intron number 1 from transcript Glyma13g37350.2 (locus Gly ma13g37350) derived from phytozome v7.0 (chr-ID Gm13; pos 38466563 to 38467548)
cataccactcctcctcttccccaattctcttatccgtgtaagtatctcatacccttctcccccccccccccccccccccccccctctctctctgctactgtcatggggtgctttcaattgggttgtgttttttttttcctttggctctttggttcatctgggtattcaaatcttcaataaaaacatgtttcccccccccctaattatcagggaaagctttgtcttttactcgatcgtctgcctattattttcaatcacggtttgtttgttgcatcttttttaatggcgtttgcagaggtttatgttgaaaactgaaacctagtattctctttttctgaccctttatattcaaaatcatggagttttagacccttctttttctttctgccatcaacgtttgttattgttcacttttttgtgcctattaaggtattttttttggctggtcaccgttgcttttttacccttctcatgattttatttttctcaattcaacaagtttgatttgatgcttaaattgtttcagtggattgcaccctggtctttgtttttcagtatagggtccattgttcgttgattattcaataatgattattggagagagatttaatcgccattggaatttctgaaaatttccactggaacgatttagccaatggttttatattagaatttgctgaagaggttctgggaattgaagatgtcaaaacaaaattcacactgattgtctagcggtgttgtatagagctttataataaagcatgaatgtcttgttctgaatgcaattttgtttttatttacacagtttctaggatttttttcccttattaaattgtttactgatttagttattttaaaactttttagatcttattgtgttgatgaaacttctttatggaggagggattatctattagcagacacttacaattctcacactttgtttttcagaatctggcactcttcagagaagactttgtaagata

SEQ ID NO: 26332 - DNA, 402 bp, Glycine max
  Intron number 1 from transcript Glyma14g13470.1 (locus Gly ma14g13470) derived from phytozome v7.0 (chr-ID Gm14; pos 12942854 to 12943255 reverse strand)
ggttcttgggtctccgaaattcgccaccctatattgtaagtttttccactcccatgcaagttttcacacctcttcaaaaaattaaccacattcatttccaaaaaaaaatgttagtgtatgtccttgcaaattgtaatgctcagcaactaatgagaaataatcacattttgttaattttaattttttttcacaatctagtaaaagggtatcattgttcttaattattttctaaaatatctctgaaagtgatttttaatcggactgaatatcttcgtgtaattcatgcaatcaaccttattagacagggaaaagatttttgttattgttattgttttttaagtgaatcaaaccaaacatgaaatataaatgattgtttaggttttggtgcaggaagactaggat

SEQ ID NO: 26333 - DNA, 542 bp, Glycine max
  Intron number 3 from transcript Glyma15g05920.1 (locus Gly ma15g05920) derived from phytozome v7.0 (chr-ID Gm15; pos 4215314 to 4215855)
ggtgagtttagtttacttgcttatcaagttatcattcattcaaaaatgctatttctcgatatatattctcacttattagcctacctattcaatgtaacaaacaatcaactcctctattttgtttggggctttgagactgctcttttgttcaaacctggaaattggaaagtggcttttttgttttttgtttgtttgtgtgtgtgtgtattatttggtcttcttcaggggtaaaatgagttttaattttctgacacttgataaaaaatcagctccatggttgtggtgatctacacattttattttcattgttgcatgtataaatttcaggattgtagctcttagtttattattgtgatcttgttcatgcattattgcagcatggcttgccatgcagagtctgtctctttctaatcaatattagggttaatggacacttacaaattgcaattatgttgtgcttataaaaatcatttgcttgaattttctctctcaagtatgtgaatgtggaaaaatattgtttctgtaggtactgatactacggg

SEQ ID NO: 26334 - DNA, 762 bp, Glycine max; identical to SEQ ID NO: 18047
  Intron number 2 from transcript Glyma13g29130.1 (locus Gly ma13g29130) derived from phytozome v7.0 (chr-ID Gm13; pos 32058918 to 32059679 reverse strand)

SEQ ID NO: 26335 - DNA, 640 bp, Glycine max
  Intron number 1 from transcript Glyma14g02490.1 (locus Gly ma14g02490) derived from phytozome v7.0 (chr-ID Gm14; pos 1527539 to 1528178 reverse strand)
ggtggtactgtacctttttatcagaattcatcatcaagtttacgtttttcgtatgttagtttttctttccttccgctctccctttttctttcaccaccaacctaacctaatcttatgtctcctcgtcatcacgtttataacaaataacatctatctattacgcggataattattattcatataaggttttaagtcgtgtgcttgtgatgtaaattattctttgattatttgatatggttttgaattgtgattgtattaagtagggaatgccatactttaacccaaaagcaaaagcttaaggttcaggtggataggtcttatcttcactcaattttttcacttctaatcgatgtgagactccacctcttacttgttttccaacagtctaaacaaaaagaattgtgattccgattttgtggtaaccaattcattatgatgataaggaatgataagtattataagtgattatcaggcaaggtttttaatttcatttgcagtgctgaatcaattcattatgatgacaatgaatgatacctattataaatgatttttagaataagcttttacttttacattgaagttgtataattcaagatgatgaaaaattggtttgtgaaaatgattgtgattgtggcagata

SEQ ID NO: 26336 - DNA, 264 bp, Glycine max
  Intron number 2 from transcript Glyma13g36470.1 (locus Gly ma13g36470) derived from phytozome v7.0 (chr-ID Gm13; pos 37751728 to 37751991)
aaggaggtacacatctctctctcctttaatctttttacgatatttcattatatgactctgcatcctttttttaatttgtgctttcttttatacaagtactactcaatttcaataaaaatacaagcctgttcttatttggtttaatatcttctattttaagtaagattaatatatatagcacgttttaactgcttttattaaatttgattgtttctttttatatgaacagttcttataccccaaactgggaggacaagtttcttg

SEQ ID NO: 26337 - DNA, 614 bp, Glycine max
  Intron number 1 from transcript Glyma08g42880.1 (locus Gly ma08g42880) derived from phytozome v7.0 (chr-ID Gm08; pos 42838776 to 42839389 reverse strand)
cattttacgttgtcaaggccgagattcaagattctgtaactttctttttctcaattcacctagggttcgcttttagtctaattcggataagaaattttcaattttccttgaataatttgtgctctatatttgattgattgaatgctatttttttaaaaaaaaaaaaatttgctttagtggtgttatagttgtttagatttcattttcttgtctcttaggttattaatctgattaggctttttcctacgtaaatttgggattttttaaggaaacccaattccgatctgtggctttatagtgtgtacactgcacgatttcttgtgggcgtatatgtgattggagcagagagcactggaaaaaaaattactatatgtggatttggggttttgattaaaatttgaagtgggatctgcaactgaaacaggatattatgctaaacagaaatgtgaattgatgaattgttgtggtgttaggatttgtgttttgatgggatcagtattcagtttttttcttcttttttttttttttttttgaagtgggaatgtgtttatttgattgtctgattatttgttaatttctgtgaagattgataagctgcaatctacttttcacca

SEQ ID NO: 26338 - DNA, 458 bp, Glycine max
  Intron number 1 from transcript Glyma18g01870.1 (locus Gly ma18g01870) derived from phytozome v7.0 (chr-ID Gm18; pos 1093748 to 1094205)
agccacagttggaaaaaaaaaaaaagttgttcgaggttagtttttcttctgggatttggaaatttagggcttatatctttgtctttttaatttctgttgatttccaaatcgcgtatcttagtttagaccgttgaattttttttcttggttgatttttctctagttacagcgttctaattcttgcgcctccaagtcaatattttcatctagtaatctctagggtttttgatgtttgttttgttatagagaattagtcgataatttcatctgttaacgtgttatatgtctttaatttcttaattaaataaacgaagattatggataaatatttaaagttttgaagattaggttatgcgataaaaaggggcaagaaaggttctattgttttttttttgttttgtttgaaattgatgttctggtttatgtttttctgaaattacttttgggcgtggacacag

SEQ ID NO: 26339 - DNA, 634 bp, Glycine max
  Intron number 1 from transcript Glyma20g37380.1 (locus Gly ma20g37380) derived from phytozome v7.0 (chr-ID Gm20; pos 45289337 to 45289970)
tcagcatcctcaatcttctttggtgcttttcccaggtcaacctattttttctcacaatttcttcaatttagtgcatgtttgggttcaaattccggttaacgtgtgattttaaataaaatgttcacttttttatttggtttcacgttgaagaatagattgattctgtgtccaaaattgattttgaattgaagtaactttgtgtttggataaaaaaaatcatactacttacttgcttttaatttttattttttaaaaaaaacatcatcaattttgcaaacattcacccaaacacacacttagaggatgtttggttctgcagtaaacctcccaaaaccacatcaaagacgtggaaacactgtcatgatcccaagtagctttgcattcagtgggtatatgggcacttttatttttcagcacaccgctacgccaaacatgcacttagtagggtaaaacttttagtagtaatttgtatagaggtacgattttgggatcaaattgaatattttttttaactatatcttattttgttgtataacggtgttaattattatttgtgatttgcttgcgtcggtgaatgtttaattctttggtcgatgcaggcgtgggagtgctctcctgggaaagagtttgcgtg

SEQ ID NO: 26340 - DNA, 701 bp, Glycine max
  Intron number 5 from transcript Glyma17g09860.1 (locus Gly ma17g09860) derived from phytozome v7.0 (chr-ID Gm17; pos 7362220 to 7362920 reverse strand)
aggtcagctcatatctcataatctatgctttctctctctctctctccctatctcttaagcatggatacagtcaaatttagtcatcaaaacatcacctgaacacttgttagttgagcctgtcattgcttattcccctgaaacagtgctctagtgctacttcattctacttctacatacctaaaaaatggaaaaataatgatgcaaacatcacgttttctagtggtggaaacagcctcttcacctacatgggcagaatggagggagcctcatgcaccggtttacccttattaaattaaaaaaattgtacctaatttgatacatcttatgaacttaaaaatctacctttaagccacagtttgccttgtcaaagtctactgcatatatgaagtttgcacaatgttcatcgatgtcaccaaaaagtgtacatgggatatttgttctataatttgtcatgtggtgtcattatctcagtagttttggaataatgttgccgaagttataaagaaatacagactgttttgatatgtgatgtcaattgtcaaataataactctagccttttgttttttacttctttagttaaccccaatttgtgctgacatgcagattttcttatttagatttcgatgactatttcaattgcatttgtgtttccctagataatttgtaaccttcacccttttgtgcaggctggtcttcctg

SEQ ID NO: 26341 - DNA, 675 bp, Glycine max
  Intron number 1 from transcript Glyma18g43800.1 (locus Gly ma18g43800) derived from phytozome v7.0 (chr-ID Gm18; pos 53370776 to 53371450 reverse strand)
gtagaaaatattataaaatatattcaaatgataaaattattgtttcaataaaattacatataattttgtaataaaaacttttaaattaatttttacaaattatgaaacttattataaaattataatttcaactaaattatacaatgtagtgacttctcttaaaactatataaacaaattatattagttttttaaattatgattatttattcaacttttaataattatttaatttgtgtaaaatcattttatatataagataatatatgctgaataaaaattatatatattatatgtaaatcttatatattttttgtaatatacatttttgtaagttagtttatttcttaaaacaaagatcaaatcgaatgttttaaaaatacaagtccaaaaaaatatgaaaaaaaatcagaagagaattcgcccctattcccgattcctcagtttttttttttaattatttttaatcaaaggtgtgaattcggtgctgaggagctgcattcatactgtgaatattgaatagtaaatcggtgtagatctgtaaataaattggaacgggtgatagataagtaattatttttacaaaagttttttttttttttaattccaaaaggattacataaagaattgtgtggtagttgttggagaaagaattccaaaaggattacataaagaa

SEQ ID NO: 26342 - DNA, 937 bp, Glycine max
  Intron number 1 from transcript Glyma18g35170.1 (locus Gly ma18g35170) derived from phytozome v7.0 (chr-ID Gm18; pos 41242489 to 41243425)
gaggtacttttttttttaataacccagctcttcatgtatatatttatattgcaatcgtttttatttagtgttcactctcatgactaatacatgataacttaacgaaaggtaagggtaatttctagtgaatttagcttttaaatcttataggctggtttagtctttatcttttgattttaacatgtattaaaaggaatagagagagatgaatttcatgataatttatggaaatgaatggaagattgtagttatttcacatttaaattatagggatgctgattgtaatcaagcatttaatttttcttgatgtcaagaatcacaaaccagaaggtcaggaagtgagtgcagcaggagtaaacattgataatcacatgaatgaaggcagtggctggattaactcagcctaacaatgcaaagcctattgctgattccagtttttccaaggctaaaccagaagattctttggactcacaattcaaaccgccagaagcttcacaactagtttctgtcttcactattttattcttgtttggtttctcaaattaaatgtattgttctaattttttaacattgctatttttctttgtaggggaaaacacacccaactcaattttttttgcttttgatgtccaccccaacccaattatgtgtgtttaagctgtattagcagtgtgatttgttatattttgtgaaaactgggaatttcattctgtaattgtctgtttgtgtactggactggctttattgcaaaagcaaaagagacactctcttgttttgtaactgccttttctctcactctggtgtcttacagatgaaaatgtatgtttctaccatttttgtttgttttcaaaattaatatactaatttcaattgaacctttctcttttatattgggatatgattgatgtttaatagctttgtcacagcttagagggca

SEQ ID NO: 26343 - DNA, 616 bp, Glycine max
  Intron number 1 from transcript Glyma19g05020.1 (locus Gly ma19g05020) derived from phytozome v7.0 (chr-ID Gm19; pos 5264688 to 5265303)
gagattgtgttgcaattcttcgaaggtttgttggtcttgtggcatttttttaaattatttttttgtttagttttgcttctggttggtgtttaatttgttgttgattgttcaattgtgttgttggatgcattttggtgtgtggtttaacgattgaaattgtgtaggagtatggtgcctccatttgaatccctaacgagaagttagcattgcaaagagggttggttcatgtaaatttttgaagcccccaatcaagtttatgaaaaataatccggcaattttggctgcaacattaaggttttgggactcttcgtgactgcaattgcggccacattggctacatttgtcccctggttattgtaccatatagttttaaaggacttaggtttggtttgtgctgccagagatatgctttggtagattatttgtgaacattaatgtaaccatggctgaggcttgtgccatgccctgccgctagaatagggtgacttccccccctgccctcttccttttctgctgactattgaaaaactgaacgagaggctttatagaaggctgagttttcggcttagttaatggaacagttcaaagaatttatctattgaactaccttattcaa

SEQ ID NO: 26344 - DNA, 763 bp, Glycine max
  Intron number 3 from transcript Glyma19g24620.2 (locus Gly ma19g24620) derived from phytozome v7.0 (chr-ID Gm19; pos 30268924 to 30269686 reverse strand)
cttcgtaagtttggcttgaattttccctatattgtcctatctttcgctcaacaatttcgtttaccaagttagaaaattggatactcaatcttatccctgctgaattacatgtaataatgtttagtttattctctctaattaattaaccttattttatcttttatcccatccttagatcagcaactcatccttcttttcccttgtcattacatatggctttgatgtgttataagtaacatggtttgaatcttgtatgtgactcacatttgtcctccattcatagtcaatatctaataagtccttaaatgacataaacgatgtcacattcattcaaatgccctcaatctgtgaggataccattactgagagctatatgacatgttatcttcctttttttttacttacgtagtaaggaccaatttgatacacttgtatctttggaggactaacatgatggtttactgtatttattatacattgattgcatcgtaatttatctggcaaaagagtttaaactctgatttttgccaaagaaataatttccttctttaaggacattagctgtggcaactggcagggttcataaatgatgaatacatgataatacatgttctgctgctatcatgtatttaaaccatatttcacattaaggttatattagtatctataatttaataataattaacgccttaaattcttaatgctttcaattaatttttcatgggcaggattcgtcgtggtcatcaagtttatacagaagtct

SEQ ID NO: 26345 - DNA, 888 bp, Glycine max
  Intron number 1 from transcript Glyma19g02460.1 (locus Gly ma19g02460) derived from phytozome v7.0 (chr-ID Gm19; pos 2193967 to 2194854)
attggtcttgtaagttcttcattcccaaggaaattctattatccatttgtgtgtgtgtttgtgttttttccggtttgaatttaattttgatagactgtaatgtaaaattatttacaatgtgaatcaattaggaattactgtgaattcaaaatacatcttgctaaccagtccttaggacactggttaaggaattaaaaaaagaaattttttaatgcgtaaaccatagagaagtgcaaacaatcattggaacacaattttacgtatcccaataaaaaactttctactcttagttccttattcactgcccttgcagcactggttcctggttagcatttgcctaaatataaaagttagcaatctggtctgaaatccatgattgaatgcaaacaaaacagataacaaaagcctaatcccactaggtgaggttgactatatgaatcatactatgtttttcaacttggttaaagagcaaattttcagagatattattcaccatgagattcttcttgagtcttaacaattctctccaatatctttctaggtctccctctcccctttttcattgttaattatgttaggtcatcaacacacaacgtaaaacttgtcaatatactgaatatgtaccatgattgaagaattcattctaataagttcaatttgttaatacatgatagtgggaaaatgttttgtagtgacactggatcaaaattaaatccctttagtgttcgccataagataagatgactacaattgttttgtagataatagattttttggttgagtaaaatggagtttgtgttattggtggactggatagtgtactgctagcatgtctaattttatgaatttggaattttggtcttgatggggtacagccattgcggtaat

SEQ ID NO: 26346 - DNA, 638 bp, Glycine max
  Intron number 2 from transcript Glyma20g22630.1 (locus Gly ma20g22630) derived from phytozome v7.0 (chr-ID Gm20; pos 32561078 to 32561715 reverse strand)
ggtgagtttccggggaaataaagagctatgctattgaccgaccctttcctagtgactttgaatcaatagtcctatccttttttctcattttgtttgaggcgagccaaatagagaatgaaatgaagaagtatgggaacatcgatgatttatcatgtatgtgcacttcatgtcgaccattaattttttcatcaatgattgagattacttactttatcctttcaagtgagcaacatactttagaggagtcagatccatacaatcaagggttaatggtgattagaaatcactggactctaaacttcaatttcctgaatagtttaatatagaactaaaatgaaacttccattgcacttcttagtaccttaacagtaatactaaggctgtactaaaaaggataacagtgaaagggggatggtcttaacatcatctctgaggcatatttgccctcagaaagaatgatgagagtgaccagtatgcaagaactttcccttggttggattcagctatcttaattcttaaatctgtattcatttgattatgttttgtttaatttctacacccataaatcttacatttttgctgtttctaattatgtttgtttagctgcattttggggttaacagtggtgcaacaaggtt

SEQ ID NO: 26347 - DNA, 961 bp, Glycine max
  Intron number 1 from transcript Glyma17g09580.2 (locus Gly ma17g09580) derived from phytozome v7.0 (chr-ID Gm17; pos 7104902 to 7105862)
aagctcctgacaactcagaagccaccgttccatatgtacgaaactcctctatgttgcttttttttattcttcttctttatttttgttattcgatttcattttaacttagaatttagttgaactattcggtgtgtggataacagtgtgcaaagaatttgaataaagaaccctagacttttcggtttatatgatagttgtgtaacttatcaatttggtagctgcaatgatttggttcatttagcactcaattggcggttgacaagaacagaaaaagacttttaattttgaagcatctctacaaaatgatgatcaagcctctgtatgctgattacagttaaaatcaacagaatagtgaagaatatgagaataccttacttaatagcaccaaataaaacttgtctaatccgaaattgcaatgttgaaattgttaaatctgagtgtggattttgcttttctgttttctagatgtttttttaggtctcaccttaggtgtttagtgatgcattataagtttctctctctaaaaaataattcgggtgtatgttatcatttacgagtgtggattaatgtcaaacaaatatacatatatttcaagaggtggtgagtcatgaatctcatgaccaaatttcaaaatatactgcaaatcacttttataattctgtaggtttgatgcagtggcttctcaattctcattctgtttgaaaatatgtgttatggaatgctggttatctaactgtatgtacctattgagtattaaattaatgtgtgtttccagaaatctgtacatatcataattcacaatgtattgaatgtttatcttattgaccttgcattgatctaatgagaaaactttctgtttccctcatggacttcatcatactgaattcatttaacttcattcctattctaatgctttctttaatcagaattctccaaaactagctggaacagttaactgggg

SEQ ID NO: 26348 - DNA, 950 bp, Glycine max
  Intron number 1 from transcript Glyma18g50090.1 (locus Gly ma18g50090) derived from phytozome v7.0 (chr-ID Gm18; pos 59313129 to 59314078 reverse strand)
gaattatagactcagaaggtaagaatgatattcactcaatcttgttacagttaattctttttttttactggtagtcacatacaaatttcatcaaggtgtctattttcccaaagttaatgaaatagtactttaaaaattttgtttcacatttttggaaggtattgaaagtgctcaccttaccacgacaaagttatgctgtgtgtgcacatgagtgtttgtttctgtcaaaattaattcttccaatcctcacaattgattttgaaccgtctaattaatatatcacccaaacaagccttgttactgtggtaactcattctggatactgcaaattgattttgatttgcagtaaaccatactagtacttttgaataataatcgtgtcatgttattcatatgggacactgcatgaaatatattagagatttcatactgaccagtgataaattcccccgttattggacattaggtcattatttgattgtgctgtccggttttgcacactctgtatttgagatgttcagtcttcagcgagaaaaggtgaaaaggaagtgtgttggaaatttcatgttaactaatgttatagtcaaaatagtgtatatatataaaatataaccttcaacataagacctagttttataaattgagttaggatttttaaattctaaaaaaccatgtttgcaaagttggggttagaactactagagtccattctgattgctttcaaaactagggggcctggcatcacctcaacatgggggttcatacattttcattgaaaaaatattaagatgtcaatgctgttattttgatttagaaagccaaaatgcataatgatggatctctctttctcagttaatttgctaaaggcataaaaatgaaagaacttcttattaactttagccattgtaattgcaggagtagcaaccaagaaacaagaattccagctttcc

SEQ ID NO: 26349 - DNA, 280 bp, Glycine max
  Intron number 1 from transcript Glyma20g37190.1 (locus Gly ma20g37190) derived from phytozome v7.0 (chr-ID Gm20; pos 45136424 to 45136703)
acaaacaggcttctctccagaaagcaattcgtaagtttttcttgttcttcgcattatgttacgcattttgattttatatagttccctctatcgtttcgattctgaaaaaatgttactcattcgagacccaatttggttgctgttttcatccaaaaaatattaaatttaatttaatcacatatgatccgtttcattatggacttgaacctcttgatcccaactggcagagattgctagggttttttcggttaactttttagttgtgtgatgcagatcgttg

SEQ ID NO: 26350 - DNA, 528 bp, Glycine max
  Intron number 3 from transcript Glyma20g37190.1 (locus Gly ma20g37190) derived from phytozome v7.0 (chr-ID Gm20; pos 45137022 to 45137549)
ccaagaagtacgagcctaagtacaggcttatcagggtgagttatttaaatctttctgtgtcaattatgattataatttttcccctttgttaaaatgccttttttttttaattagacgggctgtttataaataatattgcaatccttttctattatcactgctgctgcttttttttttttcttttccttattagtgattacctttccttttgagctgggttgataaattgtaaaattgttactgctagtggacaaaatatgcttcatattttgttataagctgtaacatttaagggttttagggaaaccatttgaacgaatgtgcctgtagttggggacggtgattgccgtccgtttgaaataatggtgccttttctactttgtactttagcagctgagtgattttggtagttgaatcttacctttgttccttatggattatattactacattttattttagtttctttctgttatttctgcctgtttctttgttttgtgctaacaaaactaaaatcttttattgcaga

SEQ ID NO: 26351 - DNA, 991 bp, Glycine max
  Intron number 1 from transcript Glyma20g28970.1 (locus Gly ma20g28970) derived from phytozome v7.0 (chr-ID Gm20; pos 37917904 to 37918894 reverse strand)
tttttggtaggggacaagcctgttagaactggctttgtcttctggctatttccatttctgagtttctcatatgtctaatcacattttaatgttaactcttctcttccttgcttgttcatatacatagtcattggcttcctcactgaacaatgtctttttttttttttgtcttttgctctttgtgatatttcgtgttgcacagttaatgtttcgtgctgcaaatttgcactgagatttccttttcttctggccttttcaacttttaagcaaagggcagaagatgatgtcgtcaaaatttactttttgtagttttgtttgccttattttgctctacggactcgtatatttctactacctaccataaccttttttgatttacttgcttaaagcaagggtgaaaatattggattttcagctttgcaaaagaatggtaatgctttttttttttttttttttatcagcaagaatggcaacgctagtttttagtttcacccatactaattttcttcttctgatttcatacatcaaatcaaaccattgatcattctcattgatgagcagtaattactactgatcgtaccaacataataattacattttctatatttgtatatgcattcttagctcaagcaattggtactgttttgcagatataataacaatcaaaggctagaagagtgtgaaattggtttttgctgtgaagcttgtcacctttgacaagtgtgttgtactgttgtcgtttgttcacattctggtgagaggagtaagcactcatcaacaacaacaaagccaacatgccagtgaggcagatgaaagaaagttcggagcaacaccttgtgatcaaaccccatttgcagaatcctatgaatcaagccaagaagacaaccaaagctgcacaaaatggcaaaggtccaccgccacaagaaaaccataatcaaactttgcctaactcaaagaacaagggaagaagaagggggagaggtggcagaaa

SEQ ID NO: 26352 - DNA, 603 bp, Glycine max
  Intron number 2 from transcript Glyma17g10020.1 (locus Gly ma17g10020) derived from phytozome v7.0 (chr-ID Gm17; pos 7486061 to 7486663)
aatcagcaagggggtctgaaccggaggacaaccaggtaaatctcaataaaagtttggtttttactgtttctacttccctagttgtttatgattgtcaaagtcttcaagaacaggaacagcttgagtagagtggtgcctgatgtagtatttctgcttattgtcaaccaatttttcgtcaagcaatatctttttcatgaacagtaaataattgttggagtatttcttagaaggcttggttttgcaaattgatttagatgtatttctagttctagtcactaatcaaggctttacatagttttgtttgggaacttgatgcttcataattttcattttcttgatccgtttactctctaatggcttagacttgtatataattaagaaaatttacatgaaccaaggaaatattagattttcaaagtttagttgcaaggaattagattagtggattttattcaggaaaagaaagagatcgagagagagttaattagttttgtttaaagctaataatattgtattaatttggcgctttcacctatgtgattctaatttttttaattttgattttcaggaaaccaaagctgaaagacacgggtcaaggacaac

SEQ ID NO: 26353 - DNA, 475 bp, Glycine max
  Intron number 1 from transcript Glyma17g37040.1 (locus Gly ma17g37040) derived from phytozome v7.0 (chr-ID Gm17; pos 40908221 to 40908695)
gtggctccatacctgtactctccccctatcactacttttcttcctttttactatatttctactctccattgtttttattttttattataactaggtgggttcttacttcttataatctttcttgtctttttaattttcatttttttgctattgatacatttatttttctaagcatcgctgtcacgttcaattttttagtataaccacagtttaattagaaatttcgaatttgagttttgagtgtattatattaaatatttggaggaagaattttgctgtttacaattatcgtatccggcttgaataatattgtgttcaatgaataatacacatgctttagaagaaaaaattatttagtataaggaaacaatattatgacatgacatgacatgtttgaatttaattaattgggtaagtaaaatacgtttcatggtggtaggttgagcttggagagcttgaacatatactaagggag

SEQ ID NO: 26354 - DNA, 905 bp, Glycine max
  Intron number 1 from transcript Glyma17g14390.1 (locus Gly ma17g14390) derived from phytozome v7.0 (chr-ID Gm17; pos 11138824 to 11139728)
actagtctccaaggttagtgtatagttttgtggtagtttatactttagtttggtgtctcaagttttctactcgggttttgtttttatatggttagctgtttttgggtttaaattcatgtacacggaggatatgtctaaattctagacgtacaatttgggtatatataatcatgattgaaattgaatgtagaaaacaggtggtagaggcgtcattaatcttaaattgcatggattgcatttagtgagcaaaaaaaaaagtgtttgaattggccgtgataaaattaattttgaatggcaattccatgaattgcatttagtgtcttggtagaattgattttggtagaagtagaaactacttctacttgcttcaattctatcatgatttttttgcatcataattgattctaccatgattttgaaaacaatctaaacatataaaatttggttaaaatcaaggttgatctatctcaccatggtctatgatgactttggaggctatcaaaacgcacactcagttgaagacctttgatgggataaaatgaatttaattgatttaaattatgtaaattatttgtcaaacaatctgttagttaagttgcatcaccactatttttgatatggatgtgacttagtccagcttacaagttggatgtggacgattttctccatttctccctttcctcctcttggaaatagtaaacatgcattattatgcctacttgtgttaaaaatgaatgatattgaataaatccaattattccccttgtgattgatttttaacgaggctactaatacttggtatcaaacttgaggggttttagtaagagttctgcatgctaatccaagtttccttgctattcatacttttagtgctgcagttaggctataaccagctagagggtaac

SEQ ID NO: 26355 - DNA, 842 bp, Glycine max
  Intron number 2 from transcript Glyma20g04820.1 (locus Gly ma20g04820) derived from phytozome v7.0 (chr-ID Gm20; pos 5206930 to 5207771 reverse strand)
actgtgattcaaacaatcgttttcagccatctcaggtactttatcctacgccaattctcatatgtttttttgggtgtaaaatgattagactgagatttaactagttgattgaacaaggtgtgcttactataaactctaataccgtgatggtaataaagttacagttttccagggtggcaaatttagaactaattgctatgtaactattgttataattaaaaatattgttttatgaataaaaaaaaatatgattgagaagacataatcttattaagttggtcagtgaaattttctgaaaaatattaatcattgataaaattatttaatattttgtattaatatgatggtaaaaaaagaccaatgtactttcttgcttcttttgaatcaagattacttctctgtccggtaaaccattacttaatgtgttaagctaaataaataatgcttcattggattatagtgccttatcctataaaaatccgttgcctttttgttccctcacaagacaatcgtttcctaaagttccactttctgttttaagcaacacaaccgtccgcttgtgtcctctttttatgcgtatttctacaaattttttaagctttttagtaccctttgaattaaatactcgtggcacaactgctaagcacagaaaaagcttaaaagaaatcaaagaaaagaatattctttttttatacttcaatttcgtgttctaccttttcttgtgactgtcccactaattaaaaaagtcttgcttaattagccacttaaatgcttttacattaataattaaattacatattgtggcagatatcagacctcactagtagcttgcagaggaactg

SEQ ID NO: 26356 - DNA, 582 bp, Glycine max
  Intron number 1 from transcript Glyma18g50810.1 (locus Gly ma18g50810) derived from phytozome v7.0 (chr-ID Gm18; pos 59837759 to 59838340 reverse strand)
ttctccaagcacgtgaatcatcagacaccagccaagtttccttttatgcatgcattaatattcagtgaccacataagaaacggataatcaaatgatttatctttgtttttcaaccaaaaccaagccacaaacatcacctcttgcaccaccgattccaccacaaactcctaattgttgaatatgctttcattccgtctcttccaaatacaccaaatatgatagctagtttgtatcctttcaaacaatacattctttcattctcttttattagaatttaatatgtttttactctctttgattgatttttttttatctagaattttcttttttaatttttatcgtaataaattttttattttacttttgatcacaaaagaaagatttggaggctaaaaaaaaacaatcattccttattccaatttaatttcagtcatttgtcaagaatcacatcgttaaaaaaataaaggtcaaaataaaaatttaatcatttattaatttttttattattcctatttatttttatttattttatttctaatctaaacagaacattaaaaaggaatttcagccaagccaacgaaa

SEQ ID NO: 26357 - DNA, 287 bp, Glycine max
  Intron number 2 from transcript Glyma18g10930.1 (locus Gly ma18g10930) derived from phytozome v7.0 (chr-ID Gm18; pos 9788172 to 9788458 reverse strand)
aaaaaggaactgtgagcttctgattctaagaaaggtatattgatgtttaccttagtggaatatcaaacatatccttaataataacatgcttttgagatttctctgtgtatgcatctttgaatctctctctcctcaatttcctattcctctttcctcttctttttatttttttttattttgatctttcagttatgttaagcaatctgagtttggaggaagtcaaattctgattaaataaatttctagtgaaaagtttcttctgatttggactatgtaggaagtgattg

SEQ ID NO: 26358 - DNA, 934 bp, Glycine max
  Intron number 1 from transcript Glyma18g12090.1 (locus Gly ma18g12090) derived from phytozome v7.0 (chr-ID Gm18; pos 10908875 to 10909808 reverse strand)
aagagtttcaggttttgtcactcaaactaaaggctttttagtttgtgttgtgttgtattgtgtgatttgggttgtgtggagtggtttcattgggttaaggtggaaatgggtatcccttgcaatgtggggttgggctgaagtttagtttgtgatgagttttgcttttccttgttttgattttttggtgaaagttttggttttcattctgcataatatttggtgttgtggcacacaacttgattgttgaaatgtggcaatgatgatgattgtaaatattttgattttttttgttttgaaagtttagcatatttgggaatgttgttttgtctattgaattgaagtctctggtcgtggaagtagggcatagccagaaacttaactgtgcaaggttttaaagatcggtccaaaaccacagtttttggggtctctgcgactgtaattgtggctattctacagcatttgtcttcaatttttcataataacaaggttcacaatgaaagcacaactgcaatttaaaaccatgagtttctgccgtgggagaaactaaggaatacttacatgtaaccttgttattttgaagtactatccttgatgttttatttcctttcctaaatgctgtttcttcaattttttatgcctgtgaaatatacatttttgtgactgtttgaatgtgtatcatttcattcttcagaatttctttagtcttttatttttcgagtttcatacagaactaaacaatttggaactccatgttaatcttcactcaattagattcagaataactttctgtctctcctacatactagcacatctctcatatttgtatgttaactacattcagaaaccatgaaatgtagtttcctggaaggaaaaacaatggaaattttcttagattttgagttgcagacagaactggctgggattctaaaagatt

SEQ ID NO: 26359 - DNA, 964 bp, Glycine max
  Intron number 1 from transcript Glyma19g39650.1 (locus Gly ma19g39650) derived from phytozome v7.0 (chr-ID Gm19; pos 46266990 to 46267953 reverse strand)
gcgtgccaggggagtctcaaactacattggtggaggtatctctctgacatatttcatttatgccaatcactgttacacagttttaaatttatttgacaaattttccttgctctttagcctctttgcatttgaataatttgattatgacaagttgtcatggtcattctgtgtgtttttaatactaggaccttaaataacaatgtttctattcccatggaaaatatgtggttgattttagaacaatagtcaaattctcaagcatatttcctgtcttgtactcttatcccattaaaccaagtcctttactattaaatgtttaattataggaaggtatttatggctatcttctttattttccaagaagaatgtggcacacagttaaaaaaaatgcaagatccttctttattaaccattaaaaaattgaactgtttagtgatgagttagatgcaggatttgcttagacctcctttaatttttggaagttaaaaagattggatatgtgaagagtctttaaaatagtgtcaataggtcttaaaacaaaatatatttatggtttcaactgtgaacttttccccttacatatgttattgagataagtctattagcttctcgattaggagagaatactcgctagagtgaattacaagttacaactaatgtgtttcttcctatacattctcttaagttacatgccatgataatttatttggtccaagtaattgcataatcgacattcctacattttagagtcttaaacactcatttttatttccttttctcaaataaaagtatagacacttccttctaactgtatccatagttcactcgcttttgtatagtgtgctgttaaactggctgtatttctgtaacccatgtattttccaaccagaaaaacaatgtcgcctgaattcatgtatatattattatattactgcagatttcaaggaaatttgtggagggaaag

SEQ ID NO: 26360 - DNA, 834 bp, Glycine max
  Intron number 4 from transcript Glyma19g34430.1 (locus Gly ma19g34430) derived from phytozome v7.0 (chr-ID Gm19; pos 42029737 to 42030570)
ctgcttatccagctttggacgaactgacctctaaggtaaagcctttgcataagaattgtgtgtttttctgtttttcatagatttttcaccttgttacatggctacctaggttttaaactgcggtcatggtctcgattttgttgcgcttattgatattattgaaaagccttgacgttgtgctcaaaatcacagttatggaccttttttaaaaccttggctatgagtacttttaaacatgcatttacactcttttccatcttttttctacccatttctcttcctatctctctttttctatccaaatctacctcaaaatgagatgtatatttatatttttcttctatgatgaagcaaaatgcatgcatgaaatgccaggctgggagctatgatttttctgtacatttaaatgattattgtataatcccctgctctgtccaattaagcatgataaattgataaatcttttcaagcttaaatatatcttgacaccattgtattgccaacaaaatatgtcaatttaaaagttaagcaaagaaacaattttgttcataatttgtgatatcattttttttttaattattctcccccttttaagctagcaaagcgattctggagttagataaacatcttccagaaagacagcgtagaatccttatggactaaaactaatactgttatataaaatctggtgtttgccagttaatgtttgatttcccattatctgttctcacaaagttatgacactttctccttcttttccccttccacaccattctggttgaatggcacttgtgtccagatcagtagtcgtaatttggatagagtgcggaaatt

SEQ ID NO: 26361 - DNA, 586 bp, Glycine max
  Intron number 1 from transcript Glyma19g04020.1 (locus Gly ma19g04020) derived from phytozome v7.0 (chr-ID Gm19; pos 4136922 to 4137507 reverse strand)
tgcagttgccactggccggggttggaaacctcgtatgaaaagcatactttttttcatggaatgtataaaagtaaataatcagagttagtatgtctaatcgcatactatcatgtatgatatattaacttttacaatcattaccttaaaattactaatgatagttttttattaattgacactgtaaaatttcttaaaatgacaatgcataaatattaagctaaaaaaataatatcttcggtaaattactaacacattaatctagaacgtgaaaattaaaatatccacgtttataaagtttggttttggtcaaacttgaaatagaaaaaatgttttaggaatgactatacccatttaaatttaatatttaaaaggaagaaagtcttttccaatcttttctccttttatgtcaatgttttttttttcttttctcaacaaaagacttttcaaataacacaaattcttagtgcacaaagttgcatttgcagcaaatcaaggcaaaaaaggagcattggtcaaacccaaaagacctcaaatttgacggctgagtttgatttttttttttttctaattgaatgttgacagatac

SEQ ID NO: 26362 - DNA, 881 bp, Glycine max
  Intron number 1 from transcript Glyma19g43520.1 (locus Gly ma19g43520) derived from phytozome v7.0 (chr-ID Gm19; pos 49154544 to 49155424 reverse strand)
ctttcaaggtctcctatatctcttcaaacttaattcgaataaatcatcctttttactagcgaattgccatctacctgattgtccagaaatcaacagctatttttttttttattctttttgcattggaatttatttcttatatatacctccatcctatgtgtttttgtccttttttttatgtatttatttgaaatacatctattccccttttttgctttttttagattttttgttttgtatatttatatttgtatctttcattccctttttgttattgccatctttcttggtttggggtggaaaatattatggaacaagttctggcaccgcagagattttgggataggtgtgtgtgtaaggggcatattaagttagagcatggcatgagaggcgagaagagccactcttgatcatttgatcttacatatatagctaaggttatatttaagcaggatggaatgattgagattagcactactgacgccgtcacctaatacgctatatatatccaagacttactcctgaagtaagtggactcccctcgaagaaagaatttgatttgtaattgttacacatagtttgtcttgacccttgagctttgggatacgtagagcagagatgcttctgttccatgcctcatgttcttttcttgatctgtttgcttttgcagacaataatgtatattatgttttaggctagttgaagagatctgctcctgtagccggagaatgtttatatatccaccttcttaatatattcttgttctaatagacatttaaatttcttctttgcatgtcaaaggcatatattttcttcatcaacataagcaacctattcaaaatgttttgttacttaccctgcaacttataccatgcagcgtt

SEQ ID NO: 26363 - DNA, 572 bp, Glycine max
  Intron number 2 from transcript Glyma19g44200.1 (locus Gly ma19g44200) derived from phytozome v7.0 (chr-ID Gm19; pos 49699583 to 49700154)
tttagacttggaattcctaattcaggattgttcaagtaagtaagcacacttactagtgcttggttaatgggatttcattttagtatttggtttttcttccacgagttgcattttcctgaagatattattgttgttttttttgcttatattaaagatttttttttactgttgttatatatatatatatatatcggttttatttaattctaattatagagagcttttgaatctgtccgagtttgttcagtatttattgtctttttctgttgtaaatctgacgagtttcaaggacatgcttagatgtgtgccaggtagattggtatgcaattgccaaatgtttaaagtgtaacgtttctgctcttggctttgtggggttttaatggaattttctcatacaaccctaattgttttacaaagaggtttacagttccctagatctgaatcacaccagtgaggagagattttgttggttaaattggctagttggcattttggctttaaccgataaggctaattcacttgtttgttacaatataggtgtgagctggatcccccttctatcctctggcatt

SEQ ID NO: 26364 - DNA, 1036 bp, Glycine max
  Intron number 1 from transcript Glyma18g51400.1 (locus Gly ma18g51400) derived from phytozome v7.0 (chr-ID Gm18; pos 60301440 to 60302475 reverse strand)
ccatcgacgtcagcagatcgcttcccccttcttcggtaaccccttcctcatccttctccccctttacttttctaaatcaaaatcccttctcagaaagaatatataaaaaataaaatgttatcacatgtgtatgatcttaaccaatctccacttgacatcttaaaactctgcaatgtttgcatgatctcaataaatcttcacatgacatgtagcagaatctttatattaataaatgttatgttaaagactctgttaattgtatgtccgagtggagaatgattgagatcataaacatttggtgatttcagatcataaaataagcacatccacagtttttattgcaccattcttatacaatagattgtttaacaaagtgtttggtgtgcatgtgcataagaacaatgtttttttttcttcttctgttgtctgtttttttgtttgtttgttcttgggtttttgcatgtaacagacggcaaagaatggtgcgagctttcattggggacctaccttaatggcattgttgaaatgagaaaacaaaaacgctggcttggattagatgcaatctatcattggggacccacctttgctttggagctagccagccctgtggccacgtacatggaataggaatgaaaaatctagtactaccattaaatgatgtcactagctagctagctagggagggacaaagattggtcatttcattggtgtcacggttgcacggtgcttgaaatggggtagggtggacccgtggagtgttgttttttttctccaacaccagcttgcaaggacttgactactactactactgctactactagaaccatcgtgattcccttgtggatttccttttggtactaccgcactagctagtaaaccacgcaaattccgtggctgcttgtgctttttttccttttcttttcatgtgggagagtggttgttattttgagtggcaatgatgatggcaactaatggttccaaatgaatttgttttgatgttacaggtgagctttgtgatcgtgaaaatcactgcaat

SEQ ID NO: 26365 - DNA, 435 bp, Glycine max
  Intron number 2 from transcript Glyma19g38130.1 (locus Gly ma19g38130) derived from phytozome v7.0 (chr-ID Gm19; pos 45131959 to 45132393 reverse strand)
gataagaagcttcagagtaagtctgattctctatttgttgcttctcttatctgtatctgaacgtgttcgtgtttttttttatataaaaaaaacccattagttttttcgagctggagtgtgggtgttgttttgttagggcctggaaatattcttaaactccaattttcactatccttgtatttttactttcgcgtagagttcagtgttgttaagcagttttgattttatttgatggaaatagttgagtggagtggagcatgtcttagcctggttgttgattcaacgggtatttttttactttagggtttatgttatgaatatctgatatctcaagttttgtattgtttcttagacaatgattttcttacattatttgtgagaagattatactgaaatgcttgctgttttcttgcagtcaagctgaacgcaaatcgc

SEQ ID NO: 26366 - DNA, 544 bp, Glycine max
  Intron number 3 from transcript Glyma18g51120.1 (locus Gly ma18g51120) derived from phytozome v7.0 (chr-ID Gm18; pos 60080783 to 60081326 reverse strand)
gaggagagacttcaaagacttcaggtgcaacctattccgatggaatatgtgactttgatgaaaagggagatcataaaatagtaaaatgtaaagggaagaaaagtattaaaccaagaaagctcaaaatggatggttttgttgctttaactgatgattatcatggacccaggcaccaccttccgaaacataattaattgaaaaagcattgaaatcccttgtgagtctgctagttagcattcatgcatcactagtcttgttggagtggaaacttgtttgttgatttcatgtacatatattttaattaattcatgtgtgaattaatgtgcagcaataattcctaaactttgaaacccaatatccttgtcttttttgttaaggaaaattataaatatttatgcaatatatagaacatcttaccaaacgaattaaacacatcttattcttctgttcagtcattatagtagtgggttatctaatttatatcaaagaaattgtactgatggctcctcgctcgtattgtttgcttctatggcaggtaaggata

SEQ ID NO: 26367 - DNA, 861 bp, Glycine max
  Intron number 4 from transcript Glyma19g01390.1 (locus Gly ma19g01390) derived from phytozome v7.0 (chr-ID Gm19; pos 986026 to 986886 reverse strand)
tgtcaaagccatttcttgaggtagccttatgtaccacacctataaatgtttccatttatgtgtatactggcttggatttcacttttgtgaccatcttcttattcttttatagggctgcaatcacaattaaattccataccttcgctatcgtatatgatgactagttcctcttttctgttcttgtatggcttgactgttaggagcagaggactagctaactacactaacctatatttgataattcttctctgattcttatttcctttccatggtatatttattgtgatcatacaacggataaggcttgacactcatgacccataacagaaaaagataataatgataatagaattgcaaataatagaatagtggaaacatgctattttgttataattgtgacagtgctgtcggacaagggatatgctggtgtcttctgcaccctcttgggcctactctccctttggactgtattgctatcattgactttgaaatctctaccctccaaaaatgaaccgaatattcttgaccgagatgaaggctacagaaacattttcttcttcaagcttaattgttagctgttaccaatgctagatcaataacctaagcctagccaaaataaaattaacaaaaaaaatacctcttccattaaagagaatgtgtataagtcttcaatgttacaattgtcaccattattaactggacctctaggaaatcgaaagcttcaattgaaatgaacttaagcctgcaatctcaaaattgcttaccacaaatagattgtggtcctgcatgtgtctatacctttttaatggtcctcactgatggatttgattcaataggcaggacttcctcctggtgttctga

SEQ ID NO: 26368 - DNA, 610 bp, Glycine max
  Intron number 1 from transcript Glyma20g28870.1 (locus Gly ma20g28870) derived from phytozome v7.0 (chr-ID Gm20; pos 37820533 to 37821142)
atttctccagttttgtcaggcaactcaacacctatgtcagttatttctctttctactccccaatcatatataacatgatgtttattttattcttctcctagtttttcttagtgtgatgaaatgaaatgttgttttcattataaattgtatatttagattcaatgatatataaccttaattatcttcttaatttgaagttcatgaattaatgtgtttgtattaattcttctatcttcaattatcatatttggtattggtaggtttgattggccccggtttctttcgtttattaggttctgcacttcccctattttgattcttgaagaggaaaaagctagcagaaaagttacaagataaaatgacacgagacagtatcgattaatttgcacctttaatctgcagtgatgttgttatatttttatatatttaaggcttaataaatttaccacttttatctagctaggtgctttaggtatataagagttttatcacatgcatttgtcaaaccattattacagcgatatttgatatatagatttgaaaatgaagaaggaatttgatgacatgatctgtaggggtttagaaaggttgatccagataagtgggagtt

SEQ ID NO: 26369 - DNA, 902 bp, Glycine max
  Intron number 2 from transcript Glyma19g33940.1 (locus Gly ma19g33940) derived from phytozome v7.0 (chr-ID Gm19; pos 41543740 to 41544641 reverse strand)
tttgggggatcggataataaggaattgcttcaaaggtgaatagtttcttcaactggcaatctcagtttcatatgttaagaattcgtcgttacattattatgtttacttgtgtgtataacttgtcgggaaattgcgatctgagactgaaccgtcactttcaaacactcacacacttgcaaaagtgtttgtcaaaaaaagtatatatgtgcatgtcactgtaacacttcagaactctcttagttgcatttttagcattggggaagttggcttttggtgggtattaaatttgaagccttttcttttctctttcttctttcttttctagctctagcgcactgtttggttcaaaggaaggaagtaagttattttaatggagggaaaggagaccttgtttggtttgcatagggagtggcggggaaataaagcaatttaccattatatacatactgtagataaataaagctgttaaactcaaatgttcaagttaaagataatttagtcagcataacctaaaagttttaagtaccgtctcttccctccaaatcctcccaatatcagaggggaggagaaaatatgaaaggagaaattttggccccatcacctccccacctaatatttgaaccaaacaagctgtttttaagagaatacctcccttctcctctattttcatccaaccaattactaggcaactcaaagatatctctaacatgctttaaacttaaatgcattttataattgatactgatatattagctttgataaaccatgggaaattttattccaagtatctgttcatgagatgtaactttttccatctaaatgggtgagaattttctgttgttgcatattatgattttactttactggcatgctgtgatgtagcttcacttcacaatttaaag

SEQ ID NO: 26370 - DNA, 601 bp, Glycine max
  Intron number 3 from transcript Glyma19g40280.2 (locus Gly ma19g40280) derived from phytozome v7.0 (chr-ID Gm19; pos 46707627 to 46708227)
gggctccaacctatacggtatgaattcatgggttggttttggacttcttgtcctacatttttacttctcttggtttgatttttaacttattaggagaaaaattgccctcccaaagtttaatccttaaattttgattaatgggcacaaaaatgttgatacactattgggttatcatgagttattttcagtatattggaacctgcaaaagattgtactttcttagcacctcttatttacaatttatgatgtattaaagtcatgtttggataaacttctcactaaatatttatagaagaaaatgagaaagtaaattgaattaaacttctataagttaaaatcaacttatgcacttcaacttttatagaagtttctctcctatcttctacaaaagttaaggtgcataagttgattttgagttatggaagaagtttgattcattatactttttatttttttctcttgtaagtgcttattgaaaacttaatccaaacagaacctgaatcactgtttttggtttgatggcagaagtgatgatgtatgtgattgtgtctaagcaataactaaattctaatatttctggcaggttgtgttcaatttgatt

SEQ ID NO: 26371 - DNA, 937 bp, Glycine max
  Intron number 3 from transcript Glyma18g09500.1 (locus Gly ma18g09500) derived from phytozome v7.0 (chr-ID Gm18; pos 8394491 to 8395427 reverse strand)
tgtttgtttgtttgtatgttctctaagaatgtcaaattttgtaacattgcacttactgctcctgctggttttcctgatcacccccataggttttaaaaattggccttttctagtcattttattttgtttttgagaaattttctctgatgagatatattgactaatctttccttctttgtgatgcttttttgtttgtttgttttttttaaaacaggctttgagacggtcacatacatgttgcagatagaggaaattgaatgtttcaattcacaggcttcttctcatactcaattttcccaatggcaaacatctcatgaggcctatataactttttgccatcattgggcaaatctttttattggttatttgacttctgttgaaatcctttataaagttggaaacatattattttgatggactaattataaaggtgaggcccaaaataatacataaatggaaactgaggccatgtaaaatgtttaatgcccttctcattttcatgttttcaaaattgttttgtaaaacaattgcacagtatttatcaaatccatttctattaaattttgaaaattgtttttaaaataagtgttttaaaaatcaaaagacagaaacagatgagagacacattttttcattctcttatattttcttcaagtgttctatttaagtgcttctagaacaaacatttagataaacactttcaaacatactcagactctcggagggagaatttgtttttttaaaaacgcaactttttagagacaataaaaaaagcaagcctaaatatatggttttctgatttgaataaccagatatattatgccatgcatacacatgtaaaagttaattcacggttgccaaatcagccatattaataagtgacatctaaacaaccacgaaagaattgcccctaaagctggttacataagcaaaaaga

SEQ ID NO: 26372 - DNA, 587 bp, Glycine max
  Intron number 1 from transcript Glyma19g42400.3 (locus Gly ma19g42400) derived from phytozome v7.0 (chr-ID Gm19; pos 48394382 to 48394968)
cccactctgccatcgcaaacccttcccctcacagagttcgtcaattctttcggtgccttatttgttctttgttgctgttattgtgttgtacaagtacaagttcaatttcaatgtattctctatgttccttgaatactctttgctagcatttggaggtctcgtttttccatgataaactgcaaacccatttatgttgaattttaggtttatcattagtgtttgcttggttgtgaatgatttatgtgagttctcttttggttctgcttgtgaggtcttaatttgaaatttgaaccaagttatggcatcttcccactgtgttgagcgtgacttgatatttgaactgagctatttttctcttaaagtcattgatgcaatgaaattgatttgagtggctagctattagctggtttgggaatgacattttgtttccactcttttaatgactaatgtcacattccttgcgtagtacctgtgctgcaccctttatttttgggtagatgctgaatgctgcagtttgttaatattacctgtttttactcatgacatattcaggttgaagtttattagttgaataatagaacagtcca

SEQ ID NO: 26373 - DNA, 243 bp, Glycine max
  Intron number 3 from transcript Glyma18g47550.1 (locus Gly ma18g47550) derived from phytozome v7.0 (chr-ID Gm18; pos 57170465 to 57170707)
agtactttgagcgtgcaatatcaaaagtatgaatcatacttgcaaaaatgttgtttttgatttgttttgctggtttatctatgtcaagtatttgcagttgtctgtgaattatgatctgttgcattgctctttttcatttgtttctatcagaaaattcttgtcttatttcacttggtttgtgctgtcaacccctaattattttctgattttttcattagctttctcttgctggacattcagctg

SEQ ID NO: 26374 - DNA, 950 bp, Glycine max
  Intron number 1 from transcript Glyma18g00860.1 (locus Gly ma18g00860) derived from phytozome v7.0 (chr-ID Gm18; pos 406912 to 407861 reverse strand)
tcgccggcgaacaacactcccttaagtttagccaagtacataatctatctaataatctttcgtatctctgctttatctcctaattgaattttagttaatggaacaagttcatttttttgtctttctttttttagctagatagagccttaaacttttcacttatgtttaaatcaatttatttacttcaacttattacacccaacttatacataatttcacctttacattatggtagaagcttaaaattcatttcatgttctagttttcttctctcttataagtgcttgttgggaagtttgtccaaacataaccaaactcactttggttcagcttgttgatcttgcggctgtgttccataatgttcttttacgatttaaataaaaatttcgttttttgctaaattaggcttttggggtgtgttactttgtactattttctattgttaagatttggcttgcgtgagtgaagttgaattaagagtaaataaattgagctctgataaacaattcttgtaccaatggttttcctcttgggtcttgggtacagataactcgatattcctgaacacttactggtttttggatgtgtttgttgactcatgcttttgcgttcctcttaattcctccgaggcaaaacgtattattttaggggtgtctcgcgtagtttgaaaacctaagtggagtagtatctatgtagacacgtgtctttggattatgtaaaggagtggagtaaaggatttttgatatgattgcaattgccaattattattgctcagatagaactgcgattatttgctgtagaagcatcaaggtaacttgatggtcaattggtcatcaatgtcatttcttggctgctttagtttgtctgctaatctactactaattacctaatttatgttgttattatttattattcatgaggactaaacttgttgatctttttgttgtcag

SEQ ID NO: 26375 - DNA, 395 bp, Glycine max
  Intron number 2 from transcript Glyma17g24420.1 (locus Gly ma17g24420) derived from phytozome v7.0 (chr-ID Gm17; pos 24833597 to 24833991)
tacaggactctcttcctcctagacccttggaagaggtttttcttcaaatatgttatagaagaactgcttttaggaaacaattttgcattatgtggttttaataaaagaatcccgcatactttttgagcattgtagatgatttttgttcattaagcggctagtacaagaattcaaagttttttgtttttgtgcttgtgttggctgtgaaattctcactttgctgttgaaaatggaactgttagtttgggctccacagtccatgaacaagaataagggcccacactttctaacttgcttgagaatttcaatttatttctcaagtcactactagacttctgaatttagtttatatatgcaaggtctatggcaccatacagaaagagttggggaaatca

SEQ ID NO: 26376 - DNA, 515 bp, Glycine max
  Intron number 1 from transcript Glyma18g04940.1 (locus Gly ma18g04940) derived from phytozome v7.0 (chr-ID Gm18; pos 3704231 to 3704745 reverse strand)
tcagaacttcgcttcccaggtatgcatgggatttatataattaatcttcatactatatatttttatctattgatgttgtcttgttcttgtcagtttattaatcaattaaggcattgttggaaaattaagagatttacattaacgcctcaatgtaaagtaggtgataaataattagataaataaacttgaaattagaaaaaaaaactcaaatctcacatccactataaataatggcaaagcatataaggtgaggacaactctaactctatgagttagcttttaagattgagttagatccagattttttcttggcatcagaatcaatctgaagttaatggattaattattttttatctataaatattaatctgttaaaatattaatttttgttgaaagggatgaaacacttaacttttgtttttgtttttctttctcccaccatatatctcctgtgtgaagggttatatttatcttatggatgagtaagtatttgatttgatattgataggttcaag

SEQ ID NO: 26377 - DNA, 829 bp, Glycine max
  Intron number 1 from transcript Glyma20g36470.1 (locus Gly ma20g36470) derived from phytozome v7.0 (chr-ID Gm20; pos 44571893 to 44572721)
caagcgccccaaccctactcaacctgacacccaaggtcaattctttttttcccccttaatcggttatgtgcaatttcaataaataccaccctagggttactcgaattcaaaccaattaattaattatattcaactcgtagtcactgagtttttcctttttgtatagctttctcgcgtgaaccctaaggtagatagctcttccgttcgtttttattcaacattgtttacgacatggacgcatggaaacaatgtgcacatgcaacacggtgcgaagaatggataacaatcataacatactcatttactattcaatgggctgcaaaattcagcttcaagaccctttttttttcttggaattctctaatttttcttttcactctgtgaacttcagtaattccaccctttaatatttagtgggataaaactttgttgtttttgcttttattaacgagaacttacgttgactatgaaagatatcctaatttaagagttccttatattgttttatcaaaacaaagaactctatttgagcttgccttgggttttagtgttccaaaacaaacagaaatctaaaaagttgcaaattcaagcctctacttgtctttttggagtgaggtaaatgtaagttcatctattaagttttttttggaacctagatgccttgggctggggcatcattcccgttccataaatttagtttactttactttatatttgcttccatccctgtttcaaatgatggagttggtatttttttttttttttgaattctgaattatctattgtaatttcagctgcagcacctaagaaaagcttgaagttcaaaacc

SEQ ID NO: 26378 - DNA, 472 bp, Glycine max
  Intron number 1 from transcript Glyma17g15420.3 (locus Gly ma17g15420) derived from phytozome v7.0 (chr-ID Gm17; pos 12145413 to 12145884 reverse strand)
agttagattttctacccacttccagtgtcgcagaggtaactgacaattgcccaaatacatcattctttgaggcatttttgttgtattttttttctactttttgttagtttgagttttttttttctcactttaaccagtgagacagaatacctgaattaattttggctcatgagttataagccatggttgatttcgtttacacatttctaaagttgacatttttgctaataatcgatgctcccgttttgttttaatctacaaccaagaatgtgggaagagttggtatctggtttggttgaaaaaatttagaatttttttgttttggatttttggggggtccaatgagaatctgggtttaatagttaatactctctaatgttcaatttcagggttgtttctgacgacttattgtgcctcggataacacttatttgacagataaagcagtcattagttcagttggtcaagataat

SEQ ID NO: 26379 - DNA, 627 bp, Glycine max
  Intron number 2 from transcript Glyma19g37740.1 (locus Gly ma19g37740) derived from phytozome v7.0 (chr-ID Gm19; pos 44839725 to 44840351)
ccatcaccctctccaacattaccaacctgctgcttgtaactctctctctctctctctctctctaagtatcttattattattatctcatatattcatattcttcactgtcatacaccatttcccatatattacatcattttctcgtgttttgtgactgttcaacgtcccccaaaacttactttttttttaaaaaaaaaacaataatttgatcaaagaaaaaacaacttacctcaaagcttacattttttacaagatatacttgttgcatcagtcttggtttcatagccgatctcatgtgcggattaaggaagatggttgagttacagcatgcttggaaaacgttgttttctttttggtattcaggatacatgtttaagggaagtgcttatctgctaaccatgccactacatattaaaaatcttcaggcttttgatgaaatatggaacacttaagataaaaaagacttctaacatcgtgaaatgtatgtggtaaatagaaatgttgtattgtggaatagggttttttgatgttatattatgttgttgcatcctattggtgctatagaaggtgaacatggttttgtttgttggatcagtgttgcaatcagggtattggggtagaggagcg

SEQ ID NO: 26380 - DNA, 515 bp, Glycine max
  Intron number 1 from transcript Glyma17g20500.1 (locus Gly ma17g20500) derived from phytozome v7.0 (chr-ID Gm17; pos 19615984 to 19616498 reverse strand)
gaccaacaccaaagtctgaggtaggcagcgcatcttcattattcatgtttttggcactatatacacgtttaaaaacactgggatgcaacaacatgttgcaatgagattttcgaggaattagaagaagattttgaactttaatatgtttttagtagcctaaatatttgtttttagtaactgtagttttaaaataataagttttttggtttctctgttcaattttttttcttcccaaacactgctataatgaatactttaaggaaaattcatatatggtatggtaaagtgtttgaagataagaaagtaaaattaaaataggttttcatgtaagtgacttgtaatttgttaactaattaaatgaaatctctaacaacatttagacaaggactaaaacagacttttttttcatattattacaaggactaaaatatcaaagtaagttttcatgtaagtagagtgtttgatatatattttgaaagaaaaatagatatatggtagaatgtttgatgataaga

SEQ ID NO: 26381 - DNA, 1004 bp, Glycine max
  Intron number 1 from transcript Glyma17g27490.1 (locus Gly ma17g27490) derived from phytozome v7.0 (chr-ID Gm17; pos 29212755 to 29213758)
ctcttgaagactccttctccctatcgttcggattggtaatttaaattcaattttgaagaaacaactgttttttttttaaattcaatttttcttgtgaagtgaaaaaatagtttatatttccatgaaataagctgaatgcacttaaactttgatttctgaaaacgaggatagcttcctttcttctaaggatcaatggtattaatgtagtgtttttagattcgatgaattcagtggcttatttgttttgtttattattaagatttggaaattgaaggcgtgtttgtttatctttgtatcattgagattttttatgtttagttggagccattccagcgtttccatgtaagtatgtgctgaatcaaatctcaatgatcatgttctctgctccagttttaattttaatttttctactttggcttcgtctctgctctcttgaagactcctccctatcattcggattggtaagatcacaagttttagtgcttgtttgtttaaattcaattttgcagaaacaattactttttaattacatttttcttgtgaagtaaacaaaaaaaacatcattgattctttgaaattagctgaaagcagctgaattttgttttctgactagctatactattgtagtgttgttagatttgttcaattaactggcttgtttgtttttggcttttattaagatttggttagtgaaggcatcttgtttctctttgtatcattgaattttatgtttaattggaggcatcccagtgtgtttccatttaggcatatgctttatgaaatctcaatgatgatgttcctgctccaattttaattttaatttttctacattggcttcatctccttgctagaggtatctcctacaaacaatcgcactttcaaatctgcttgcatcggaagttgctcatttttatacgtatctctgaaattgagtgtttttgcgtggatagtttcatgttagtgtgattattgacaatcatgttgttttactgtcaggtgggagc

SEQ ID NO: 26382 - DNA, 623 bp, Glycine max
  Intron number 2 from transcript Glyma17g29320.1 (locus Gly ma17g29320) derived from phytozome v7.0 (chr-ID Gm17; pos 31773324 to 31773946)
tattggcattggcaactagagacgtcatagcattggtaaataagcaatagccttggcaaaatatagagagcttccaattaatatgcataaaaataaattgtatcctttataaactaactagttgtctctattataagtaacagtggggtaggaattagagaacacaaaatgaatcagcaacaactgaggaaaatatgaaaaaaaaaatcagttaaagatgttggaggcactagtaagcagagtagattgcatagtttttagacatgtaaagagggggagaccaaggacattggaggaagttgttaagaggatatgagggaaaataatatatctaaagatttgatttttatccgagctaaatgatgacatgaaattcttgtagccgatttcacccagtggaataaagtttttgtttttttttttagggtagagttagacaagtattactagaatgttaggatccctgcatactccatagagtatcatatttcttttgatttgtctttataaagttattttattttggctatgtggaagattatatgtggcattttattccttgtacaatttagctgaacaccatatgaaacataacacttggtttcaggcaggaggaccatctt

SEQ ID NO: 26383 - DNA, 513 bp, Glycine max
  Intron number 2 from transcript Glyma19g06390.1 (locus Gly ma19g06390) derived from phytozome v7.0 (chr-ID Gm19; pos 7308561 to 7309073)
cccaattggctaaggaagtataataccttcttaggaatagatgaattccttgcttggaatttgagttggaggtcaatttattacaaccccttttggttcaattatagttttctttagttttgtgtttgtttcaacttatatttgaagaaataattgcttttcatggtagtgtgctaaaagtacttccaatttttttgtaagtttatctatatcgtgtttggtttcacattacaaatgtgattttcagaagctaataattatagcttttacatcacaagcgacatgattctccatcctcaacgagtttacaaatatgatattattggatatttcgattctaatattctatttgagagttatcaatatttatcaaatttatttgtatcatgtggaagcacttggttttgagttttgatggttgatctatttgttgtgtgtttgtttatagcatggtttcgtgtactgtgagcacaataggtcaccaggatactatgatggaccctactagaccat

SEQ ID NO: 26384 - DNA, 886 bp, Glycine max
  Intron number 1 from transcript Glyma20g23430.1 (locus Gly ma20g23430) derived from phytozome v7.0 (chr-ID Gm20; pos 33304362 to 33305247)
caaattgaagcctccaagactccaaattccttcaggttagtatctctttcgtgctctttgaaggccggtatctctttaattttctcaatttctggtgtttctttaattctctgtttcttttttctaaatgggtattcgagttttccattcggtgcagattttttttcttgataatttgggtagattctggtattttcctttcttttggttatagctccgggtaataactgcaacttctgacctagctggaaaacctatgtattgttcagttacaccgatgtgtttgttcctatagagtgaggggtcatgaattatagttatatggttggttgtgattttaacaatttcccagtttgttgtatatgggcaagtattttgcacattctcaataagtgattataatgttgtttaccctcagtgttatcaatggtggaaggctaaaattctaccacgtaaacatgcctatggcgctgccatagtgggcctcccttcactaattttcctgggtggttgtcaaaaaacccgccaatggtggccatggcaccgccatttaacagcaatgtttatcctctaaagtgagtccttagttagtggaccaaaatcttgcatttggctcctttaaagcaagaagatgcgcttttgaggataagtgtaatggtaaccatgataaaaaaaacactaatggttgagaagggtgattaaatcaaatacatgtataaaaaattctcaagttagttgcaatttgattttcctaagatgagtgtgccagttagtgaagttctttataggtgattacagttttctgcattgatttaaattaaattggaatcatacatacaattagtgcttcactttgtgtcaaactgcagtgaataatctggttgaa

SEQ ID NO: 26385 - DNA, 910 bp, Glycine max
  Intron number 3 from transcript Glyma20g23430.1 (locus Gly ma20g23430) derived from phytozome v7.0 (chr-ID Gm20; pos 33305622 to 33306531)
cccgtccattggtacaagatcgtgaagagagaaaggtatggttgcagttcgaataatcttttcttaattacaatcaaacaaccattgcgttatttttacaactctatagaatctataatgagaaactgagaatctctgccaacttgcatcataattatgatgactctagtgattgtcaacatatagatccactggtaccttttcttttggataaaaatttcctttcatttatttaaaatttaaaatagttggtttgtactaagatagctatgaagtcctttttcattttgttatcagataacattctgttgggttgtcttcgatatatcatgagtaatctatgtgttttatgttacaaaaatttgcaagtacccttttgttgttttggtagggtagtgatatatctcataggacatggcagatgacacaatgacacagaaaaatcctagatataagaaggcttatatacagatgatagatgggtagatcatcaagtagagcatatggaaacataattaaaatattcatgatgtgttaaagtatctttatatagaaattgtgagatttttaatattatcacattcccaagagtactgtataaaggtgttagtgtcaatctggggtattggtgtttgacatgtatagacacaacatctctcaaggtgtggaagctccattgtcaacgcattgttagaatagtgaaaatgttgatagtgggtttcaaataggctttgtgcttattcctttttaatattttgtttaaatttattttcttgttttacttttgtgagagctagtgttgaaatttgttcattttgggttatttgctaaatgacattggtactcatcatcaacctgtaatctttgcaatgcagccaaaatatatccaaaatctgatcaaaaaagcaaa

SEQ ID NO: 26386 - DNA, 842 bp, Glycine max
  Intron number 3 from transcript Glyma20g36380.1 (locus Gly ma20g36380) derived from phytozome v7.0 (chr-ID Gm20; pos 44511011 to 44511852)
aggtgcgtgcttcgtacctataatatttcatacctagccagcttctaagttctaatacattattacaccttcccaatgaatataatgcgccttcagatgaaattaaaacaaattgtgcctctatgagttgaatattgactgctactacataccacaactcattgcatccaagcttcatttcaactatatacataaatactgcatcaattgtttgttcaaaatcttttttttattcatgggaaagtcgactacatatatatgtataattagtgctctttagtgttagaattatatatatcagtctgtatcatctcttctccattatcaacgaagagaatgtttctaaagtaatactttgttttatttaaattctataaacctacctattatgtaatcttacagtgaagtactgtgctaatataccatattaattagggataccattgttttacacctttttgttgtatgattttccacataaatatatatattttttaaatgaaaattaacagataatgataaatcatgtgtgcaaaggtcgaaatggtataattttttactcaacaaaaatgtaactttcacaactagatctagccaatattgctagctgtgtgacaacacctaatccttttaaatattacttaattttaagattgaaagctatcaagattgctttgtttgtacttcaacctatgttatctttctcgtattgtaattcattaattctcaacctctattatgattaaaaaagaaaggcttttgtcgttagaattagtaattgttgtttttaatgcaaagagactttgcttttttctattaattctaaatttgcggtatgcagc

SEQ ID NO: 26387 - DNA, 766 bp, Glycine max
  Intron number 1 from transcript Glyma20g00550.1 (locus Gly ma20g00550) derived from phytozome v7.0 (chr-ID Gm20; pos 308434 to 309199)
aagcacggtcaggcctccaagaccggtcgcttcgggtaatttaattgaattgaagttgttcttcagttgaactatagttaggttgattgacattgtgtgtatttgttttagaaattaggatttaggtgtgaagttgttgtagttgtaagtggaaatcaaaggtggttttattgaagtactggttttgcgtttccaatgatcggttcaatgctgggatttaggtctgaagttgaagttgttgtagttgtaactggaaaatgacgagggaagtgacgtgtggttgttgacgattggcaaaggagttgcgttgttataggttttggatgtttttttcttcttcgtattttatgcttgtttttgtaagaactgtaaaaatgtagtgcgatgccgatgggttgttttgttgatcattttatttttatgtacgagtgaactgtaggaactgaggctgaactctcttgaagtatgataagtgatatgatgtgatagcaacaaaaagatacaaataaatgacaaatgttaatgagatgtttattgtttaatatataaaagtgtttttatgttgttattcttttaaaaaaattgtcctttattttggtaatcaaaattcccgttccctatttcccttttcgatgtgtattatttatttttgtaaaatagtttcacgttaaccaacctgatgtttgggttctaattcttgtcttcatttttgttctctgtatactttttagggttggcttcaactcagtataccatttgacagatc

SEQ ID NO: 26388 - DNA, 243 bp, Glycine max
  Intron number 1 from transcript Glyma17g09780.1 (locus Gly ma17g09780) derived from phytozome v7.0 (chr-ID Gm17; pos 7286129 to 7286371 reverse strand)
agcggtgattcttttgatcgctacaaggaatacaggtttaaggttttctcttcttttttctttttattaatttttttattccttttttgtttgaagttgttttttttttatactacatgtgtggttgaatctaggttttatttacttaggcttctttattgaaactgggaacatggtattatatgagttgttgtgttaataatggaaaagctcgttgaaattgcaggtattgtttgtctgtga

SEQ ID NO: 26389 - DNA, 896 bp, Glycine max
  Intron number 2 from transcript Glyma17g17920.1 (locus Gly ma17g17920) derived from phytozome v7.0 (chr-ID Gm17; pos 15018017 to 15018912)
tgaccctacgcttcttcaagcttatattctcaaaggttccattctcctatgtcaaattcgatcttcttttcgtgccgtcttttgctgtaattgaatttacgctcttcttacctatttaattgcgtgcttttttttttgggattggtaattgaactagttttaggttttagttaaacgtaatctattcattagccgattttccttatgtattttgccttggaaatttactgtgccgctttttgactttttctgactagttttcagatatgctatttcttgtgatcaattaaatagatggatagggtgttgtttgtttctgcatcagtcttgaattatgcaacgatatacagcttctgtgtaattgaagaaaattgacgtgattatctgtgtatcactgaatgtcatgcgtgttgtcgcattgcacagaagcgacagtgtacgacttctgcgtaactgaagaaaattgacatgattgtgtgtgtattattgaatgtttcatgcattggcgcgttgcacagaagcgacaatgtacaacttctgtgtaattgaagaaaattggcgtgattatgtgtgtattggatgtgtgtctgcataaatggattatttttaataaatgattatactctgaaaccaatgtagccgagagaaaaggcaattttgtctacaatgaagattagggttggttgttgcatgatgatcatgttggaattgttttatagtgtattttgtcatgctgtttatagattagtatctcgtcattcttttagtttatgttgaagaaggtttgaatgaaattttctcatgcactacatatgtcttatattttttgacttagggattttttttctttctgttatctaggttctgcgctctctgtgttgggaaggaaagaaaat

SEQ ID NO: 26390 - DNA, 763 bp, Glycine max
  Intron number 1 from transcript Glyma19g42130.1 (locus Gly ma19g42130) derived from phytozome v7.0 (chr-ID Gm19; pos 48190334 to 48191096 reverse strand)
ccgccgcgaacgctcaccctccatctttcctcaccgtaagcattcctatctcccagtgatgcaagctttttcgtgtatcacagtattagtatttaacttaaccagtgtaaagaacatggtttttgtatctttaattagttagttgtttccttaatttttagcatctctatctcccagtggtgcaagctttttttgtgtattacagtattagtgtttaatttaactagtgtaaagaacttggtttttgtatctttaattagttagctgtttccttaatttttatcgactgactatcctagcttctgctaggacatggatccattgaatattctactgtaactaattggttaattcattagtaacctttcactcctttttaattagtgtttttttttttctgtaatattgtgagatatgtattcttactgttctattattgattcctatgatttttgtatctggtggttgttcttagaccttagaattgtgagttggagagaaagacatgaaacaattatcttataatgaccctaattcttcttttgaaatgcctataatagactgatagtggtatattgcgaagtatttgttaaacttgcttgtaatgtatcatatgttcttcattttaaattacaagtttttaattgcagctcaactcaattacattatgttttgattttctgttttgaagccaactctgtttctgttttgattttttctttgcctaggtgttattgtgactgaaagtgaacgattgctgctc

SEQ ID NO: 26391 - DNA, 434 bp, Glycine max
  Intron number 1 from transcript Glyma17g36170.1 (locus Gly ma17g36170) derived from phytozome v7.0 (chr-ID Gm17; pos 40186520 to 40186953)
ctctctatttactctggcagcgttgcacgaaacagtaagttttttgtcaatcttttaaggatgttaagaagatgcgtttttctttctgtcctgtctctgtttccttttcccctaataacacaaacaaaagggtaacaaaaagtttatgctttatggtaaattttgaaccccctagaaaagggtcttgtaatcttgattgagactaggaaagttaatttttttttaaaccctttttgatttggtttggtttgtgaatttttgttttctttttattcagaaatgttagttgttaatcgtgagttttttttgttagcgggagaattatgacctttccctcctttccttctccttttaccaccaaaccaactttataaatcctgtgactttgtgttgtgttttcagttgtggtgtataggccagatcagatccggaag

SEQ ID NO: 26392 - DNA, 551 bp, Glycine max
  Intron number 1 from transcript Glyma17g37940.1 (locus Gly ma17g37940) derived from phytozome v7.0 (chr-ID Gm17; pos 41684884 to 41685434)
gaaaaattcctacagatttaataggtatctatctatatatatattccctttatcccaagtacaaagatttatgaaaatatatatgtctgattttaatttgctttgacagtttagatataaattcttaacacgttttgtttcatgctttaaaatgaatgacattcaatgatgtcaattttattccaaagatatatatattttttaatgatccaaatgctattccaagatacttaagaagaagaaaaaatgcgtttgattaacctttgaaattcctgataatctattttttgaaattcttaagaatagttaaattttcatatatcaaaattatatattagagatggtttttaaaataattactactataaaatttaataattaaattcttttacgctctcaatatattttaataattaaattcttctacgctctcaatatctggtgttctcaacattagtggtgtttaagatttaacccattctaatttatgtgaatactatattgtattgtatgtagcatcggctttgggaataaaagaaacagtgccagca

SEQ ID NO: 26393 - DNA, 627 bp, Glycine max
  Intron number 1 from transcript Glyma19g34440.1 (locus Gly ma19g34440) derived from phytozome v7.0 (chr-ID Gm19; pos 42035910 to 42036536)
tctccacacgtgtgagcccctcctcctcctcctcctctctctcttttcccgtgtgaaatttcccaaatttttctcctttggcttcttccttcactatttggggaagcatctggactttgcgtaaccggagagagatatgggtatttcgtaatttgacgtgtttaataaaagttttgttttttatttttctttttggttcttctctctctaactaatcccgtcgaggaggacgtggatgctggtcagaaacattgtggttttgattggccgcgtattcagcgggttctgttgttgtggacttgtggaatgtgttttaacttttgactacacccaccactgttcatttagtgtaacagcttcaatcctcgtcttactgcatgctcattgcacaacacaatttgtcgtgcatattagtatcattactgtgccgcttcttgcatttgtggaataataatagttctcttggtgtttgttatttgtcatttaaagtcaatttctggtctaatttgatatctttgcatgcactttttctttttagtacaaggcatgttgtgtgccaactaaactaatagattttcttttgaatttttttttctggactatactcagtttgcaggaagtgcattt

SEQ ID NO: 26394 - DNA, 353 bp, Glycine max
  Intron number 2 from transcript Glyma18g02850.1 (locus Gly ma18g02850) derived from phytozome v7.0 (chr-ID Gm18; pos 1860423 to 1860775)
gaagagtagtggtcttgtaagttctgattttgtgatgtttttcagaaactgaatatatgtagatttctgttcaatttaatttatgtccagaggcagaacaaaaaaatgaatgttttttcttcttttcttttctttttttcattagggtcatcgtacgagagatccaagtttaaaatttgtgtattatttcttcttgtaattagcaaaactgtttgatccatgatattttgagactgttaaatcaaattactattgttcatattgttggttagatagtattagcatcatgctgatcatgaggatgtattttgtttggcaggaatttgaaagacctttgtcttgaaggaaatctg

SEQ ID NO: 26395 - DNA, 530 bp, Glycine max
  Intron number 2 from transcript Glyma18g47820.1 (locus Gly ma18g47820) derived from phytozome v7.0 (chr-ID Gm18; pos 57387646 to 57388175 reverse strand)
gtatgctaattattgtaccttcttattttatattcattggaaacgataataacggtacttaatttatatatgtctcaccatcaaattaatcttcaaccattaattaccaacaagtcattattagtttaagtaaaattgagtaagatatcttatttaaatttctacgttaattagttctccctaatcaacctggtcatgacttgcctagttccatctaggtccaaggcaacatttgaattttgaaaaatttggtcacttttcttttagttagaagtcgccgtctgtttatgaaatcggggaccaattttaaatattacgcgtctttatattaatttcgaatgcgtgcatataagggaaaaatgttgagccacttacatggtaagagttttagatattgttctctcggacgtcctttcctcaccttgaataaatattataattatttattgtgttggtcatatatacatgtgattgtgaaatgtgggtgcatgcaggaccattcaactttgaggctgcaaattcaaaaggga

SEQ ID NO: 26396 - DNA, 993 bp, Glycine max
  Intron number 3 from transcript Glyma17g07490.1 (locus Gly ma17g07490) derived from phytozome v7.0 (chr-ID Gm17; pos 5494466 to 5495458 reverse strand)
ccccattggcctcacagttgcaaaggtaatgacacatattgtcactatggtgtgtgatgatacttctcacaaatgacatttctcttttttgttactatcactctgatttaatgcatattgttgaattttggagcaaacgagagtgtctcagaaaatagcactgtgtcctttatcaattattatacattactaaactgttgtaagcctatgacaaatttattcctaagacagtttgggatttcagacccttgttggtaagatagattgcatttgtgtcatgaaagaagtgattcggtgtttttgaattaataatgtcagttttaacatttatatggttattgcattagttcaactcaacccctccccccaagtatggattcattttggtgtgttgtcaagaaactattttttgaaagtgcacgtgataaagtatatccaatagaaaattattatgttttgaggcaattcgatgcctaacaagtaacaacaatgatttgtgtaaacaagggtctctcacatgtcattttgcgtaagagtggatgataaaaagtatgaatcagttacagaaaaaaagaagagcagatcatggataggtagagtggcaacttacaaaattcaaacctacagggtggcacattgaaattgggccacactgctggtaggaaattgatttaacccttgttattatgagattatgaaaatattagggttttttttagcagttacttgtgttgcacccaatgtaaaaggtataaatatgtttttgtggtaatactttaaaagaaacagtattttgtaccacagtccacagctatgcaaagtctcttttttttgtgtgtgtgggtgggtgtgttgtctctgtttccttttccatccaatccctagaatttcatccttttgtcttcaaataaacaaaaacaaaatgatggacctagttttgtagctttcatttgatctaactgtgtactgtaggtagaggctgtacagggaaat

SEQ ID NO: 26397 - DNA, 919 bp, Glycine max
  Intron number 1 from transcript Glyma19g36460.1 (locus Gly ma19g36460) derived from phytozome v7.0 (chr-ID Gm19; pos 43740756 to 43741674)
actcattctccttcaacctctcgtctctgcttctggtacctccctgatctctttctatctattcatttctctttccttttagtggtggagtggtactctgcatatataagaactgcattttccatactagactgctatatcaatgttatcaatagatgattacatggttaacccattgtgaattatttaggatttggagcggcgatttcatggggatgtttagtgtagagtactatcaaattagaaactgaagtagattaacaagatttgttgctgggccattggatttaatggtacataagaaacagaatctgaggtttgagaaaacagagaaaaggtgtgagttctccttcaaagggtgccccattaagtgagctagtgcttagttctccaatattaacaattcagaatgaatcctcttgtgtaactactctaacagccttgcctcatcttttttcaccatgaatctcttgtgtatcccctacaatgacatgtttttgaacagccccattgaaagccattctgtgcattggctatttctttatgttcttcgtatactttttctgatcttctggattgttttaatgttttccgttgttcagttttatcccaagttttgcataattgcattctgaagtggaattttggttacaaggcatacattatcaagttgcatgtccaagtttgttgtggtatatggtgtttttcctcaatttttatttttaaatttaacaaggaaaccttgtttatcaattaggagaatgatgaaataatatttaagtgcacacatcccactataaaatctttttcctacttttattaccgctcttaaagttctgcagcggttttatgtccaagtttgataacagtttctgttgcctgagttcagtctttgttttgtttttttggatgtgatcag

SEQ ID NO: 26398 - DNA, 879 bp, Glycine max
  Intron number 1 from transcript Glyma17g15590.1 (locus Gly ma17g15590) derived from phytozome v7.0 (chr-ID Gm17; pos 12322990 to 12323868)
aacttcgcttccaatgtatgttgtaataccaccctttcgctcttctatttttcttttccttgttttctcacgcaaaccatttttcaatatagaaacaaaattaatgggttgtaataccgttcatcttttttttttttcttttcttttctggaatgctatttgggaaaatttaaattttggacatggttacttgcagccagggttgtgtgtagaaaattaattgcaatttaggtacgacaaattaagtcaaccaataagtagtgtatttaagtaaacggtgaatttggatgaaaaggttagtgtaatatttggtgcaaccctatgtagaattaattagctatctacctaactggtcatttccgccacaaaaagtttagggagataagggtagaagttttgttgttaattttcattgaatgcttttataattgctagaattgttatttattgatacttgtataaatatctagatcttgaattttcaaccaagagcaaggattttgaagtgattgaatagtgacaaaaggaggcatggttattggttacatgtgacagaaatttgaactgtaatactagtttaaataaaacatatcaatgttgaataggtaattctgctgacaatgtgaagtttcctttaccacttgaaaattggtttgattttgtgcatttatatttgactagtctcatagaataactgaataaggagcacttttctttaggactgaattttggttttccctatttgctttatcaaatagtaggaaagcagaaatctgaattccttccccaattaattttgagttgttgttctgttatgttatgctgataattttcatgtaaacagttgagttggagaagcaaacatattgcgatcttaaa

SEQ ID NO: 26399 - DNA, 454 bp, Glycine max
  Intron number 1 from transcript Glyma18g00480.2 (locus Gly ma18g00480) derived from phytozome v7.0 (chr-ID Gm18; pos 173553 to 174006)
aaccctagccgctcttctcttcattcttcactttggtaattttcttctcttcttcatccttctcctatgaccttgatgcatttacctgtttgtttttgctgttcttttcttatttctgcatttgtttttggctcgaggtgcaaatctgcttatctgaaatgtgggtttagggtttaggtacaactaatcatgctactgggttggtgagaaggataatgctttgagctttgtgatgattgagtgcttttgttgagattgctttaggatttccttactttgtgtgtttttatgtcttccaaatggcgagtacgatgtcttgaaagtttttttttttttttttgtgaagtgaagcatgtgacctttttagaatttgtcattcagttgttatggctatcccgatgatgtgtttttattctattgatcctttcattttgtgtatcaggaaacaatcata

SEQ ID NO: 26400 - DNA, 778 bp, Glycine max
  Intron number 3 from transcript Glyma18g00480.2 (locus Gly ma18g00480) derived from phytozome v7.0 (chr-ID Gm18; pos 174291 to 175068)
tggttggtaagttcagcctgctttcattgttgtcatatgctgtccaatttcagtcccccgttagcctcactttaccatatgttcttcggtttcctttgatgtcattataatattgccatgacattgtgtaaatccttcttctgccattgcgactcctttgtggtgcaacttctgtgaaaacagctgttgcagttgcaatgtgtgtcacggtttcaattggcttcacatttttgtgacagtgtgggactactcacaacctccctccgttcatagtgtctgactccccctccccccgctcctttaaatgttttcataggtattttgtcttgagtaattgaagtttgcagttaatattaattttaaaatagctgcttattcttacttgcttatagattaattttttatgcacatattaattgagattttatttcaactgctatgtaacttgttatttgcctgcaataccatctctgctataagtggaattttggcccccatcctgctgttggaatttgtgtgcaaattaccattttttgtctggttatttccacatgtgaatattactcagaatcacagcaagcatagcattttgtatcttattgttaaattgtgctggtgtattcaagggaaaatttcttggtttattattgacaaaactggaataaacattagaagtgactggtgagatttcacagctgctttaaaaaatgactgcctggtttgggtctgtttcacagcaaaagttataactgatagagacagtggaagatcaagggga

SEQ ID NO: 26401 - DNA, 748 bp, Glycine max
  Intron number 1 from transcript Glyma19g32910.1 (locus Gly ma19g32910) derived from phytozome v7.0 (chr-ID Gm19; pos 40606715 to 40607462)
gcggattcaagaaatccaagcaaggtttgatttttagcattcttgctcttttgggtttccacgttttggtttctgctgcaaaagttttttttttcttcttcttcttctttcgtgtttgtgaatgtaagtagaagtctttcttcatttgttaaattgttattagtaatttcgctaaaaaaattaactcaaccctgttatggtatggtgctcattgaggggggaattttctctcttacgcttatgaacatggctactactgccgttgagttttttcactttggccttttttttcagtagttgaggaagtagaaaaccaaaacactgtgattatcccgtctttcaaactttattatgttagataatgaactcaacgtgcgaaaatttctaaaattgtcactcaaaagtaatttcactaaaaaatacatgtcaacactgttatggtatggtgctcattgaggaggaaattttctctcacgtttatgaacatggctactactgtcgttgagttgtttcagattggtctgttttttcagtagttgggccagtggaaatcaaaatcactgtgattactccctttttcaaatgttattatgatagataatgaactcaaaacgtgtgaaaaattcttaaattttgccactcaaaagtaattatgtttgaagttgttaatggctttggaataagatgtactagattaataagcaagagaatgttaactgagaataagtaataatgttttgcaacagaa

SEQ ID NO: 26402 - DNA, 735 bp, Glycine max
  Intron number 3 from transcript Glyma19g00890.1 (locus Gly ma19g00890) derived from phytozome v7.0 (chr-ID Gm19; pos 561988 to 562722 reverse strand)
ccatactggttcgttcgttctcctctcctcatctctggacaaggatttcattgttcttatgcattgttttctttgtgccctttcacatttcaattctgttcaaagctaacttgcacattaaatggtcactgtgaggaaaatgttgtttggatgcttttggatcagaacttcttgtcaaggtagcatcagattaatttcagttatacttgatgtgtcatcatgacatcatcatttctatttcttttatttaggcttgttcttacatattgtgaatatgcccctcgtatgctgggctttagtgtagttggttggaatcaaatgtaaacacaccaaaaaattttaaggctagaataatccccttgtttttttttgtcttttggcattcttatggtatttatttcatgaagtatgaaagggattcctttctcagatgttcgaagagagtggattccatttttttttcttggttcagttaaagacaacacaacaggtgtagcttattgggatgtccccttggcccttttagacaactgattggtctagatgcattgtttcttggttttatatacataatactgctatcatctttttatttgtttttgtctgtctcattcatacttcataaaaatatattcctttaacagaaaagagagaaaatttgtttatctattttcagtaagagctgtttctccttttgcagagcctgtcaggacattcaagtggaatagattctgt

SEQ ID NO: 26403 - DNA, 445 bp, Glycine max
  Intron number 1 from transcript Glyma20g04990.2 (locus Gly ma20g04990) derived from phytozome v7.0 (chr-ID Gm20; pos 5549426 to 5549870)
gggccacttccggtgccaagaaacctaggcttgttgcttctcaaactacttcgcatacttcaacgtctaataataccactcctccgaggagttttgacactggttgtagcccccaaggtttgcgttttcttttttgttttccatcaagatttgtgtctctaatgtgttccaaattatagtcttagttacaaaattaagaaattttgctctacctcataaatttaagggtttttgtatcctgaaactctttttgtttggtcttacaatttaatttattcaattattgacctaaaagactacaataccaaaagtccaaaactctttgttttttcttttctgacataattcttatgatatttccagctactataacacttgtacagaaaaattgtggttatctttctaaaatattgaagaaaaagaaataatttttgttttcataaca

SEQ ID NO: 26404 - DNA, 897 bp, Glycine max
  Intron number 2 from transcript Glyma18g44940.1 (locus Gly ma18g44940) derived from phytozome v7.0 (chr-ID Gm18; pos 54676235 to 54677131)
gctcaaggctggattctgggaatcaattaaatctgggtaccttcaatttccattctccattttgctaatataagaaacacaaaaagggcactggacttgtattgttacaaatcttatgcatattaacaggaaattggccactttgtgccttattttaaaatattttgactgtgtaggaatggtgttttggtttaaggaaatgtttttttctttcattttattttcaccttatttcttgttttaagaaatttgtatagaaagcagtgaaaataactttttattgtttttttttgttgtgtgttttcactttttcatgtataaacttaagaattacgtacgatttattccttcaacttgcttaggtggttcttatatgtttcatacgactttgtgggtatatgcttcatcttattttgaagaaataatcatgtagttttgtcaacttcttgagagagatttagaaaaatgagctgttatgtctctaaaattaagtgagagcaagccctgacacagtggtaaagttctgtcttggtaaccagttggtcatgggttcgaatccggaaacaacctctttgcatatgcaaaggtaaggctgcataataactctcgcccatactatcacatagcaaggagcttttgggcattggggtgcattagttagtatttctctaaaattaagtgttgccaaacatgtactttgttgctttgggagctaaaagttttcacaaattttatacatatacatatttttcctttgattagtatatatgtattgagttcccaggtattgaactccaagattgccaagacagcctatatatagtgcagcacatatgatgattagtgtattatcttgaaaatatacttgacttatggcttgtttccccttttaggttg

SEQ ID NO: 26405 - DNA, 1047 bp, Glycine max
  Intron number 1 from transcript Glyma20g26050.1 (locus Gly ma20g26050) derived from phytozome v7.0 (chr-ID Gm20; pos 35610803 to 35611849)
gctactttcgccgtcgttgaattctttgcccattggttagttctaatgatttctgcaaagttgttgtattttatgtgtttcgagtcgtcggattgtttaaactctcttccgggtgttataaagttcgggtttttattgattttacttagagggtaggagttttatttatttagttttttgttttgggtgatttgacgaaagagagaatgccctttgatctgcaaattggatctgcagtaatagtagtgagaccagttaaggtaagtggagctgtagggaaaaacagtcaggggagctaatggtttgtttttgcaattgatgctatgagcagtaaagggttaaaaaaagcataatacagtgtgtggtatagtatcaagacttcacttgaaaatggcatttttttgttccattcactttgtttcttcctctttcacacctctgctagttaatttgaataaacttcttaacaagcacttgtaggagaagaaatggcaataaaataaagtatgggattatttctctgaaattaaattaatctatgcacctcaactttttcagaaactttctcctttaacttttctataggtatgtgttaacttaagacagctcggtttcttgccttaggaaaatcttaatgatagggctgtcatgaatgaagcctggttatgatgaaatagttacaaagtctaaaatatgacagattgacagaaaaggacgctctgcgaaacctgcatagaatttttttaattgatcaaatacattatgtttttatgtttgctaaattacttatattcttgcagcactcttctgaagtaatgttggcatgatatattttgaataaagccatttttaattatagttttaaatatatcttcttatagtcagataattggattattttaaacatgtggattaatttttgttattttttttattccttctcattcatctttaagaatgaaatgagtataagaaattctcatttctgttgtgaccctttcttctctttcaggtgccctgcgtgcaggaattataaggtattatttg

SEQ ID NO: 26406 - DNA, 294 bp, Glycine max
  Intron number 1 from transcript Glyma19g40010.1 (locus Gly ma19g40010) derived from phytozome v7.0 (chr-ID Gm19; pos 46491666 to 46491959 reverse strand)
cgataatttcacaacattcaactcagcaacatttggtgagcaaaatatatcttaccacgtttaattcaacttattttcaagatataatagtttgtttttaaaatatatttaatttttatagattttcttaatgaaaaaaaaatgattatttagaaccaaacatgctaagatagcataaaaatcaacttatacaaccctcttttgatttataaatttggagagcatcttcttacatgtataattttatgtgcacttgtagctgtggtcgcacaagggtttgtagcagttaacata

SEQ ID NO: 26407 - DNA, 715 bp, Glycine max
  Intron number 2 from transcript Glyma17g33110.1 (locus Gly ma17g33110) derived from phytozome v7.0 (chr-ID Gm17; pos 36794614 to 36795328 reverse strand)
ggtgaatcggcttgctagactcggtaaaggatataggaaagtgtgttgtgattagctgttttcttgatcatgtttgtatgagttgatttttcattcagttgtttatgagatttgcaagaagctatgacaattgtggtaatggatacttcatcatgaattttttcctatctgaaaaagatgatgttttgaaggatccatgtgatacctcacctctagattctagagtgacacaaaccctcttcatcctcgttcaaaatttaagtaatataagctctggactagagaatttgcttgcttcttttcgcatatcaaccatgaccaagcaatatgtagttatgtggccatgactgttaaaatttgagtgttataaataaaggattgaatacttgtttgttcagttggatataaatatgaaaatcatatattgaataagaattcttcaccacatgcattaggtgacagttttgccagtaggtttaatgcttaatgcctacaacatttaaatctctggctgttttactacactgcagctgttcccatttaacatgtacttgttatgtcataaatggcacatgcaaatttctcatgttcctgcgctgcatcttgtgataaagaaaaaagaaaacaactaccaagcatttcatgatttctaatggtaagttttgtttctcaatatgaaggttttctctgcaactgtgttcttccacctagccta

SEQ ID NO: 26408 - DNA, 1029 bp, Glycine max
  Intron number 1 from transcript Glyma19g33730.1 (locus Gly ma19g33730) derived from phytozome v7.0 (chr-ID Gm19; pos 41333075 to 41334103)
gcaacccaaagattgcaacttgcccaggttctaaccagccccatcttttatatttttctgatttgttcctttttcgagtttaattttagattttgggttggttggtataagacagtgctgaataaataaggacaaaagagtaaaacttgattttggtttggttggtgttgtttctctgaacacaaaatgattttggaattttgtcccgtagttgattgcttatggatcacctccgatcatgcgcttccgtgtattttgtaccatgccccgaatttgttttattttgttgaactatgttctttttgtttaaatttggttttgatggaatgtgtttttttttttttcactttacttcgtgtgaattggcatgaaggaagtgcttgttccttttgtgtttaactttacttcatatgaattggtatgaaggaagtgtctgttctttttgtgtttaactttacttaatatgaattggtatgaagtttttgttctttttttgtttaactttacttcgagtgaattggtatgaagcaagtgcttgttctttttttttttttttttctctttgcttttttggattgttgaaaatggaaaaaaaaaagtgttagtgtgaagtgagcgggtgagttttttcagggtttatatatgaataagagcgtttctgttctagttctttttattggcgatgattcctaatgtcattgtcaactgttgctagtttcatttgtcattatctgtctatccataaactctggcgtattgcacaagttcaacaactactttgtgtctgttttgctttttccaaaggaagaaaaaaaaatcatttttgattttggggtaagctgttatggtctttcctgctctttattgtgttttttttttttttttaattcttctttggtgcatgcaatcatctgctattgacttacatctcgagtagcattgcttgggcatacaatgctatgttatgttcttttagctcggttgttggaatgaaatataatgagtgactgtactcttgcaacagatttg

SEQ ID NO: 26409 - DNA, 793 bp, Glycine max
  Intron number 1 from transcript Glyma18g42950.1 (locus Gly ma18g42950) derived from phytozome v7.0 (chr-ID Gm18; pos 52268701 to 52269493 reverse strand)
caggtgtacaaaatgccgctattaaataattttttttttctttcttagaaactaacggtaactaactgaacataacaaacttgtaagttgtaactgaacttcgacaactatgtctcaaacgaagcgtttaaatagtgtttttttttttttatattttaaagtgggcttgattatgtttttttgatcgtcaaataaaaatttgtattttcttagtgctcaaatttaaaaaaatgtttcttttagtcctttcctctaataaaaatatgcatatcaaattctggcggagggataaaaagaatatttttcaaatttgagagactaagaaatgtaaatttctatatttgagtagtggactaaaaagaaggcaccttataatttgagggactaaaaatataattaagtcttttaattgtaaattttgatgcatttttttggtttatttgcctgctattgagaattgatgttacgtgcgtgtttggattagatttgttttgttatttgaaaaagcttatgatcaaaatgttaaagagcaaattcacaattgcgtaattaaccaaatgttgaaaacaaggatacgttgttctgactgtttcccttgcaaaatgttgggaatgtgaaacgaaatgaaaataagatgggactgaaaacacgatgactaaaaaggaagaccaaaaagaatccaaacaccctattgtaatcaaaaggaaaatatcaaacgtcaacctcattttgaggtaggttagaatggaaagaagatagatataaagaaaaaagaaataagtagagaaagaaa

SEQ ID NO: 26410 - DNA, 694 bp, Glycine max
  Intron number 2 from transcript Glyma17g14230.1 (locus Gly ma17g14230) derived from phytozome v7.0 (chr-ID Gm17; pos 11004895 to 11005588 reverse strand)
taccgcaggtacctaatttaagaaagtttatttcttagtaaattactatattagtccttgtcattaaatcaattaaagcatctccgtagtttgttacttaacaagttctttattttaagatattattgcttaattgttttattacaatagagattcacatatcatatttgattgtttctataagcaacacgattgtttatgatttaaaatatattttcttgtcatttaagagtttttcactaaagagttgtttaaagttatattattggagcaaaatatatatgacttgcatgactatgatgtaatattgtgtggtcaattaatagactaaaattcaaaatagatgtcttaaattgcacctactgaaaatgttcttatagactaaaatgatagtaaatttatataatttatggattataatagtagtaagtcctatatattaggaactaaaataactaatttaaattttatgaatttataaacatttttctaattttaaatcattggataacttcaagaatttgatgaatcattgtgtagaaagtcgaacattggaaactttacacaacaaaaagtgtgtgcaaatagtaaatatcattagatcaaatcccctttattcttaattatcacattaatgtatgtgtgaaatgatttttcagagtaccttgcgtaagaagtggggggatacgattct

SEQ ID NO: 26411 - DNA, 1027 bp, Glycine max
  Intron number 4 from transcript Glyma17g32360.1 (locus Gly ma17g32360) derived from phytozome v7.0 (chr-ID Gm17; pos 35764688 to 35765714 reverse strand)
tagtaggtgtcgcggacaaggaattccgcactgaagtaagctttgcaatagacatattctcgaagttaatatgcaattttgtttggatcaacttctctataaatatttatataggagaataagataacaagcataaaattttatactataagctaaatttaacttgtgcattagtaaaatgagcttttggagaagttaaaattagcatattaatattctgtaacctgcaggggatggttggattttttgcattgggtgattggtcccatcttgtatataggttagggcaccctttgtgcccttcatatataatacaaataatttgctgagtaaaaaaaacaaaattgtttggcttcttcaaaaagttgattttaacttatgggagaaaattattttattttttcttttcattctcttctcttataagtgtttatggaaaaacttatcaaaacatggtcttaaccaatgatattttgtttgattggaaaacaatattacatgcacatgatttgattaaaattgggtagttaataggatggttggtgattgcatcagtatcctctctctcatatgtatatatatgatttcttcttttggatcttgaagatgtgtctactcagtgacctttctcagtgagtaagaaaatggctatggctgagtcttgggtgaaatcaagttaacatgaaatatcttcaaagttcaatttatttttttgttagatgtggtatgcttgaagggttgatcctgaactaaaggagcgttgtccaaaacgggtgacctgactttgaacttgatttgttgccttgaatgaaatttgtgggctacaaattatagacacaaactatgtttgtcatgcaaatttgggccataataagagaaggaagaaaacgcagagattttttggcaaacatcttgagctaaaattgataatgtatttaacactaaaaaaaaataacactgcaatgagaactgactgatgtttgcactttcagttgtccagccttataacagaactggcatcagcagc

SEQ ID NO: 26412 - DNA, 627 bp, Glycine max
  Intron number 2 from transcript Glyma18g11640.1 (locus Gly ma18g11640) derived from phytozome v7.0 (chr-ID Gm18; pos 10427935 to 10428561 reverse strand)
ggtatggatctttggtcgttttttttattgattattcacttgtaaaaacccttaatatatgtagggagatttgtgcaaattatatcggcctggataaatttaatgtgatgttttttgtgcttatgtttcttatgatcctatcatctgttttcagctttcgtatacaagtattgagaatatatgatagaatgatagaagttatcttttgattttgaataatgaaaagggaatggacaggaaaaagtccgagattgaagtaaattatatatactagtagttcctagtatatgtaaaaattattttccatcacccttaaaacatgcaggcatagtttttaaaatgacataggtattcccatcaaataggaaaagaaaagtgctatgaataagtaaccttttcatccagcatgaagagtagctgcataaacagaattttaatattacttttcagtaattctccaacccacataactgtgttgaccattaaaatctgcagcttaatttatgtagtttttttatgcacctatatctgtttgtgtactaaatcaattttatgctacctattgcaatctgattttgttactgatacacagaatactttctgattgtattccaattaaaggaagaa

SEQ ID NO: 26413 - DNA, 729 bp, Glycine max
  Intron number 1 from transcript Glyma17g36490.1 (locus Gly ma17g36490) derived from phytozome v7.0 (chr-ID Gm17; pos 40410466 to 40411194)
atcaacaccttgttagtaatttctttctcttacaaaggaatggaattttcggatttgattttgagtacatgatgatgtccacatttttttacccccttcctttgtttcatctcttttatttaagtcaatttgcgttttttttttgtttgtttttttttgtatttttttacctttttacattacggttatctgtatccattattttagtaaaaaagttttgagttttggattagctgttgttcatggctctttttttccccggattatgacattctatagaatcataaacgttcctttttttaaataaagatttgagcttgaaatgcaatagtggaaacatgcatgtgttttgtgagttctgcctatgcatgcaccctgataatctgatatgatcatatggttatgtgacgtgtggctatgtctgtatatatatttctttagctagggtgtgtggatctaaaaggtgcagaaaagaaagtgaatgagttagtagattgtgatgtggttgttcttggtttatttttttgttctttgttttgcagttactatgtaatttgtatacttttgagatggatgtgactggttctcaaacaaattgttatgattagtcttagatatgtattctactacctgcttgtttttgcagcttgttgtgtcttgttctcaatgatgaaatttgaagtctgattgcaggcacttccgaaagcattttcagataatttaaagaag

SEQ ID NO: 26414 - DNA, 870 bp, Glycine max
  Intron number 1 from transcript Glyma20g00900.1 (locus Gly ma20g00900) derived from phytozome v7.0 (chr-ID Gm20; pos 624705 to 625574 reverse strand)
cgacttgttgactgccatagctggagcttcgcagggtaagaccgagtctcgttcaatttagttttttttaggaaattaaataatgctttttgttttaaataggttagtttttgttcaattctagtatttaatttaaataactgtacatattaaaggagtatttatttcatgaatatttagatttatcttgaagctatgataaatacttagggtaaagtgcttctttttcggtcaaaattaatcttattctcctttaaaagcaacgattttgatcttgttttctataattggtggatttcggccctcaccctaggatctaagtttcataaagagcggatgaattcatcaattattaataatatgaataccaaaatcattgtttttaaagcatatggacgaaaggtcaattttgatcgaaaatagattgaactaaaaatctaaaacacactttaaccaaataaataattagattttcggaataacagctgattaatctaaaaagtgcttagggttttggagagttaattatggaaaaaagatttttttcttcttccttttaaagctgctaagctctattaaaagaaaacaattctctttttttcccataataaactgatgtcaaaattattttaaataattatttttaagtttttgaaagaactcgtgcaaaaaaaataaaaaaaaataaagcaattaatggtcgaaaataatggcttgtttataaggaaataagtcaaaaccagcataccgttgttaattatggtttttccttttctagtgtaaaacaagcatgcaccaagtttgtttgtgttgtgatggttaatatcacgtgtaggaaaatttgaggaaaaaaggtcacaagtaccggtt

SEQ ID NO: 26415 - DNA, 1041 bp, Glycine max
  Intron number 3 from transcript Glyma18g48680.1 (locus Gly ma18g48680) derived from phytozome v7.0 (chr-ID Gm18; pos 58129065 to 58130105 reverse strand)
tggcgtgggagaagaagctctacgaggaggttaaggtaattttagcttcatttttttcttttggggtgttttgtttcttgttatttgggataatatgacggttcccttttaagagaatttaattatatttttcgagacgataaaaaggtgaagggaaaaaggaaaacgagtgagggtatgcggagtaggttatgttgggctttggtagcgtaaggtcacagcagaatttgactgttaatagtgaaaatgacctctttttcctttttttctccttatgaattgaccaaaatagcctcggttgttgggaccaacctttattattgtggtacaaataatgctccatgataggaacatacttatccagaaaatgctttttacacatgtcgagtaatgatttaagtgtatgttaggtcttacggttagcctaagaagataatttcctcattttgacatgaattttggtaaatttggaggtgttaatatgataatgatgatttattgtgtgaaatgactaaagtacccttcaccctttaactctttaccccaatgagacaaactgactagaagggaaaaatagcaatgaaggaatgaagaacaaagtaattaacagatttgagttactttgcacttgcctgtttcttcatattttgtcctacatgtgatttattgtttacacacaattgggtctatcttactattttttgttgtctgcaaactgtgtatgaagggcaaacattttctgtcacatacacttgtgtgtgtaggtttacttactgaaaaaggcacacgtttctttgggcatacggcactaaaagaagaaaaaaagtaatgcctaggatattgttatgaatgtttgaaatcaccataaatgttgtgtgtccaacttgactgcttttttaccaaactgaagtcaggtggttctgttgcatttatttttagctaaaagcctaaaaccatgtggtttggaaacgaggtgtgctatgctaacactttctacaaattgtgcttgaatttaggctagagaaggtgtgaagattgaac

SEQ ID NO: 26416 - DNA, 611 bp, Glycine max
  Intron number 2 from transcript Glyma18g48680.1 (locus Gly ma18g48680) derived from phytozome v7.0 (chr-ID Gm18; pos 58130221 to 58130831 reverse strand)
ggcgcagcttgatcggagcttcaagcaattgaggagtatgttttcaaccaaattcccctttttgaaatttctcaacacacttgtttttgctgctagtgttcttctatcagaatctgagttttatcttatcttgatatagcttatgcattacttttgcaatcaaaacttagatatagcagaattggaatttcatccccaagaatctgcataatatagattgtcatggtgaaactttaattttagttggagaatagtatcaaaggtatctatgaaattgcatttaagttttttcctaatgcaaagttttattacaaaacactagttttaatcgagaaagcagccttttgagaaattctttttatttatttttttcatgtttaaattgcgcaattttaatttgtcttatggggtgttgaaagtatttattatttaattggggtttgagattgattattgggggagtttattttttcttcttcgcgtcaatttcggatgaagattatgctttttgattttgaaacagtggattggaaattgtgggtaggtttgaattgaattttgattttgattttgcagaaactgtgtatcactcgagtagcatattgagcaac

SEQ ID NO: 26417 - DNA, 774 bp, Glycine max
  Intron number 1 from transcript Glyma17g06720.1 (locus Gly ma17g06720) derived from phytozome v7.0 (chr-ID Gm17; pos 4791993 to 4792766 reverse strand)
gatcttcgtcgtgccaccgctaattctagaaggaggtgaggccagtttaataatcatggtaccttatcagtttttttttatatagtttttatgaggatgtaattacgtttcattgttttcttgggtttaatttcaatttgtgttgtttctataatcttattcctcaaattcggtgccaatttgagagttccagccaaagttatattacttcctaggtattaatggtaagcttaacgatataatgtactagctgtttttgttgtggtgtaattccccccccccccccccccccccttcaactctcaatataacaagggaatttttttattttttgggataatgtggatacaatcatacagaaaatacaggaaattttggcaattttcaattgagaatgcttacgtatgtgtttggatgaattcattccgttataatcgattatatttcttttttgttcctcctgtcaggccaatatcatcttatatcaaagtattgtttcgttggctgaaatgaaaagaaaaataagctgtttcttggtttcgctttaagggttatttgcataaattatggattctggatatggatttggcaattgcctgctgctacaacttacacgttatgtgtagagttgccaggactgagttgttagatccacctgtttcttggtgtttatcataattgtgcattaaaaacaattgcatatttgttcagctaaaagcagttttttttgtggtgtttcttatttaacacggactgtttataatcttgtcaggt

SEQ ID NO: 26418 - DNA, 504 bp, Glycine max
  Intron number 2 from transcript Glyma18g41140.1 (locus Gly ma18g41140) derived from phytozome v7.0 (chr-ID Gm18; pos 49821255 to 49821758)
ctcctcattggcagcattgcttcatttctggtaaacacatgcacataatcagaatgcttcaattcattttttttgccttttgaatcaaacagatgatgccaagttaaattttccaggaaatccgatttagcaaagctggagcatttggtttaagaaaatactttgtacttttatcccctgcttttacttctagtttaaaaaatatgactttgttttcattttattttccagtttcttagatttttatattaaaagtgaaaaggactttttcttgttcccattgtttcttgaacaaacttttaaaaatagaaagtattcttacacccttgatcttaaactattaatgctattgttactgttctttaaaatttaagccagaatatatacaaaaatagagcatagctcatgattagtacttgcgtaaatagaatcagttttgatttctgctatatgctctactttcatcaatgaataattgaagacatgcctttaacatgacaggga

SEQ ID NO: 26419 - DNA, 602 bp, Glycine max
  Intron number 1 from transcript Glyma18g10990.1 (locus Gly ma18g10990) derived from phytozome v7.0 (chr-ID Gm18; pos 9827831 to 9828432)
ccattttacgttgtcaaggccgagattcaagattctgtaactttctttttcttattttttgctctctcaatttacctggggttcactctcagcctaattcggataagaacttccatttttccttgaataatttgtgctgtatattcgagtgattgaatgttattatttttattttttgatttaatggtcttatagttgttttgatttcattttcttctatcttaggttattaatctgattagactttttcctacgtaaatttgttagttttgaaggaaacccaattgcgatctgtggctttgtagtgtatacactggcacgatttcttgtgggcgtatatgtgattggagctgagagcactgaaaaaaaaattactatgtgtggatttgggattttgattaaaatttaaagtcggatctgtaactgaaacaggatattatgctaaacagaaatgtgaattgatgaattgttatggtgttaggatttgtgttttgatgggatcagtattcagttgtttttttaaagtgggaatgtgtttatttgattgtctgattatttgttaatttcttgaagattgataagctgcaatctacttttcacca

SEQ ID NO: 26420 - DNA, 856 bp, Glycine max
  Intron number 1 from transcript Glyma20g24950.1 (locus Gly ma20g24950) derived from phytozome v7.0 (chr-ID Gm20; pos 34610010 to 34610865 reverse strand)
cctcatcactgctgctccacagcaccttggcccaggtcttatactataacaaattatcattctttttaggataaattagttttatcgtctcttaatttattatttaggtttaatttcatcatttatttttaaaattaattcaatttgattttttatttttttattcagtttaatattttaatttttaaaatcaatttatttttttaaaaaatgcatatcatgtgatgattttgaaccgtcacaaaatgtgattacttattatttaaattgaatctgaaatagtaaattgaataaaaaaattaaagaataaattaaatgttaaaaataaattagaagactaaaaaattaatttaaccttctttttatctattcaccgaccatccttaaattttaatacattcttgattaattatatttgataaaaatttaaattatgatgcttagcattatgcttttcggtattgagccccaaagatagtaaaatttagaaacaagtgaaaaccgaagtttttctagcttatattgcaaaatttaatttataaattacaatgcgtacactaatattatattatattataattatttaagtgaaattttactcagattctttaatgtttaaatctagtgaataaattcactaaaatggtcaactaaattttttgaatggagattaattatgatgaatatttcgtacgtataacatgatatccaaaaaattatcagcgtgcttgatgttttgatacatcaaataataagaaactaataccgtttcaaaatagcattaattaaaaaatgtaacaagtgtcattttgttattctctttttccatttccagttgtgttcaggtcactgttgt

SEQ ID NO: 26421 - DNA, 753 bp, Glycine max
  Intron number 1 from transcript Glyma18g07840.1 (locus Gly ma18g07840) derived from phytozome v7.0 (chr-ID Gm18; pos 6571589 to 6572341)
acgagaaggtgaattcaaatgttcaattgtttgcaacagtttttttataacttttttaatgtttggtttgtcggaaaattgacccatgctgtgatcagtgctattggtttaagttttagaaagaaaatgaaacgtggattgtttgattcatgatttgtttggtattttcttcgtcgtaatccaatgaaactgaaaattataactcttaactgttacgattatttttcgtttcaaaataggtaatctctctgccacgtgcttttttggaattcaattaccttttctggagtttagttatggttttggtaatatgatttatgcttccctgttcttgttcgatgctataaatgttggactatttttatgtatttatttttcctcctactgatttgtgaaaaaggatgtagtcttggaattattcgatgtttttgtttagtaatgagttattgatgtattctatcttgtctgtggttagaatgcttattggtgtttggtatacttgttactcgtgtggtcatgccacggagaagaatttttacattttctcagtgattgagacttgggattagggaaatgtggcgtggtaatggaagcaaaaactgaagcagtagagtaatggcagtactttgttagaaagatgtaaataggaaatgttgacttcattagttcgttatttattatttttctcttttttaatgctattttcatttggaatgctatttaattgcctgttctctcgttatcaggttgtgg

SEQ ID NO: 26422 - DNA, 810 bp, Glycine max
  Intron number 3 from transcript Glyma17g11640.1 (locus Gly ma17g11640) derived from phytozome v7.0 (chr-ID Gm17; pos 8742724 to 8743533)
cctctgccttggctggagtgcagcagttagttagggtaagtaacactagttacaaccttcaattgacctaatttatatattaaatatgttatttatccttgtaatctgtttctatattggggactgcttttattctcagcttacatcaatttaaaactaaagcatgtgattagaacaaaacggaagagtgagcaacatggtggcaagattcagatttgatatatgaacaaaggatttggtgattgttttattaaattgttttaattagtttccgaaagcactgttatttgatcagttgacatgatttaaagtcaaattggaatgcttctggctggttaacaaaattgtgtggctactatagagatgctataaggtatgatgatataattcagcatatgataacgttatctcgaatgacaaaagtgaacacttactactgtttctctgttgctgcaatgaatttaccttgttgcactttggcttgagttatgcccatattagtagtacaatatgctggaagttcctgttcttcaacactgaacttctgatattttagcattttactaggattgggtcattcaagatctcatatataagcatctgatatacactattgctgcacaattaactaccaggctatcatacaatcctagattgcatttcacatttggagatattgaaaagtctggttaataatactctttgatgttgtcctctatataactacaatacattttaaatttatttgtattgaatactagttgtttttcttcaggcttcggctttggagatagggaagtaccaggtcag

SEQ ID NO: 26423 - DNA, 695 bp, Glycine max
  Intron number 1 from transcript Glyma17g14530.1 (locus Gly ma17g14530) derived from phytozome v7.0 (chr-ID Gm17; pos 11278715 to 11279409 reverse strand)
agcacccccaggtttgttgtctctcaatttcattcgttgttctttgtcttcgaggttatttctgttattcttcttttacccctgattatgtgattgttgttgtggtttatagttttcttaaaatccttctacaatttgtttgttaattgttcttcttttctttctctttctcaaaatccccttttttttctcttcattattctgagcctcttactatgaattttcattgtagaactgcatcatgttttgaaattagttgctattttgtctgtttgtatattcttaattttattttacattgttattgtttcgtgagatgcatcgtgcaccgattcgaacttccaacttctttttttgcgtgcctcgggtttaataatttattttttctaatgttgtaagaatgtgtcaaaaatcgtgaacatctcgaaggcggagaaaagcatgtttcatctaatccacacccctttttcaaattgatttgtaccgacaactgtattttaacaattttctgacttttctttggttttcgtgtctcatgactcaattgcccctttttcttccagaatgtttttcttcatttcgttcacattactttacttttttattttatctattaagccctagaaatttggcataaaatatgtttaattgcgctgactttgaccattcacaacgaaacagggttgtcatagaca

SEQ ID NO: 26424 - DNA, 393 bp, Glycine max
  Intron number 1 from transcript Glyma18g02600.1 (locus Gly ma18g02600) derived from phytozome v7.0 (chr-ID Gm18; pos 1646628 to 1647020)
agtcagctaattaattggtatgtctaattttcaccaccaccttatcgggtcttcaaaatttaatgctattattctcagatttcttttcttgttcctacattctgactttgcatctgtcactgttctgagaactgaattttgttgaattattagaaaaatagaaatagattctgggttttcatttctagttttaaaattgtttattaagcatatgaacaccgtcaccactcaccatagctcaattctctgtctttatttttttatttatttgctttgatactttccccggtgcttatatggatgcatagaaatagaaaatttgctacagacttgtaaccttggcatagtttcttcatgtcttcttcgcagtatttttctgtacctatatcattg

SEQ ID NO: 26425 - DNA, 353 bp, Glycine max
  Intron number 1 from transcript Glyma20g33910.1 (locus Gly ma20g33910) derived from phytozome v7.0 (chr-ID Gm20; pos 42364161 to 42364513)
taccgctttgcaacctccctcgcctccaaagctaggtaagtaactctccaatgccagtgttcttccttttcaattattcttctactccctccagcttgcttccttttttgttttttctttctattttccgcaatttctcttctgggtcgctgaaaaatcccccagaatggatcaaaactgtaactttttcttttcgggttttgggtgttgtatctgagatagatccggtcatattgattgcttatttgtggtgctttatgctggaatatctcattgtcttcaatgcttatgactaaatttttgttattttgattgcagaattgccaggagcagcactcaacaggtgaaatacc

SEQ ID NO: 26426 - DNA, 501 bp, Glycine max
  Intron number 1 from transcript Glyma18g01480.1 (locus Gly ma18g01480) derived from phytozome v7.0 (chr-ID Gm18; pos 798167 to 798667)
gcctcggtatgatcttcttgttcttctcttccatcttctcaattattatgcattgcaatgcatgtacgctttttttttggtcatgccatttcttatatttagattctcttattttctttaagaacaaaatagcttgacacaaatgaaaaaaaagaagacatccttccaatgttatagactcaaatgatagaatgcaaatggttggatagaacttaattagttggactcactgataaactgtttgctgaaataaagaagtaagaatcaatatttgccataaccatttttttttcgcacaactctttatgcgaaaattttggctaaaaagttacagctatcttagcagttttcataatttttttttgttcttctaagaaatctaggcagaaatgaactttagatatatattcttgtttgttgccttaaagtgaaagatgatatgcaatatttgcaatagcaaaatcattcatcaattaatgatttgtttgtacgtgcagtttg

SEQ ID NO: 26427 - DNA, 382 bp, Glycine max
  Intron number 1 from transcript Glyma20g31580.2 (locus Gly ma20g31580) derived from phytozome v7.0 (chr-ID Gm20; pos 40203652 to 40204033 reverse strand)
atctttgacgctgcctccttgttctcgacgctctggttggtaccttcaactttccaatccttttcttcctcttctttgctattctttcatttattgtccttttctttgaacacgggaaattctggttctatttatcacattcaaaatctgaactcaacacggggaatatgaggaatttgctttttgggtgtcattgattttttgtgacttttatagagcgttgactttgctttaatcttaatggtgtagtgtaggtgggagaagttgtttttgcttttattgggtacccttttttgtttttcactttcttatctcccccatattgtaatttactactgtttactataatccgatacttatgtgttattttgctagtgcaggg

SEQ ID NO: 26428 - DNA, 784 bp, Glycine max
  Intron number 2 from transcript Glyma20g22690.1 (locus Gly ma20g22690) derived from phytozome v7.0 (chr-ID Gm20; pos 32613419 to 32614202 reverse strand)
ggattgatcctcaaagaagagacgagctaatcaaggtctgctttgatgaatcttttcttaaacctttattaacctaacatggttccttggttttatgtgtcagcatatacttcatgaatacttttttttctcttcatatgacacgagtatgctttttgtaattttaaacaggcaaaacaaagcagcagggcaacgccatgaataacttaccttagtggttaatacaattgaccacaattctttggcaacttgttttctctttgtgggcatagatatggctgtaggagtggcttagtgaccactgaattggcatgttgttttatacaaaagtaccactttctgtataaccatgagtccatgagaaatattatttgactttcattcatttcgtaagatatccttctttttccattgggcctctttggttcatttatgaatgtggttgtccatgaggtttctcttaacttatgtagtttatgttaataaaatataaggaaactaactcattgaagtgaatgcattaaatatgttaccagcatctatccatgaatttgatattagatgccatatggcataaagactgagctttgaagtttcagatttgaccaaaaataaagccattatgtactcttgatgttgatgttctgtttatgtgtggctatttctggaaaggtttttgtgggaacgcatatatagttgcctctggaaatactgttgcttaatttctatcttgctgttcaactggataggtattagatatcgatctttcctggagattgcataa

SEQ ID NO: 26429 - DNA, 910 bp, Glycine max
  Intron number 1 from transcript Glyma17g31040.1 (locus Gly ma17g31040) derived from phytozome v7.0 (chr-ID Gm17; pos 34183186 to 34184095 reverse strand)
tccaggttaggatttttaagtaacacagtttttaatatatcatatgtgaatttcattctcaatttagtaagtctaattttttgtatttgataaatattctctaaattttatttaataataagtttattaaatgaaaaaaaaaagtgtctaaaagggtatattatgtttccttgtgttattgaaaaggtggttgatatcatcatagtaagagaagatttaagaatgaaggtttgtaataataaattaacgggaaatgctattaacatattctttaggaaaatactagaaacacattttataacacattctttttaatatgattttttattattagttgaaatttattgaaaataaaaaattatttatggtgtctcattttatttattgaatctcataattttataattgtcaataaattttaactaatcgtgcagtgtggttagaagaaatatgttgttagcactcctctactcttgaacactctatttgttagtactttctattattggataaaattcatgtaagttccaataaaaatgtgagtttcactttcaaatttgtaagatctaataaatttctattttaaaaaagtgttatcaatatattatttaacactcctaagacatttttatcattagttaaaaattataaataaagaataaaacttatataattttatgtattctaataagttttcatcaataataaataaatgtgttaaatttttttattagacagtgcattaataacatttctctttcaacccataagaaagactagataaaaaaacatgttagcaagtgttttattagcacacttagtgaataactaaagaatttgatgttttaaaccgataattttgatcctaatttcagctaactgaattcgaagaaggtggattagcaattgg

SEQ ID NO: 26430 - DNA, 573 bp, Glycine max
  Intron number 1 from transcript Glyma18g46460.1 (locus Gly ma18g46460) derived from phytozome v7.0 (chr-ID Gm18; pos 56191738 to 56192310 reverse strand)
cagtcactgcaagggatacctaacggtatggttcttccacaccctctgttgttgttgtattcagttctttaatttgttgctacaaaatatgtgttctaaatatgcttgtttcattcttagagtgttattatggctgaatatggcattcaatagtttgtcatttagcctacctaaccaaatacctcaaatgtaatgacatcaaaatcatatagaatagaagcatgcaaggctttacttaactcctgaccaaactttgaattagtcaagatctctttttcttaatgaataggagggttaagacaaaaaaaaaagaagcatgcaattacttagctattacatgcacaactcatacatgaaatgaagtatatgctttggtatctagcacattattaaattccatggattatgtcacaattttgatcttggattcctagcgctaaaatttaaaatgtgatgacattatcaccaagcttgtattttgatatggtttgattcaaggaaagaagaaatatatgtagtttaaaattgtttctaaatttggtgctaatggtgcaatgttattttggtcaccag

SEQ ID NO: 26431 - DNA, 1018 bp, Glycine max
  Intron number 1 from transcript Glyma18g04890.1 (locus Gly ma18g04890) derived from phytozome v7.0 (chr-ID Gm18; pos 3642954 to 3643971)
cagcttgctgctcccttctcaacttcaacaatttcggtaacacttattctctcattcacgcagtttcacatttttacatcatttctccaaattttatgttttggtttatgggatatggagattgagttcacgtatgatttgggtctgatttttattttgcgtttgtggggttatggttctcaggagaaccatttttatggtgcactaattttgttcgatgaaatgcccactcacgtgctatttttgaatggccgtacccttcgcatccgaaagcttaagcccctttctgattctttatttcgttttacattcaacgttaagaattgttctattgctgcttgtgtttggttgatctaacatgctgtgttgaaagcatcattctcagttagttgctattgggagtttcatgcttttgcttggttttagggagagtaattgaaagaaaactgattccaactaaaagaggattttttttccctcctcctccttggttccatgttaatgttatttggctcatgcctggtccattttgaatagttttatacttttattgtatattattattattattattattattattattattattattagaacaataatggaaatttagttccaagtaaaataattgggggggcaggatatgttcagtgacagactgatcacaagagtgagtttattttgatttgatttgaagattacttgcttcataggtgctgtctgccagattgtagtgtactgttatcgtggcttgattttgttaatagatttaaattactaatactaatataaatttgtgtttgtataattgtatgtattgacattttgattcttttcctaactactaatattgaaaaagattcattcgtgtattttggtccttgatcgaaccataaatataattttattataaaacaattgttttcatccgtgatcaatttttctgcacccaaacatttctaaacacgcttcacagaagttgatacttattttcttttcttgcagatagcactta

SEQ ID NO: 26432 - DNA, 564 bp, Glycine max
  Intron number 4 from transcript Glyma18g04890.1 (locus Gly ma18g04890) derived from phytozome v7.0 (chr-ID Gm18; pos 3644892 to 3645455)
atagcaataatacagtcaccacaaggtattgttttttcttatttgatgttaccttgttaccatcagtcatcatacgattaattttttcttcaggttgattgttgtatggttattagaaatagccgttgaattccctagaaattttgaaataaaaaattcattattttcctgttccgcacatggtggttcaatttctttgagctgctttgtttccttcatttatactgtgcattcgtataacacagtacttaggcaaaaaaaaaaaaaaccaagcaaatgaaggaaatcgtaaaaatatatttgttcagctttatgctttacctgaagattactccataaaacttgcctattctgaaccatcaatagtagtacctttaccttacttttggtatgttaaaggaaaattaagtaatgattcgatgagatatgcttatgactttatgaggcattattcaataaacctcaattagggtgtgctgttttgcaagctagcttttttgcagttgtaacttctattgggttgatgagtttttttttttttcagggaaatcgtggtgcagttca

SEQ ID NO: 26433 - DNA, 857 bp, Glycine max
  Intron number 1 from transcript Glyma17g34060.1 (locus Gly ma17g34060) derived from phytozome v7.0 (chr-ID Gm17; pos 37958214 to 37959070 reverse strand)
gtggtggatcaatttgaagacatcaaacttttagagtaaccaaatcaataaattatagtaaccaaattcagtgaccaaaaattatgaataaaccacccttttggtgcctggaattgttacaacgatgtcactttagtccttgaaatttaggaatttgtaaataagtttatgatatttctgatgtttaattaagtttttgaattctgattttaatttctaaacatgttaataacttgattaagtctttttttttataattttaaactaatgtaattgataaattatacttttagagacttggatttccgttgttgcaaggactaatatgagaacattacacattttcagggttatgggagtagtaactataacgtataagagaggtgttagcgtagtatttttaaaatatttaagaagttagaagtaacaaataaaagaaataagaaaattgtgtaatcttacaaaacttaaaagaagtgtaagtataattgattctattaaaaatttctaaatgaaaaacttaaactcttcaaattatatattactatataatttataatatagatgtagattatttttattattgatgaatagaagatctgagtttggttcgctgaaacttcctctttacttatttcattttctcacatgtccccatcttttccacaagtaggaaagtcaacacaatcattatttaatattttttagactaaattttacttcccagccctagaaccagaatcaatatatatatatatatatattaaaaaaaaagataagattattctacttctataactaattttaatttttaattcttaggtggaagttggttgaaagttccaaggaggattctg

SEQ ID NO: 26434 - DNA, 761 bp, Glycine max
  Intron number 5 from transcript Glyma20g01360.1 (locus Gly ma20g01360) derived from phytozome v7.0 (chr-ID Gm20; pos 916875 to 917635 reverse strand)
ttgttcaggtgaaaattttattgtttacaaagtttgtgtatgtgatcaactattgaatgatgtttgactttggttgcgtcgttgcgattcactatatggtggctagaaggaaaattttgtgtgatatccaataataggatatagtagtatagttgtgcaactaggttatggttgtagagatatgaaggaatagataataatattggtttctaaattctaagtgagcaatattcaagcatttaataataacaaactagattcaaattttttctatttcaccttgaaacatcaaactgaattcttttgcttcctctatgctggcatcctagatttgttaacatgcttctttccattgacaagtgactcccactctcatagcttcctctgccttctctatgtagaagtgaatcaagctaggcctagctgaagcatagctcaattaggcagttagttagactattttctctcctaattttgatcaggtgcatcgcacctcatagtctgatcagttgcattgcacctttcccctcttcttacaaataccttagttattttattatgggttctatccgttttttttttttgctcagtccatttgttggtaattaacatttaatattcaatttatttatcttgtgtcattagttcttattttaagatgcattgaaagtttcagatggcttttactttcaagttgactagtggagtttgttgaatatgatccatcttgttttttggtttaatgtatatcagattacttt

SEQ ID NO: 26435 - DNA, 770 bp, Glycine max
  Intron number 1 from transcript Glyma19g35330.1 (locus Gly ma19g35330) derived from phytozome v7.0 (chr-ID Gm19; pos 42868507 to 42869276)
aacggcagtggtatcagcttcatcctagaagtctggtattcaatttttagaatcccttcatgtgctatatttacttttgaaaatattccttgcctgactgatctgcaaatagtaaaggaatttaatctagttatgttctatattgtacaatacagcagtacagtgctatcaatgatgataaatttcaataactcgtgttacttcacgtttcacctcagattagaaaatcagtttcctcccttcaattacttgttcttcattgtttaatcaacaaaatctacttcttggtttagacaacttctttgtcctcttggaaatttaactattctttgaattctttagcatgttttcaaaaaatataatatttctgcatgcaatcttttgatatcaaatatatatcacctaaggaaattggtagcagttgtctctctatataatctagccctatcagaaagaaattagagcatgagcattgagccatcaagggtattgattgttcttatattcgtataattaaccatgccatgctggcctatgagtaatggctatgctgttaatgctaaaagttattttgaaggttcttcatgtagacttggaatgttaacaatgatgcattgttgcattaacttttaggtgtctttgtgtaccatacacatatttgtcagaaatgtaagcttatcattttgtataagtaagccactgtgaatattactgtagggttgtgtacattataaggagccaacatcgctctttgaacattttttgattgt

SEQ ID NO: 26436 - DNA, 692 bp, Glycine max
  Intron number 1 from transcript Glyma17g06790.3 (locus Gly ma17g06790) derived from phytozome v7.0 (chr-ID Gm17; pos 4844525 to 4845216)
ttttccttaatccttcgcctgctttttcattccgggtgggtgctctctctctttcccttttgcttgatttcaaattaatatcgtcgcttatttgatgaagaaactatacacacacaacacaagggaataattctcccttatttttttctttttcttgtaaataaattgggtgagattgtttagtgtcttgcaagttatttttcgttatacactctctgtcacccaacagaggtttcgatatcttttttgatttcgaccccgaggtggttgcccgtttcaattctaaacttaactttccagatttttcgttcggattaaggttgttttagctgttacgatactccgaaacaaacttcccaatagactggtccctactcctgtcctgctgttaaagtttttaacaataactctctagcatgaataaattaattgcttgagtttttacatgtttcgtgcatttttttattttttttattttccggaacattagtctatgttccttaattccttaatgttgccaatgtttattaaaattagaagaaatgttaggttgggtggatgatgtatttgggtcgttgtatgatgtgttgttacctgcctctcttttgatgatgtcgtgagggttgttatattgctaatgcacttttttttttccagatttttctgcatcagtctatttgtagggtgtattc

SEQ ID NO: 26437 - DNA, 912 bp, Glycine max
  Intron number 2 from transcript Glyma17g06790.3 (locus Gly ma17g06790) derived from phytozome v7.0 (chr-ID Gm17; pos 4845646 to 4846557)
tgccatttgaaagattgtgggacaagttttttcaagtaagaatttgttacctgtctaatttgatatgttcatgctgttgtttctcaatttgactggtaaaagaaacatcaaatggttagtaccagggagactttgagaatctcattcattcattcagaaaactgaattggaattattagaaaaaagagctgcttattgctcccttagatggcactggtactctgcatgaaaattgttagtggtctctcttgcttttggggaatgatgggcaaagtaaactgttgcatgatttaaataattaaaatggtctgtgatttgattcagtattttacaacattgcatttgaaagcaactgttaacacaatagatattttgctagttcttccaacattggacaagaattattcttgcacacggttgtgacaatgatgttttttaattcttttcacagccttgggcacttacctctaactgaaagtgctatttaatgttttgtatttgacccttgaaatttctgttggtatagatatagccttggcacagtggtaaagttgtgccttggtgacctgttgttggtcatgggttcgaatctggaaacagcctctttgcatatgcaagggtaaggctgtgtacaatatccctcccccataccttcgcatagcgaggagcctctggacaatgggccacactagttttttttatagatatacaacacaaaatgcaaaatatgttttacacttttactaatagactcataaattattgtgcgaatatacatcctttgtatttgtaacttcagtagttggtacatggtttccttttcttttgaatcctgttcatcttgtggtgtgcatttacctggaagatgcactcctcctttttttcagggtcacgaagggaagttctctgttt

SEQ ID NO: 26438 - DNA, 429 bp, Glycine max
  Intron number 1 from transcript Glyma18g53930.1 (locus Gly ma18g53930) derived from phytozome v7.0 (chr-ID Gm18; pos 62185640 to 62186068 reverse strand)
ctaggtagggtaaattaaaactgctaatgctattgttcaaataatattatttctcttattattcagttgatttaatcttaattgcctcattctttatatatttatgttttttattttctcattaaccaagcatacatgcaatgccctagaagctttattttactttagttaatttaaaccacccaacatttacttgcttactttatacttattcactttagagagttaaacccttatgacaaggactgatgtgctcacctcagtcctttttcttttctaatcataactttattatataccactacacttttgatgtatatgtcatccattaacctttaaacacttgttctagtttaagcaaaataattaattttttctgtttatgatgcataggtaacgtcatttcgttcttggtattcttggctccaa

SEQ ID NO: 26439 - DNA, 590 bp, Glycine max
  Intron number 2 from transcript Glyma19g31870.1 (locus Gly ma19g31870) derived from phytozome v7.0 (chr-ID Gm19; pos 39644542 to 39645131 reverse strand)
gaaaaaacatcaaaagaaaacgctttacgtacgtttcgtttcttttatgttactgaaccttaatttttttacaaccttatttgggagtcacgaaatgactatatctcattcaccttttctccgagcccacatcataaattaatagtctctccacatttgtgaagctatatacttttttttccttatgttttcccaatttttttttatcttttatcttttgttaccaacctttcctcctgttacgaggccaatttcttatgcctttgggggaaaaaaaattaaagggtcctttgtcgatctttccgaatttgacatcttttaatttttctcacagtatttataaccttcactggttaatctctcaatttggacaatgcatgtacaatgcagttattcacagctttacctgttgttgatgcaattttaaggttcttctaattgtaatatcttgtggtccaattcaaaaaatcacggttgtagaataacaattgaaaattcagccaaaaaaagaataacaattggaatcattaatgcctcattactctttattgagcttattgaccttggcttctcccttgtgtgaacagaag

SEQ ID NO: 26440 - DNA, 489 bp, Glycine max
  Intron number 1 from transcript Glyma18g46240.1 (locus Gly ma18g46240) derived from phytozome v7.0 (chr-ID Gm18; pos 55997248 to 55997736)
ttcttctttggatatcttgttaacggcatctgtgaggtatgtatgctttgttctctcttgattttcttgaattcttgaattcttgagtttaatgtttgtggtttcacagtttctgcaaatgggttgcagaaataagggctatgcttgaggagaaataaaaaaaaaaacaaatttgggttttgttgttgtttgtgtttgtgcgttaaatgggttttggtttgttttgtttgatttggtagatattttttttaattttcttctctttcataatcaatagcctaaagttttttttttttttttttgaggaaaatggtttctcaaaagtcccaagatttgtctgccttttgttattctttctggatgtcttgttggggacttttggcttcaatctttgtttcttttttcttttcttttattttattgttattgtactgtgaataatttactattaataataatgttttttcattgacctgattttgcaggaat

SEQ ID NO: 26441 - DNA, 791 bp, Glycine max
  Intron number 1 from transcript Glyma17g20020.1 (locus Gly ma17g20020) derived from phytozome v7.0 (chr-ID Gm17; pos 18532802 to 18533592)
gggtttctggttcttggtaagtttaaaggttaagtacatatttgaattgaatcagtgatttgattgtcttttttctttttctttttttctttcttgttctatttttaggcatgcaatagggatactcatgctgattggtttaatatatcatttaaggtgttggaccctcaaaagctaattaggtagtttcaaccttgtggtaagtggcaactgtactcatttttggcaaatttaggacagagaaattctagcaatgagaaaagtacatggttaagggaaaagagtatattaaattattaatatcaattgagaactttgagttgacaaacttcaatatcatgaccgttgcaagaagtgccctagtaaaaaaactgtgaaatcttaacaacagcagcagggagtcaaacgcaactgcaatggaaattcagatgtttaacaatgtttgtgtcagtggtcctagttaacaagtctattaacatcctgtttgttaatgagtttgattactcttagtgagtacatccttcattttaaagttgggggaacttgggcttaataggattctgtagaactaaactaaccaaataattattctagcaaacatgcaaatgggtgttctgttattgtaaattttcctttctttcacaaacaacaatcttatttccttactatcaagttataaaaaaaaatgttttcttctattttctgtatgaaattttagcatttggtaccgtgaattgatatataggttgttgtcaggtacgtcaagtttgatacattcactcctgcagtgg

SEQ ID NO: 26442 - DNA, 650 bp, Glycine max
  Intron number 1 from transcript Glyma18g11950.1 (locus Gly ma18g11950) derived from phytozome v7.0 (chr-ID Gm18; pos 10752014 to 10752663)
aacaagtagttgttgggttttcgttttcttttttcgtgcattcgtatacccttttgggtttttactcatacacgataggaaaaaaatgttttttttaattatttattttttgggattgttgggaagggttatagaagaagttcttctttttatttaggatagagaaagtgttcatttgattcaaaatgttgtttttgttagttctatgttgttgggtttgttttgggagatcagagaagggggctgttgggtttgttccagaggttgtttttttagttaaatataaaaatagtcttttttaaatattttaaaaattgcttatgtatttattgggtatgtttaggaagattataaggagtgctagtaacacacttattcatgtcctgtttttggttattatatcacgagtgggggggttattaacggagtgagacctatttaattttgtgttttccaataaatttcagcttataattgtgtgtttaaaagagtgtattagagagtgttttgctaatatttctcttgtttctagatttgctttatgattcatgataggaaatagtgtttatttgattcaaaaattgatttttttttaatttttgttgaatttgttgggtttgtttaggaagattatagaccagaggaagaag

SEQ ID NO: 26443 - DNA, 740 bp, Glycine max
  Intron number 1 from transcript Glyma19g26580.1 (locus Gly ma19g26580) derived from phytozome v7.0 (chr-ID Gm19; pos 33623412 to 33624151)
ttggaccaattatgtactcctaacttatggtcatattaaggagaaggctaatttgtagtacatgggagggactatgtcgattagatgatgtacaaccgccatgactcgaattggttcctattcttaatcatgaaattatgatgtacccagtgtatagaacaatttagtcaatttttaatgcgcattatgttagttaatctatttatttatttagtccataatgtttattaatgtcacatgagccaagtgggagaatgtaagaattaatgtctcatgtgagagacatgtgacttatgtagggactaataagtaaataattaacgattaagagctaaattataattgggtttaatagaagtttctagggttaactgctacttgatgggagtagtggttataagaggggcttaatacccactaacgtgaaatgaggtcccgttcctgaccagaaagtgttcttttcttacccatagccatcacgaacacgaacggagagagacataaaagaaaggcctaaggaagtgaaatcttatttctctcattttcaaggaaatcaaagtgcaccagacggaagttcctatggagaaaggtacacatcattatctattattttttattaattgttatcatagattccaagatcatgttggttttctataattgatagtctaggaaaccttaagaatttttacattttcttcttagccaccattcctttgctcttggcttcttcaattggg

SEQ ID NO: 26444 - DNA, 521 bp, Glycine max
  Intron number 2 from transcript Glyma20g35120.2 (locus Gly ma20g35120) derived from phytozome v7.0 (chr-ID Gm20; pos 43404422 to 43404942 reverse strand)
gggaggataatattgttcctaagagtttccctgtatgttgctttgttagcttagacatacggcatgttcactatttcttcatggtttcttgcaacatccttttaattgctataatctttaatatttcatttctgctattgctatttggtttaattagttgtattaataataatgaactctcttatatgctgtttgatttgaatacaggttgccaaactcttatgttcaagtatattagtttggtaaataatacacattacatatgagttaaataagatgcttaaaatggattataaatgggaaagtaaacgttgaagaaaactaattccttatccacatccacagtaatatcctaatcaagcaacatgattcttgtttgcacaatgaaaataaacttcatagtttcatagatgaataagtgggcacaatcaagttcatgggcatcatctaaatatgactatacttttggctcatcagcagtctcatggtgtttgcaatgtttatgtttttgaaggtttgtg

SEQ ID NO: 26445 - DNA, 484 bp, Glycine max
  Intron number 1 from transcript Glyma20g28230.1 (locus Gly ma20g28230) derived from phytozome v7.0 (chr-ID Gm20; pos 37182820 to 37183303 reverse strand)
tttggatacgacattggcgtttctggtaattaatgctctcatgattcaattccccctcttgtttcaaccatctgttcctaaaataaaaactttaattttcttgtagtgtttgaggtataagtagctttttaatatttattttaaagaatactaagaattttttttttaacatattcctttaaatacttctttttaattgattaatatttattaaaaacttctttttcactcctttaaccacctctatgtttagtgtcttagtcactccatgaaactttctaactctattttcaagtgtagttgaagcgttgcatatgtactgttatattaaatccatgacccaattttcgtttttattgtagcttcaattatagtttcttctcttttaataaaaaaaatactgctttttttcttccgaaaataaaaatataaaaatataatttgatattatttctggcgatttgaatcaggtggtgtgacatcc

SEQ ID NO: 26446 - DNA, 416 bp, Glycine max
  Intron number 1 from transcript Glyma17g07600.2 (locus Gly ma17g07600) derived from phytozome v7.0 (chr-ID Gm17; pos 5601048 to 5601463)
tggcaaattgaaatagaatagagatttttcccaaggtacaaagaattttttttttgtatgtaccgtagaataatatttttgttttgttgttcggtttctcgaagttcacgaagagttgaacgaatctgtaaaaaaaaattatttttaatatttaaatgaacagtttgagagttggcaattcattggttgcgcagagttgaagagttctggacaaaacttccggaacctgttttccatctctctcgaaaatcatgtggggctttgactgttacaaccaattccttgcgatgcttgagaaaatttgatttagttgttgttggttgttttggtgaatgcaatgatccatttgacagagaacacgatctgtccaacaaacctttttattatttcagaattttcggattgttcaagatttg

SEQ ID NO: 26447 - DNA, 567 bp, Glycine max
  Intron number 3 from transcript Glyma18g52770.1 (locus Gly ma18g52770) derived from phytozome v7.0 (chr-ID Gm18; pos 61267743 to 61268309)
ttgacattgcactgatcattgcagcatactgtgcggtcagtaacttaagtccaacttgtatgatttcctataaatgttagatccgtttgactatcttgacaatttatctcacgcattagttcatgctgctctaaattcaatccactctttgcaaacaatgcaatgaagatattgtagttgcagtagtacattcacacacacaaacacatatattcaaaaatcatttgaccgataaaaaaaaacatattcaaaatctttatcatgtcctctattttcactatgaatttaaattttccttagattgaatcatagtagatagcgaagtgcaaaaccatttatgaaataataaagtctataattttataaaatacaaactcttgataaaaagccatggatatgtagccattaactccctttgattttcttatcataatatcatctgttatcacttacagtcttacactatactatctaaagtgcctaggatgcattttacaggatcaagatctttttactgtaatgttgtttactcatttttttttcctatgtagacattgcctcctgttg

SEQ ID NO: 26448 - DNA, 631 bp, Glycine max
  Intron number 1 from transcript Glyma20g19640.2 (locus Gly ma20g19640) derived from phytozome v7.0 (chr-ID Gm20; pos 27777456 to 27778086 reverse strand)
gctatattgcacctggtaggctcctatatcttgttttgacttagatagccaagtctatcaaggtagatcatattattgttcgtgagtagtgtcttgtagcatattataatttgtggtttcacttcatgctcataaacaatgtttacttttttttccttgttgaagaaagtgagttttgtacattaagcagttttcaaattgctttttctgtctatagattttgatgattttaagagagactatcttatattgttacaatcgatttactggtattgagtattgacctcatcagcttattgctaaattaatctcattcttgaatttttctcatcctcttttctaagatgacaccaaattaatcctcatggttaagtgttattcaaaagaatcttataccacatggattttattcatgtcatttggcatattacctccagtgcttcttactgtctcgctttctatttttgtttttcaatttattcaataccgtactaaatttgattagttatcaattacggtttgatgaaccatttcatcctgtatgaatatgcatattattcaatattttaggccaaatttgattagttatcaaatactgtttggtgaatcattttatcctgaatggcagaat

SEQ ID NO: 26449 - DNA, 550 bp, Glycine max
  Intron number 6 from transcript Glyma18g34220.1 (locus Gly ma18g34220) derived from phytozome v7.0 (chr-ID Gm18; pos 40272954 to 40273503)
atcgtgatttatttggaaatccttcccaagacgtatgcaatgtttgtttgtgtatgaaaggtatgtatttttataatatctttcgacatcaacctatgcttcgacatggtatgcgtgcgcacatgcatgagcaaaatttatctattatgttagttgaaattggaggtgatgactccacaaaagttaaggaatatcaaagaaaacaactcgcgatgatagtttccttaattctctatgagcataagggtagaaaggaaagggcacggttacaaagaatctggtgattttctgcattcaaggcccttggtgaagagtcacatgtcatgactcttggtgaagagtcacatctcatgtttgttgcgcatctattcatacttttacttcatatgagtggacacaaaatctcatgaaaggatacaatctttaaataattttgaaaattttacataatcacccaccattttcaaaatatatctgatccaaatggtttttgattaaatgtactcaagttagtgcacaaatcacgttcatcaattagtcatacaattta

SEQ ID NO: 26450 - DNA, 634 bp, Glycine max
  Intron number 1 from transcript Glyma17g16370.1 (locus Gly ma17g16370) derived from phytozome v7.0 (chr-ID Gm17; pos 13058995 to 13059628)
atcgattactgtagaaattgtcgtcgattctatatgtgagtaattgcactttccatcaatcgtagctctcgtccacattttcaattttcttcattaccgaaaacctttcacttttttttaatccagattatctatttatttatgcatatctttttgtttcaatgaattctcaatgatttttttagctagattttgttggagattatggtcaattgcattcgaagcgacttgatcatttttttaaaaaaaataaatcaggataatattgtttgtattgaatattaaaaacaaatggtttcagtaacataaccttttaggctttctattggttttctgaagaaagattgacgaaaataaggttagggtgtcgaatatgcctgcacaattgacctggcaaattatttttcttttggaaaacctgatgttaaattcatgtgtatattggaagatttgagttgttttggtggtttttattaaggtagtaaatgactaaatggggcataagtttatttatctgtcttggaattgaacctgaattgtggttttattgttgctatgatattagtgatggcttatggaaatgcctcttttttgtgcagaaaacatattaggcactggctaccattttgaattc

SEQ ID NO: 26451 - DNA, 861 bp, Glycine max
  Intron number 2 from transcript Glyma17g16370.1 (locus Gly ma17g16370) derived from phytozome v7.0 (chr-ID Gm17; pos 13059881 to 13060741)
agttgcccaaggcttggtatgaatgctgctcttctcctgccattttttggggcgtatctaatgagtaacgtatattgattaatgattactttgtaggatataaagtagacaataatgcttttctgctgcaacagtttcctgaattttatccactgaagtaaaatttgtgtaattaacacctatgcttgaaaaaggggggggggggggggggggtcaaatttggttaccattggatctctaagtttaaaaagttccgttaattaattatattaataaaatttccataaattaaacgctttagaatttcaataaataaaacgctttagaaacaacaatgggtgaaatgcaattgggacttgctaccaaagttgcttagcccataggaattaaacctatgcaatcagtggctcaacaattaattgtggttaggaatagttggaagcatcctttgttatatggtgtaattggtaccttactgattgttttcttgtcattgtcaatgttgaagaaaacaaacttcaaataaacttgctctattctcacttcctgtattgctacaccagttatgaatttgaaataacctttatttcttccacttgtaataatgatttttatacctactggtgacatctgtgtatttgcatgacaaagacaaccactgataatagaacacacgtattttctccttgataacttttgtctgcattcagccttgtggaattattgtcacatgtacattgttttgtaaaaaagacattgacacagctcaaaactaaattgtctttacactttcctttactggttgtgtatttttcatgttttgcaggtttatttacttatttattggaattggtgcggtcc

SEQ ID NO: 26452 - DNA, 941 bp, Glycine max
  Intron number 1 from transcript Glyma19g07240.1 (locus Gly ma19g07240) derived from phytozome v7.0 (chr-ID Gm19; pos 8549965 to 8550905)
ttccgaacgagcgaccttcttcgtttctcgcaaaggtaacagcctctgctcttgtctcttccattcgatccatgcctgtctcttctttacgatgatgtttcttcggtgtatgtttatttatttatttatttatgctttatgttgtgaatgttcggttgttttgtttcgctttgcttttgtggattctattggtttttgaatcagttaatcggaagagattttcgagttgttttgtgttttggaggtgaatctttttgttgaggtcgcagatctgttgattttgtgtcataaacgtgcgactctgtttgattttttacgaggttatgacgttttggttgttttattatggatctgttaaggcagaaccatgatttatgtttatgttcgtttacacgattaaattttcttgtaacacgatgaagtttttttaaacacgttgaaggagtcttgttgatatgaatttgtcgattgtttttttgtggttttgttctcacgttatcaagcgtaatcttttactatgtacgcgaacatatctagatctagcagagctttttttttttttaattctttgtgaagcttttgaaatatgaaatttgtttttcaaatttttttttaatttattgaaaacactgtggatactgaataaggttctatgtatgatgcgaaccatgtttgatatgtttgtttttgttgttccatatggatttttctgttagatttccatatgcttttgagtttgtttttgctgttacagattgatttactttttagaatatttctcttggctttcactgttttagaaattttttgttattggtaactataaatgtgtgaatttggattatacctttaccttgttatttagttgtgtgataatttggtttatagttattttgagttctgactcgtgtttctttgaattgattccagtttaagtcatc

SEQ ID NO: 26453 - DNA, 557 bp, Glycine max
  Intron number 2 from transcript Glyma17g06040.1 (locus Gly ma17g06040) derived from phytozome v7.0 (chr-ID Gm17; pos 4264455 to 4265011 reverse strand)
taagggtatgtgtctttgatttccccccatgcttgtttgcaagtgttaacatgctcaatttcactctttttaattcttcctgcaattgcttattcattttcttactgtttcaaaatttaaaataaatactgtaccgtcataaataatagtatatatgtcctagtagtatattttgattttgtaatatctctgatttacatggaaaccgcctttgttaaaaattgcctttgcaaaaactgcccgctggctgctagaacatttctccagtggtattcttgaaaaaaattatatgtagatttattgtttacattatgtgttctgcgtgaagcttgtaaagagctttatgttggtttatgcctttctcattttttctctggaaggggtggaatataggatattctaccttttcagtttttaggttctaataaggcataattgtgttgtagactcagctttaaaattttgttctttcctttatatggagagttatctttcagattaataaggcttgcaataaaaccttttgagaaaaactgctttgtttttataaatttcag

SEQ ID NO: 26454 - DNA, 1033 bp, Glycine max
  Intron number 2 from transcript Glyma18g07360.1 (locus Gly ma18g07360) derived from phytozome v7.0 (chr-ID Gm18; pos 6060957 to 6061989 reverse strand)
gcataatcatctgcggcctgatattaaggtctgttaattactcgcttaatccttgtcaatggtgcgcactttgatgacgctaaattgtttttttacatgttcaatatatatgcaaactttttagaaagtctcatcttaaaaaaaaaagtgagaaaagaactaggccctagggttatgttctttgaatgatcaatctgaatatctttctctccaaatttaagatcaaaagaagtgctaccaactagttagtttaacaaggatttttcaagatattaccttgaaatgtactaatgttttcttaattatgaagcatctaggtatagattcagatttttcaatgaatctatttggaatctccagatcgatcacacttcatatatttccttttctatatcttctcaattgttggcatataaacatgggttaaagatcaaaactagttgatattgccacttccataattaatgattcatatattttctattttttttttttttgccattctcgtacatcttgtttatctcacatcccccctaaaatcacgttaggatgattatcacatcataaactattgctactaacttttcgttaattttattcctattcttgaaatgctcttatataccaacatttcgttaattgctcttatataccaacatttcgttaattaatcactgatttttattttaccattcatattttggttatctcacaatttttccccctaaataaaatcatactaggattatcacattataaattattaattactgctaacatttcgttaattttgtttctactaacatttcttcagtagctaatcttttgtgacttaaccacactatcaatgtatacctgtatccaattacgctactatatttcatgtttcttatttccaaattcacaaaattgtgtttattggtacttaattatcataaaaattttaatgtcaattacattcaaactataatctttattgggtacttaacatgttacagaaagatagttggagtgaagaagaagagaggatatt

SEQ ID NO: 26455 - DNA, 504 bp, Glycine max
  Intron number 1 from transcript Glyma20g22920.1 (locus Gly ma20g22920) derived from phytozome v7.0 (chr-ID Gm20; pos 32871770 to 32872273)
ccttcccctcccagatcttcttccataggtgcaaggtgttattctcatctttcttctctttcactttgtttttttttttttttgtttctctcttctctagaattattgatgtctgtttctcacctttgattctggctgttaattgttatcactaggaaattttttggtgtggttggtttctttctttacagtgtgtgtgtgtggttgattctgctttgtttattcctttcttggtggtttggttttctcttgtttgtgtttttcattttgaaatttgaaaagctggacatgtttgtattgtagctgtttattgtatgaatgttttcggtttcaatgtgctttcattttggctttcggttgttactggctctttcttttttggttgagtaattattagggcttttgtttttttgctggttgattttgggttttttgtttggatattttagcttggtttgttctgaatttggccacattttgctctggttcttgtaattgcaggaa

SEQ ID NO: 26456 - DNA, 592 bp, Glycine max
  Intron number 2 from transcript Glyma20g22920.1 (locus Gly ma20g22920) derived from phytozome v7.0 (chr-ID Gm20; pos 32872374 to 32872965)
gaaaactgcttgctgatatattccctaagtcccctgtacgtgttttgtggctctttttccttgataattgaaatagtaatctcattgaactcttttctccggtatgacctcataggaaacaaatttttcgtggaatctagtatttatagtgccattatatccccactggaagtagaaaaatattttttctcttttgcgaagcgaacaatttgaaacttcttgtgtcttctgtgcattgctgtgggcttattatttggtcaaagcttatatacagttccttaggttcttttggtgctcttcttcatcaattagaatcgaagtttcaccttgataatctcttaataaaggtttgcattaaagatcaacataaattaccgagttgaaattccaattttgattgaagaatagcaccaaaagcacttaaggaacggtatctaagtttcgtccttattgttttcagttattccttgttctcaatggaaagaaaatttttatgcttgattatatggcaatatcttttcactttaccctcatttgtacatgaagtagaaccctaggcccagttttcatgctttaatttattcttctcagg

SEQ ID NO: 26457 - DNA, 371 bp, Glycine max
  Intron number 1 from transcript Glyma18g49490.1 (locus Gly ma18g49490) derived from phytozome v7.0 (chr-ID Gm18; pos 58901637 to 58902007 reverse strand)
atcgacatctttgagatttaccgaagatactgtggtaatctctcccgcttacccttttcaatcacacctagcaaacaccaattcggttcttgattatgcaccaagttttgtttttgtttcatttttcaagattttgtccctttgggtcgccgaaatcgaatgttttcttttctgggtcttgtgctatggcttactttcagcaccatggtgttggtttagttttctctctctccaagggaaaataaaagaactagaagaattctttaattttaattttaactttgttttgttttttgttaattatgtctgtggtgtgtgattctttattatttatttatttgactatggttgtgcagacataaaatcaggac

SEQ ID NO: 26458 - DNA, 281 bp, Glycine max
  Intron number 4 from transcript Glyma20g35250.1 (locus Gly ma20g35250) derived from phytozome v7.0 (chr-ID Gm20; pos 43498324 to 43498604 reverse strand)
gtggtcatccccggggtggtgaaacttccaacggaagtctcaaaatcaaaattccggtaaaggttataaagctcttcttgtcctatagtctttatccggttcttctttcttaatccttactgtgtttctcctttcagtaagctaaagttattttaatccttttgtccttcacttttgttcaaaagatcttcacgtgtatgttctagtgcatgactttttcgtatgattagcagaattcttccaaagcaaattcaagtcaacaatcagataccaacaagagg

SEQ ID NO: 26459 - DNA, 503 bp, Glycine max
  Intron number 2 from transcript Glyma17g22200.1 (locus Gly ma17g22200) derived from phytozome v7.0 (chr-ID Gm17; pos 21887991 to 21888493)
tgtgaggaaacatcagatactggacttaatacaatgtagtgccctgtgtttagttctgacacgacattgaatgataagtatgaaattttctacgtcaatcaaatgtcaaactcaatttttcatgcaatgaacttctaaaactataaaatatagtatataaaaatatacattagagatgcatgtttgaatctcatatatgcattttccttctttgcgtcctgtagcttatttagagatgcatttaatttgtgttaaagtattgaaggtactccatctttgagtcttttttaagaaatttcaattagcttgctccgaccaaaaactaaaaaccaaagtttggataagaatgtaatctatggttacacatttaatctatggaaaatcaaagaacaaaaagttagttgcagaaacagttcctatccgaactctggattagttaggtcttttcattcccctgatgtactggagggttaagacaaaaaataatagttgtagaagcttcc

SEQ ID NO: 26460 - DNA, 353 bp, Glycine max
  Intron number 4 from transcript Glyma20g04910.1 (locus Gly ma20g04910) derived from phytozome v7.0 (chr-ID Gm20; pos 5377142 to 5377494)
agaacagagaaacatcacatccaattccacttccggtcaaatctttcaaattaatgcggttggtagaagtgactcatcggatgatgatcacgttcgacacgatggtgacgcatttcaatctgattttaggtcagaatcatgcagcggcagcattgatgattcgttaaaacatcgaattccgagttctaaccattcttgtgaaggatttgattttgtaagtcataaagatgaaagagttgaagacattgaggaaactcaatattcatgtgaaagtgaagtctcaaacagtcagaaaacaaaagaaaccatgtgggaagataacttggatgaatcagattttgatgaagcagagg

SEQ ID NO: 26461 - DNA, 952 bp, Glycine max
  Intron number 1 from transcript Glyma18g10330.1 (locus Gly ma18g10330) derived from phytozome v7.0 (chr-ID Gm18; pos 9202163 to 9203114 reverse strand)
ggaactgcttgtccagttcggaagcaagtatattttctctctcgatctatccactctttatgaaaatttatttactttttttttttgaaagttaggctaaactgcaaacaacccactccaatcgtaggccactagcagaaaactacatgtgatttaagattactcaatttgattccgtgaacttaccaatccgtacatagcatataattaatttaacccttcgagcatttaaaatactaataaaaaaacttgaatagggaaacacctcaatacattatttttcgatttcgggtacaggtacccatttgttgaaggtcgttcgagcttttcctggaagtatggtatggattacttcagcgctgtagcgcctgatactggaactttgactcgagacattttctctatcccttattaccctgaaaaagcaggggcaccttgcatccttgaaccgataaccatctttcggctaacctagcctcctccgtccctcgggaccaacaaagggtagtacaggaatattcacctgttgtccattgactacgcccttcggcctgacaagtttaaggtgttgagttatatagtatattaaatcacatgagatttgaatttagtgtaaagggactagactccaataactatgcgaattcatattcttgttagaagagcagtactcatttagtatctgacaatagtgttatttcccagagaaaatatctgccaaaaaaataaatcacgtgtaggataagttttgaactaattgtgacaaattgctatttagacatattacaaataaaatttgagatccatataaagaaaaaattaaattggaagccacttgacttaaagaaatttttaccaagaagaacatatgattttttttatctctagctaccaagaagttgcaccaattaactagtggactgatgtttctttaatttaaaggtacaaagga

SEQ ID NO: 26462 - DNA, 956 bp, Glycine max
  Intron number 2 from transcript Glyma17g13190.1 (locus Gly ma17g13190) derived from phytozome v7.0 (chr-ID Gm17; pos 10094667 to 10095622 reverse strand)
gtttgctaaaccaaaggttgttttctttctgtcccgctagtatattgtatcattttccttactgattagggtatgtttgggtgtggggttttgtggtgaagtacaaggttatgaaaataaatataaaagatcatcacattaactttatgttaatctatcattttgcttctttcattttaaaatattatcgaatttgatagtatatattgaaaatgaaaaatttgccctcccttccctgtcaaaatctggctcctaaacacacccttagtgaatccattcttgtgcttttattactttataccaacattttagggttatggttataattcaatgcttttagtacatgtgtgtgtgggcacgcatgcgttgctaaaaacataagagacagatacagaataataaactggaaacaatgcttgaggaagataaagggtagagtgaaacttttattgattaataacaatacccagcatttggctaatggagtgttttgctccattaacagattatgcagggatttttgaaaaggaacactttgtcgtaatgaagcaagagcatgtgatgccttatatgatttgttaatcccttatttatgcgtaagctgttgctggagggtgaaaaactaaattctattttgctttttgctattttattttattttatttaagaatgacacaagttttgttgaagtataaaagcttatccttcgttgacaatatctggcaaggaacatgccatctcctttggcgaaaactttttgcctcatggttcatgacttccctttgtcaataatgattcagctgtctaattaataaacttttgtctactgccaagtgccaacctccttttgccacctttccccaccctgtttccctcaaatttcacggcatatcatttgatttctgatatttacatttacaggtagttggtgctgtaaattgtgctagtagaggttg

SEQ ID NO: 26463 - DNA, 997 bp, Glycine max
  Intron number 3 from transcript Glyma17g06420.1 (locus Gly ma17g06420) derived from phytozome v7.0 (chr-ID Gm17; pos 4567708 to 4568704)
ttggctgaagaaaggacaccggaaggcttaccaaggtgttgtgtgtctctttatttaccatctgatacgcataggtgtcatgaaattataagtgaaactacatataacttcagtgtttataaatcacaacacaatcatcagttaattttaattcttggaaatcttcccttaattttactaatatataccttaagtggaaggggtggatcatcataggtggctgccccaaaagtttaaaagttccatagatagaaatgtaagagaaaaaattagacatgctttccctaaacatgatcaaaacatcatatggccattccattttttttatcaagacctgctactattaagtattaagtggggtgggattttctttcttagtggggcattgttttgggtttgaacagttgaatgttagaaattaatacttagtacttactgaaatttatgaatcaaatggaaagaaaaaagggagaagagtgatgtcataatataaaataataatctaatactcttatttatggtagtattctaggtcaagaactagcatagactatagagcaatatgtataatctcaggccaaaatcatacataacataataggagtattaccaccctaattatccttatattcaaacaatacaaataggtccagactatggaatatatgaattgacttatgctattattcacactgagttctcttgaaaataataattactcacattgtacataagctttactttcccgccttgtaattctttgataaaatcttggatttgtagaaataattattatatatttctttgaagtaaactgacatgattattttttcatcttctacctccccttgtccattatcttctcgtctacaacttataaattaacgctgttatattccccctacttcttatgtgtttctctaccgaatgtatgtgcattcatttgtgtgtatatatgctctgttctggttatgcaggatttcaaaggctgtgttga

SEQ ID NO: 26464 - DNA, 507 bp, Glycine max
  Intron number 3 from transcript Glyma19g42890.1 (locus Gly ma19g42890) derived from phytozome v7.0 (chr-ID Gm19; pos 48708328 to 48708834)
tcggtggtacgtctgatctattattttttcttctgtttcatctatttgatttgttaatgtcggtgatgatggtacgtctgatctattattttttcttctgtttcatctatttgattagtgattgattccaactaatctgaaaagatcaaaaagcaacatatttatctgattccaaatttcaaatttctgattatttttacaatcccagtgtgaaaagtaatatatattttttgaataagcaataaaagtaatctttttagcattacaaagaagtaattgatagatgacagataatctggaggttctacaagaaacttttccatattttgaaatgatgtttggtaattgagattacttgcgttctattttggtgatagttcatctttgaaagaacttgtctattttgcctatcataccacatgcttgtttggtctttattttaaaatggttttatctcattgtgtaactcaaggtaccgttagcttcagtattaccgacagtcaggta

SEQ ID NO: 26465 - DNA, 857 bp, Glycine max
  Intron number 2 from transcript Glyma17g09170.2 (locus Gly ma17g09170) derived from phytozome v7.0 (chr-ID Gm17; pos 6786376 to 6787232 reverse strand)
gtgttgatactgaacctgttatctctgctgctaaggttttgttccttaactttctgtggttacgctctgtttcataggcatatttgttttatccgcactaactgaactacaatgttagtgataacttgttggaatatagatatttgcaatgttcatgtgtgctaaatagtttttgggatgcaaaaaattccccttttgtgcctctagtggttggaaaccaatcatgggttgagtttgatctccatgtttctacttttagttgtgcctgccaattaccccctaaacgatattaaatttttttaatcttactcttctaaaataaagagatgcatttcagaggataatgggtttaacttttatacactttgaagtttgaaccaataaaaaaatcatggtacatatgacttttaagataagcattgtaaaattcaataaacttacataaatgagaatttgtaataatcgaataacaatgtacagatcctttaacagttgatttaatcaatggttttaactatattttaccccgtaagatgcaaccgtacaacctttggaatgttaaaatctttggaaacacctgaattgatatattttcttttgaactggacaagttcttttgtttctttgtttttatttataattttcttgtcagatattcagttagattctgctatgctgttccataatggagacttgaggctttgtagaacatattgaacttgcttaggccaactacctaataaaagacttgtttcagctttaacaaagtttcaccattttgataatttgcttgtcctttgaagaaccaagtttatcaacttgatcaagatactctctttgatttcagacagtggcag

SEQ ID NO: 26466 - DNA, 345 bp, Glycine max
  Intron number 2 from transcript Glyma19g33760.1 (locus Gly ma19g33760) derived from phytozome v7.0 (chr-ID Gm19; pos 41349266 to 41349610 reverse strand)
ctcaattattattggtgcttcagtatttatatttggtaagcttttggttgggttgacaactcatttaatatttcttacaattaatgttcttgtattatatttggtaagtttttttttttaagcattcatcaattttattgatgattaatttcttctaaaaaatctgattgaccatttttattaaaatcttatctcttaatcatgattttttttattcggaagactcaaactcaaaataacttattaatcagtactaactagttaatttgattggtgttttaacattatgcgttaacctatatatatgtaattatatctttaataagccgttaattggtgtggcat

SEQ ID NO: 26467 - DNA, 223 bp, Glycine max
  Intron number 1 from transcript Glyma19g27000.1 (locus Gly ma19g27000) derived from phytozome v7.0 (chr-ID Gm19; pos 34152699 to 34152921)
ggaggtagttactcttttatcagctagattgcttgtcttcctattttctgtgcatgttaataagtttcattatccatagatttgaaagacaatgctttgatgtcatgcgtgttgtgagaaattttggctctctagctaaccttatttattaatattttgcatttttatctggctataaactgctgcaggcaagtcagagcacatatcaacgcactttaactgt

SEQ ID NO: 26468 - DNA, 635 bp, Glycine max
  Intron number 2 from transcript Glyma19g27000.1 (locus Gly ma19g27000) derived from phytozome v7.0 (chr-ID Gm19; pos 34152909 to 34153543)
gcactttaactgttctctctagagtccacaattcagtttgtgagacagggttggtatctcaaggtatgctcaataaacaagccttcaataaaatcacatactctaattgccatttcaaattgctcccctgtcccatcttaaaattcaaaataaaggaagaagtgacactaacaccacctctcttaatctcttttaagaatgaaatactagtcacattaatgataatcgctgatgaacttttaaaaaaatgtgctaagtgttaggaatactttgtgatttaaatgattaatatatggattttaatgtttggacatgttttcctgtccctggcattaggtggtcatttgactctagtattttgtgggaatttcttagtgctatatggatgcatgattggatgggcaatttggttccgtatggcgctaaagccttcaaaagttatctatcatctatcttatatatatgttcattgacttaattgtgatttagtctaaaaggagcattaatagttccttcacttcattaattaaagataccgtgctagatttttatttctttctatacacgtttttgacaatgttgtaacaatacaataatttgcttttgtattgattattgtagaatccctcaaggtc

SEQ ID NO: 26469 - DNA, 589 bp, Glycine max
  Intron number 1 from transcript Glyma18g42530.1 (locus Gly ma18g42530) derived from phytozome v7.0 (chr-ID Gm18; pos 51659212 to 51659800)
gactgaagaggagcacaggtaatttccttgcatatcataaccttttttttttgtctgtgtgttgtgccttcagcactgacctcaatttagatcaatgttcaattttatgggtgatttaattaatgaagaatcattggttagctagaatgtttaaaaaatgtatatttaagacttaagaggtttctttataatcaaggattcaaggttttaaaaatgatatgtgactgcaattttaactgcaatatcaaggtttttgaggtatctgcaaccggagttacgaacgcatttatctgtaatttcctactacatcaagaatcgttacaaaactacaaccacgacggtaactgcaatttaaaaccttgtttataggttttctgcttaggatggtttatttaggtatttgggtggctgagtgtttaaaaataaggttcttcttgattaatatgtgattttgccatgtcaaatgtttttcttgctggttccatgcatttgcatatttgtctcatgttcagggtttttggtccttgcctattttaatgtctttgattattaaacaaccacaggcaatttctgctgggtctcaagaagt

SEQ ID NO: 26470 - DNA, 807 bp, Glycine max
  Intron number 1 from transcript Glyma20g37460.2 (locus Gly ma20g37460) derived from phytozome v7.0 (chr-ID Gm20; pos 45355294 to 45356100 reverse strand)
ccatctccggtgacggacacgaccgcagagaccaggtagcattttgcgtgaatgctactcttcagttgttgccttctgaaattgtgatttgtgtgaatgctgttaaaaatcgacaagtcaaacgtgcgtgagttttgatcgttgttcgtagaggaatatttagtgccgcgaaagttttccaaatgctcggttgtctttttggaaatattgttattgtcgctgacacactgtccccaatctcacgaaaagaaccgtttattgctaacttttgtgttttgtccctaacatttgaattgcatttattctggattattgagtgaagttaaggacgtaatcaacatgaccatgtctcaatttttttcgtacgcgattctaatagttttctttctggttttgtatgggtgaagtaaaagagacatggaatgttctgattaaccccatagcgatttcttcaactccaaaaaatcaaagagatattggtttgttattctatttttcatgatggcagaccagaattaatttgagactggtttgtttgattatgtagttaaacaaatgctaatatgccttctcattggggatatggcaaagctggtatagaataggtcattatatacgtgtccatttttagaagcattcattatggtctggtgctactgaataatttacggatcccaatttgtacagatagatttgtattttgatcaacaccatgctttggcaatcttcataattgcttttcagctgtaaatttattacttatgaatgaaggagtcaggattattcacctttttgtttgtcaagcag

SEQ ID NO: 26471 - DNA, 605 bp, Glycine max
  Intron number 7 from transcript Glyma17g35240.1 (locus Gly ma17g35240) derived from phytozome v7.0 (chr-ID Gm17; pos 39241976 to 39242580 reverse strand)
gtgttgaagttgggctaccggcactaaatatctttgttttcatctcgcagcctggttgcattattttttttttaattgacaaatattaatttattagaaatatcagtttgggggacgaacccacaatctctccccctttcctttcccttcactttttctcaatcactcaaagatttgtatgtgtatttaccaataggaacaatttggtgcaagtgctaggcaattaggcctattttttggtagaagttgctaaggccccgtttggatatataagcttttccatgggaaagaaaaatgaaataagccgattttaactcatgtataaactaattttaacatatggtagaaacttatttggtttttaattccatggttttttgtctagtataagtgcttatggaaaagttcatttgaacaattctaatacatctatcaaatgaagtagactagcagagttgttgtgtgatgatatgaaatttataaaaaataatttaaaaaatgtgaaataggacagtaagaaatttaagcccaattaatttttcttctttaactttggtccaagtgtttgatggtgttctatgcttctgcagtatcttaatcgttat

SEQ ID NO: 26472 - DNA, 575 bp, Glycine max
  Intron number 3 from transcript Glyma18g45010.1 (locus Gly ma18g45010) derived from phytozome v7.0 (chr-ID Gm18; pos 54778837 to 54779411)
gtcagtgtgtttctctaattctcttcttctccctgatgattgcttgggttgcttactgcatggttttaagggcattttaattttgtcgcaacttgcgattgacttgctgcgaagtgtttgagagaaagtttaaatgtactatgatgtatcttactttaagtcttcctatctaagcatgggtccattatgtggtcagatgtttgtgcttttagtttgttgaaagtaaatgttgacctcattagtgcttgtgttatttcttttttgtggaatgagttgttctaagaacggcaccagagggtttttagctgtatgaaaaatatttgtatgctttgttgtgctttcttttaatctattctggtttggtttcttttaatctattctggtttgaatgctgttgaactgatatatggcttgcctgcaattagccttcagcatgaaactgcttttgtgatgggagctcttgttgcagatatttgaattattttatttattctttggttgaaactcattggggattaatctctgctttgcaattgtgttttaaaatgtcagatactttggttcgccaggctgca

SEQ ID NO: 26473 - DNA, 409 bp, Glycine max
  Intron number 2 from transcript Glyma19g04870.1 (locus Gly ma19g04870) derived from phytozome v7.0 (chr-ID Gm19; pos 5083651 to 5084059 reverse strand)
gcttcagcatcaggcattcttaagtatttgtacaagtatgtacatttctgtcttgagctgttcagcctgaggcttactttttctttttttcttctaattgttctggttatgaaaaactatattaaattacaagcatataatattgatatcataatgcgttgattatttgctttgtggaattgggaactttatagataggaagtttttttttttttgaatcagatgaattgccttgcaaaatttgatttgcattgtaccatagtccagagaacaaaagtaaaagagaaagtggggaaatggagatgtaaagtaattacagataaaaaaactactaacgttttaatgttatgtatctgacactttacatggtacagagaaattcaaaaggccacacaaaatttcacaacta

SEQ ID NO: 26474 - DNA, 914 bp, Glycine max
  Intron number 1 from transcript Glyma19g04870.1 (locus Gly ma19g04870) derived from phytozome v7.0 (chr-ID Gm19; pos 5084388 to 5085301 reverse strand)
gggctgttcttctgctgattaggtatgtgggtttttttttcttcttagaagatcatgaaggggttctgatcaaggttttagctttttggattttggcttgatgggtttgttttgggagttttgtttctgatttgtggttttttgttttgtttacgttttcagtgtttgtagagggtagtgggaaatgagcatcttttttatatgttcatctttgttaaatagtgcaaaatggatgaacaattaattgatgtcgatgagtttgttaatagcacactgtctcccaaaccctgctactttttactgttatctgaatcataaaatggaaaaaaggggggcatattttggttacatgttcttattaattttcctaatgtttcggatgtgtgatctgtcttcagggaaactagcaatatggctcagttctttatggattaccttatagttatcaatggtaaaaaataattagcttgtgtttttgtttctccttatcttttcggaaactattgcttttctttttctttcttttaggaagttgcaaaatgaaaagataattatttcttcaaaaatatagtaactcagatatgcatttagtcattgttatcagaattaaggtgtctgtgttacattctataaccaagccacatctttagttcagatatttaaagagagcatatggtatggatgttttgctgagattccatttttagcttttttgccatagtataataaactttcatccatgagtttaacatctgaaattttgtaaatcttgttgcatttgagtcattgatttatatttgaatcacttactatcttgaagttcaattgatgtcagttagatctttgtattgaattaacataaaattgtgccaactttgtgacagtgagcctctgcattactagtcttctgcaag

SEQ ID NO: 26475 - DNA, 592 bp, Glycine max
  Intron number 1 from transcript Glyma20g35290.1 (locus Gly ma20g35290) derived from phytozome v7.0 (chr-ID Gm20; pos 43575025 to 43575616 reverse strand)
atcctagtaagtttgccattttccctttaggtttattgaaagcatacattatgcaaggaatccaagttatagtctttgagaagatatatgaactaaagttctaaataagcaaggaccaggtgcaatcttgtattcactatgaaaataactccagaagttatcaaagatatatcattcacaagtaacaatatgattaaagtaggccaacaaatgacaggattgtattggcttttggtttagtgttctactctcatggctgctgtttccgagttgctgtatgttttcatttgtattttctttttgctataaaaaaacagagagagaatggagcaaccattttttgatagtaaaaaaattattccaactctctcttctctcttgatagtaaaaaaatattttcaatccatttttgctttctccccttcctgcccatccaatgtagcaactggtccccaagttgtatttcatttcttgtattctggggtctgaataatggggagtattgttagctttcatatctgtttgttacttataatcctatttcctatctgtttgtttctttgacatgcagtttttgaacgagtcaccaaga

SEQ ID NO: 26476 - DNA, 638 bp, Glycine max
  Intron number 1 from transcript Glyma18g03530.1 (locus Gly ma18g03530) derived from phytozome v7.0 (chr-ID Gm18; pos 2387378 to 2388015 reverse strand)
gaagtcccagataccgctcatcagataagcactggtttgtaattttgttgcttttcacttttacattcattcattcattacatttactaaattcatatgtttacggaatccgcagagtccaaggttgagaagctgaatctatggaaatggtaggaagtaggaagaacgcaattaacccatgctttttctttaacaacaaaaaacatgtagaggtcacgggcaaataattgaattttcaaaactacccttttgtttttacctattgattgtctacgagctgagtcaaagtttcgacttgtgtgatacatttatgtctgaattttgactttattcaaccgcctcttacctatgttcaatgtgttcttttcttttgattatgattgaatcgtgcttatgttacaattttattgtactactatttaaatattgaaattgtaaactgagggaaatatacaatttgtatctgaacattagtataaattaagagcatgtttggaattctaaacatgcactaaagttggaggtggaaaacaattaacgagattttttgtagcaaggaattatgtgccattaagtgtttgacccttcttcccctttaatgccttttttttatgttcttttttggtgtgtgcagattc

SEQ ID NO: 26477 - DNA, 899 bp, Glycine max
  Intron number 1 from transcript Glyma18g02080.2 (locus Gly ma18g02080) derived from phytozome v7.0 (chr-ID Gm18; pos 1237015 to 1237913 reverse strand)
ctcaccgacgaagaagctcagacgctagccaagaggtacgatacaacattcatttcttacttactctctgttagattcacaactcagatcagatctactagtgcttttcttttctcgatttcttcgatctgatttaacttgtttcttttcttccatcgatctgttttttttttttttttttaatttgtaatttcggtaaactcgttagtttcttcggcgtcttctgagaggtgatgcttatttgcttgagagaaatgtgatgttcagtatctagctcgttttaatttatttagttattttaaatttgtgcttgagcttgaaatggaatgcttctttcgtaccttaagcctgattaattgattgtggtaatcttattagtggttccacttttttgttgttagcctatgtttatgcgtgatttggtgcgttaattaacctttaattaggctttgtttggataattttcttcttaagcacatataaagaaaacaaaaggtgagcttaacaaaaaaaaagaagttaaaatgtactcaacttttcttataaactaaaatcatcttatgcagcttatctttcagagaagttacatgaaagagtttctataaaaaagttaagtatataagttgattttagcttatatgaaaagtttagttcattttaccttgttatttcttctcctatgagtgtatatagagaagtttattcaaacaggaccttaatagaaagtggttttcatatacatgtgctgcagtgtgtatttcttcaggacctactctttattttatgattaattagggctaggagatgttgcattcataccaatttacttttttaaataaaaaaatgttgaacatatccttccatttttcactctcagcaaaccatgctcagggtataaa

SEQ ID NO: 26478 - DNA, 638 bp, Glycine max
  Intron number 3 from transcript Glyma19g38500.1 (locus Gly ma19g38500) derived from phytozome v7.0 (chr-ID Gm19; pos 45413090 to 45413727)
gggaacttcgattctggtgtcaatactggtacgagaatccacttttctttggcaataatttagttctgaaatgttttattcggcttttgattgcttgtatgtttgttataattttttcagttataatgattgcattttaattttgaagatttgagatgatggagaagatatgagcatagatcttaccaacaattaagaattaaaaaaaaaaataagtgcttgagtttttgcctaggaagggatcttctttaggaatatacaaagggaggtcataccttgaaaggtggagcaaacagagaaccatgtgcaactttatgaacatgactaatattttaagcccatttaccagttgaatagacagtatgagaatgatatatgtaatcatcctatcagaagtttaatgatgagtgtcatttttcttacagaatgagaatgatatattgctgctgatttatgttgagcttgcaaaattcataggaaagttggggggagaaatattttcgagcgataccttgtcaaaatttatgttaaattattatatatcattgttggattaagccgtagtgcctcttattcatgtatttgtgtatcgtcaatttgcagggtcattgtagcacttttcacagtactggagaatt

SEQ ID NO: 26479 - DNA, 435 bp, Glycine max
  Intron number 2 from transcript Glyma20g00840.1 (locus Gly ma20g00840) derived from phytozome v7.0 (chr-ID Gm20; pos 570061 to 570495)
tcaaaagaaaaggaggaatcaacccggaacaccatgcaagtagctctattatgcattcttcattaaatttgattgctttaaagcatttgcatgttcatggaaaatgccccatctgtaatttctttctagattttttctctctctagaaacaacatgacaagaaaaccctaattaaatcgtgaatattacataggaatatgaatttctttaactcaatagaggtcaattaataattagaatgacaaggcttcttaatttcctttatacattattccttttatttaaatttttaactactttttaaaaaaaatcttaattttcactttcagcatctaattgaagtatagaattttctaataatttgttttttggaattattcaaaataatttattttttctttcttggaatggaaacatgtgtgtatgcagatccag

SEQ ID NO: 26480 - DNA, 628 bp, Glycine max
  Intron number 1 from transcript Glyma17g33020.1 (locus Gly ma17g33020) derived from phytozome v7.0 (chr-ID Gm17; pos 36618306 to 36618933 reverse strand)
atcgctgtttcgccttctgcccaaacgatacgcaggttctccttctctcttttttttttttaattcaatttcccctgtttatgagaattcgacaaagaaatagatgaaatgtgaaataatataatagttttttacgtttgatttcctctcttttggcaattcggtgtaaagtgtgaatttttttttaatttaatttcctctgttttgacaatttagtgaagaaatggatcgaaggaagaatttctgtaggtttttcctctctaatttcgtctacttttggcaatttagtgaagaaatggatcgaaaaaaagttctgttggttttttctctgcaatttattgaataaatgaattggaaagaaacggccttttaattactagtttttttaattactgtgtttttggcaacttagtgatgacgttgatcgacaaaaaggtcagtagactgtaggtttttcactttaatttctctgtttttggcaatttagtgaagaaatggaaaaataaaagtcttgttgaagttttttttcttcaatttcttattttctggcaatttaatgaagaaaaatggattgaaatgaaatggtcttatagtttctttttttcttttttggttttgtagcttgagg

SEQ ID NO: 26481 - DNA, 905 bp, Glycine max
  Intron number 1 from transcript Glyma17g11940.1 (locus Gly ma17g11940) derived from phytozome v7.0 (chr-ID Gm17; pos 8986927 to 8987831)
agtctcctcctcctggttacacgtgctccctctaaactagttaagtgccagaaatccatgaacctttttttccttccttttttttattcaataattaacggtgtgagctacacagtatatgaatagcaattttctttctttctgtaaatctcctacccagttttctcctaatgaaaattaatcttgacttagaaattgaagtatatttagtattcaatcatttaacttctcttaatctttgaccttcttctttggaaggagctagtaccatgcatggttgtctactttgtcttctattatttctctttaaatttctgtcttggaaagctaattgtgacccatgcatgctattaagtttgtgaccaagaaagtaatcaaaggtttttttttttattgaaataatgatcatgataggatatgctttttaattaaagagattagacgttactttgactacgtcataagcaagaaaagttgtccaaacaccaactttcctatccatattcaaatagaaattgttaaattaattaaaacatttcaagtagaaaagcacaatatttatgcataaaattataatattacgtttataatttctgtttaaacaattcaataaaaaaatatacatttcaacacttttctccattttttctaataaaaacaatataaagtttttttgagtaaatgtatcatttttgcaatctgtctttttcctcttttttttttaagctgatgctatatatgattatgaatgttgtccagcacactatatgctatgcgtgatttaatttctatttcgtatcagtaaagtaattatatcgtcctttaatctacccgtgaactttgaaatctttgtctcattgtatgtcatggcctatgctttgcaggtggaaaggattgaggaatat

SEQ ID NO: 26482 - DNA, 898 bp, Glycine max
  Intron number 1 from transcript Glyma20g24310.2 (locus Gly ma20g24310) derived from phytozome v7.0 (chr-ID Gm20; pos 33978504 to 33979401 reverse strand)
gccattctttctttctatcttcaatcaatttcaaggtatctctgcgcttcccaaaatctctttactcgttctttctttcgcatgatctctctcacccataatttgtaaattacttgtaatcattttacctaattaaatctctttttaattatattacttcattgtctgtttgcatcaattttcttggccggtaattgctggaatctagccaccgataactactgatattttatttatttattaatggaagggattgcaacagtgtcttggtgatgctgtgtttgcggaatgtttgggcaataggcattgcacagtaaacttttttttttccctttcgatcatgaaaattaaataaatgtataggcattgcatagtcatatactcatatgtgtgttttgccctttaaagagaataatcatttagatggaaggaatttttgcatgccctctcactggtcatcgtttagtaatttttttctgataagggttgcctctaggaagggtttaccaatatccaacgttaatcaaatgatggagagacagagtgccatataaatatgtttttttggtaatgccctgttcgaataatcttctccataaataagtgcttatatacaagtttatcctaacctacttgagtattttgataaccgtcaatagaaaattcagaggacttatatatgttagacttcaacacaaacgtctcccaaattgagtggttgattgctgagctttattttttcttacccaatcttgagtgtgaaatagctattagatgcaatgggatgctattcgataagtagaaagatgcatggtcatgtgaaatagctttatttctgttctgttgaagtcatcttacacttttgtaatggcaaatcagatcgtaacactggtattat

SEQ ID NO: 26483 - DNA, 829 bp, Glycine max
  Intron number 1 from transcript Glyma17g05480.1 (locus Gly ma17g05480) derived from phytozome v7.0 (chr-ID Gm17; pos 3812213 to 3813041 reverse strand)
ccactgtttggctcgcttgggacactcacaaatcggtgcgtgcacttttgtttgtttcctcatagcacaacttgggggtgctaaaaatgaatgcttttgacgattcacatttagtttagagagtttgagttttgttctttatctgggttgttatggtgtttgtgcttgagagatttcgacaaagcgtgggcttttgtctctatttgtcatccttttttttggggctgtggactaatcaacaatggactggctttgaccttcctcccttctgttgttgattgaaagaaaatgtttatattggagtttatgcttttcaatattagtaaatgattggttcttaaaaaaaaattatcattctcaaaactcatctgataaaaggatctcagaggttctgctgcttgatcttttgttttattttattctgactattgatctctctgtcttcttcagctaacaaattttgcaagtagttattcggttttttgtgcccttgttctttctaagtgagcatgtctgttgtgtgacactagagttcctgagattaggtgggaattcactttaggactatgactttgtttggataaatttctccataagcacttgtagaagaaaaaaaataagaaggtaaactaatacattttccttcttattttcttctcctataagggcttacggagaagtttatccaaatggggcctatgttattcttcattcttttaataccttgctaacatacatgcggcaatctttagtttggaactttgttagtgatgttttaaattgtttgtttgcagcgatttgttgccttaaaaattcaaaagagtgctca

SEQ ID NO: 26484 - DNA, 912 bp, Glycine max
  Intron number 1 from transcript Glyma20g30100.2 (locus Gly ma20g30100) derived from phytozome v7.0 (chr-ID Gm20; pos 38826404 to 38827315 reverse strand)
gcaaaacatgtaagcttagagataataactattcagtattcactgtatctgcatttaggctaaatgagttagatatgaacattggattgggatgcctagtgaaattatgaatctgttggactccaaaaataaacacattgatttctgaataaattatagaaataacctagtttttaggctagatttgagtacaatcataaacaaacactgggtttccccctaacacaatgtttctgttaggatctaattgcatgatatgatgagacttgggttccacattagaagtatgggattttagggtggggtttataaggccttgagctttccaactaaacagctaggttttttgatataattctcccaaggttcttatcaattggtattatagctttaaaatgttataaggtacgaagatggaacttgtttcccccccaaaatatgcagagaaaacataggaacgaataacaggagcagaaaaggaagtcaaattaatattgaagtaggatgctgaataaaccagaatatagaacctaaagaaataaatttcccaataagactagaaccttctctgaatctcctttgtggactaccgacctcctgtctgggtgatggtatgatttccatgtagaccacattccatactgtaaagaactttcaagtccctgcttatactagttaacacatgacactgcaattcagagacagacaccatcaacaaaggcattggattcttctgtttctattgaagtcattttgagattgcatctggtttattgattttctaattctaaatgatttaatgaatccaaaggttgcataatttgtcctgcttgccctacttataccttacataaactataccttacataatttgcagataacagggcaatcgtgcccattgtcattcaaggg

SEQ ID NO: 26485 - DNA, 775 bp, Glycine max
  Intron number 2 from transcript Glyma18g05220.1 (locus Gly ma18g05220) derived from phytozome v7.0 (chr-ID Gm18; pos 3949091 to 3949865)
tacttgccggcgcccaggtctctttcatcttctcttctgcttttgtttccttacatagtgtttccaatcattgaaatctgcaattcaattgatttgcaaaaaagacggcttggcttggttttttaattttatttttatcgatgaatagaatttcaactttttttatatggtgtgaaataaaaattataaatattagtcatataaccatctatggaaggtaaaaaatacttaaaaataaaataaaatcatatatacatttttattttaatcttggttatttaaatatgatctagtgatttatatttgtagctttcatttcttacattcggaagaactctgatttgatatgttctcaacaacttaaaatcagatctaatataattgcataggtttagagaaaagaaaagaaaaattcatttggacagtttggtatgagaattttattttctattttcacttttaattacaaaaatgccaacctgttttcattttaatttcccttttcaaaagtttataggaaatagtgaaaaaagtgtcatttccgaacaaatttttgaaaacaggacaaaaagcttgcgtcattttttttaaaaattaaaagtgaaaacaaaaaatgttttcttatactaaacaactcttaattaatcaattcccagaattgtagttccaagcctgctcatagttgactttgtaattgatatggtggataattttgggtaatgcattttggctgctttcagacttatagtgagacggttggtcacaatttttcact

SEQ ID NO: 26486 - DNA, 725 bp, Glycine max
  Intron number 1 from transcript Glyma17g12950.1 (locus Gly ma17g12950) derived from phytozome v7.0 (chr-ID Gm17; pos 9889618 to 9890342 reverse strand)
atcttcggcgaagggcagctcagtgggttccttttgtaagtcacattgcttctttagttgtgattggttctcttgtttttcgatgatgattgcttttctgtgagctttatccgggacgtgagtaaagagagcagagaagagttgacatgcatgcattttgattttgggattatttttgtttgcattgcgatggttaatagtttatggtactgtttattagttgtcttgtgttgttcatagtttgttgtggatgatggatgaattgtgaggatgtgcttttgtgtcattcatttgttccatgccaatcaagagaaaagaaaaaataagtgtgtcaagcaaggttttaataaattgacaaaatgaaatttacatatggaaattgaattactttatctaaacaaaccatttgaaacacaaggtatttgaattgacttatccaaacaaagtattttgtaaatgaaaataatctaattgaagcaattccatgcatgccaaattccttataattttaaaatccttaatcctaacattaccttaatgttttatattgtgagaattgtggagattaggatggtggggagatagttttttttaataaccggcagttgtctttgatatactgtatgatgaacttatacaaaaaaaaaaaaaaagaatgagtggttgataagctaaactaattatcctatatggctggtggctttcacagaaattgaaagtaactt

SEQ ID NO: 26487 - DNA, 1053 bp, Glycine max
  Intron number 2 from transcript Glyma20g26890.1 (locus Gly ma20g26890) derived from phytozome v7.0 (chr-ID Gm20; pos 36201338 to 36202390 reverse strand)
ggcttcagtgtcgccgccgacaacactgttagacggtcacttactcactctcttcttcaatgtcaaacttagctacttgtcttgttcttcaccctgtgacctagttgtgttgttctttatacctggataactaaattacacatttctccttcatatatccttaaattacattctctttccttttaatttgctttgtttacgatggattgatatgagttatactacaaatgttaatttaatcgcttgctctcaatgtttctcttcttgtgactctcaataccattggttagtttagatttgaatccctcctgttggctaaaatacttcagaagatgaagtgtaaattatgagttatggctttttagaacatgattttatattgtgaagtccaaaattcgattacgtgatgttcaaagttgactgcccatgacattggaaattacattgtctttcctttttattttttttaggagagtctttcctttttatttaaaaatttagtgtcttttttttttctcaagagattaatatgcttcacactttatctcatctttgtgtgaataaatcttctccttttgtgactctccttacttaccattagttagttttgaattccaactacccgttttcggacttaagaaaataagacaaagattatgagttaagttcctaccctaaaattatgtgtatataaagcaacattttatcttctaaattccaatatttgattgtacaaagtccaaaattaattgtcagcaacattagaagttgcagcaagaaaaaactccccttggtagaggcttgcttaccgttgctggttaccacttaaagagatttaagattagtttatatttagaatggattaaaatgtaacacaattcatccctatggaaaaggaaatgtaattcttaaattaagaggagagaaagtgtaatttaagcatttctgagtggaggagagagcattcatctctaagtggaggggagagtaattaacacttcatattatcatgttccaggcttgtcttcagctctaacaaagaggatattctgg

SEQ ID NO: 26488 - DNA, 424 bp, Glycine max
  Intron number 1 from transcript Glyma17g15420.1 (locus Gly ma17g15420) derived from phytozome v7.0 (chr-ID Gm17; pos 12145461 to 12145884 reverse strand)
agttagattttctacccacttccagtgtcgcagaggtaactgacaattgcccaaatacatcattctttgaggcatttttgttgtattttttttctactttttgttagtttgagttttttttttctcactttaaccagtgagacagaatacctgaattaattttggctcatgagttataagccatggttgatttcgtttacacatttctaaagttgacatttttgctaataatcgatgctcccgttttgttttaatctacaaccaagaatgtgggaagagttggtatctggtttggttgaaaaaatttagaatttttttgttttggatttttggggggtccaatgagaatctgggtttaatagttaatactctctaatgttcaatttcagggttgtttctgacgacttattgtgcctcggataac

SEQ ID NO: 26489 - DNA, 827 bp, Glycine max
  Intron number 1 from transcript Glyma18g45290.1 (locus Gly ma18g45290) derived from phytozome v7.0 (chr-ID Gm18; pos 55056316 to 55057142)
tcattttgactcttctttgtattctcggttaccaggtattattactactattaattggattatatcattgttctgttgctttttatttttttaatcactgtaattgtgtgcagtaataataatttaaccagattcaacagtttcattttgtgggaggggggataatttactttgagcgtgcatgcaagggcataagttttcaattctgattgtaaaaattgtttgttttattttcatatttatatatattttttttgtatattgtgtgtatagattttagaacaatttctggatgtaagtcatttattcggaaaaatgattagattttagaaatgattgcttatttttaaaatctgtcttataaaagtttaataaagtgataattttcttaagatgaaccaaacacgcataaggactgcattggtgggaatctcactattttcatgcttcattccactttctttcttttttttttaggcttttaccttgcctttctgaaagaaaatggccatcatttaaaaagcgttttttttttaaagtttttctctgtaaggctttgttcttttaccattgcatttggccattcctaatggataggtgaagctctgctatgtcatcattgtcatgtgtatttatttcctacaattttcctactccagaaagatagtctagtgtactagtaggaaaaaaaagtttacctacaaaactaatccagaaagaagaagttttaagtaaaattgatggttactatttatgaaacaaatttgacatcttttgaaatttttattgcagcttatattattggtggacctggagtttgattatat

SEQ ID NO: 26490 - DNA, 604 bp, Glycine max
  Intron number 4 from transcript Glyma18g04130.1 (locus Gly ma18g04130) derived from phytozome v7.0 (chr-ID Gm18; pos 2871031 to 2871634 reverse strand)
gcctcacttcctcggcatttccctggtttgttggctgtttattttttttactatgttaattaataggggtttgcgttaagtaaattgattgctttgattatagaatcttgttgagacatcatatgtgtaattctacatcaaagtttgctgtggttagctctaatataccgattaacataggtcggttcttaatgcaatattttcatcattgaacttgactcctctaaagtgagtacgtgtaaagtaatctctgttgttgataaaaaaaccaacggttgatagtccatcatatccatgatttgttaagcatgtgcgcgtagctttgaccccatcaacaattgagatttgttatttaccctcagaagtgggatgctctttttagaggagccaaatcctcctcttttgacctttgtaaaaaattatagttgcttgaaagtcttattatgaatacagttattgtctttcctgctggcattaatttctcttatttgatgttcttttcttgaggagcttactacatcctttctttttggccttgtatgttttttcctgtttgctgctgctattagttatactgcattggtattttaaaagaaaactggag

SEQ ID NO: 26491 - DNA, 1012 bp, Glycine max
  Intron number 2 from transcript Glyma18g47230.1 (locus Gly ma18g47230) derived from phytozome v7.0 (chr-ID Gm18; pos 56904964 to 56905975 reverse strand)
ttgaagcatttgtaggttcaaaaacagttatccaggtgaattttataccaataagaagtgggcgtgaaaattaacagttagacatttattggttattccgcatttttttaattcctatattgggcagttggggaaacttattattcaattttaatgccattatttaatacagggctctaagattatctcaggaaatgataattgctacagtgtgttggttgaaatttattgaaaattataaaattttattagacccatgtcttatttaatgaatatctcatgatgttatgatttttaataaattttaaccaataataaaaaaatgtgttagattgtgtttctagtcccttcctcaagagattatctattaaaaaaaaagtccaacataggtggtaggtaatcatatttcttaaatatatgttgataagagtttgatttctagtctcttacaagtgtgtaagaataaaaggtttcttaagagaacctatacccactttagtggtttttccgccttaaaagatttaggttctggtgattggttggggatatatacctttgatgtgatgtgaacacatacacacacaaaaaaaaaaggatctcttaaaatgagtgaaggttgacacttgacatgatagtttcctgaaaaaatgccagttgtgaaaccccaaacctgagttccgcataatgatgaattgatgacattaaattctacccataggtaacattatgtatgtttttggttttaataaatacaaccgttatctagaatactaatttaattttttctccacaaaatcaatacttttgtaatcgttgtatgtttttttaagcgaaatacaacttatacttgccttgtttttctttacagtcctagtggcaaggggtgggatgttcctcattttatagtaaaatacagtgtagcttttcttttccttaatgtatttggtgcttctatacaaaacttcagaattgattgtttgctccccttccactttttggcagataaggagtc

SEQ ID NO: 26492 - DNA, 844 bp, Glycine max
  Intron number 1 from transcript Glyma20g02660.1 (locus Gly ma20g02660) derived from phytozome v7.0 (chr-ID Gm20; pos 2203528 to 2204371)
aaaacctgcgttctcctcactcttggcttcttcaggtctgccttgcattgttaccaataattcaaaatattaacttggccaaacttaggacaaaatttatatatagtttgtttttttaacggtttttaatgctttctctaattagagtgggctaggtttcatttccttaatttaagtttcatttacatgtgtgtacacgcgtgtgtttaacatttaatatataaattttacctggattaccaaaactaaatccaattatgaaagaataacaacactatattttattctcaaacttaatgtaatgaacaacttaagttatatatcaaattaaaccatataatttattgaaataattttttaaaaaaatctttcttatgaattctttaaatcttctttatatactatttagtgtgtaaatcaattgtcatgcattattccaacaaacttaacgagtaatttttgatttgattgtttgaatttctttttctagtatatattattaactgtgtagaataaatgatatgaaattatttcaatttaattagtaattttagtttatcattatattactatcaagcatgtgaattaattcaattatttcaatttaatcaaatatttcaaatttaagttataagtatataattatattaaatatttaaaagaagaattttatcatttataataatcatactcaactcaaccgagttattttttaacaagaatacataagtttagaaaaaaaattattttttctatcaagtttttgttaataagtagtactaataattataatggttgatttggtttaggtttttcttggggctgggtattggaggagactacc

SEQ ID NO: 26493 - DNA, 738 bp, Glycine max
  Intron number 1 from transcript Glyma17g27550.1 (locus Gly ma17g27550) derived from phytozome v7.0 (chr-ID Gm17; pos 29384592 to 29385329 reverse strand)
tattttcttcttgtgtgcactgtgtttccaaagaggtactcaattttgttagttaaaatgtttttgtcaatggtttcttttttctttttcctttttcttttggtgtttttgtgttcttgatgattttcatgccttaggagagatatgaaaagaaatggtcgatgtggtgcctgtagtttggaattggacttgtgggttgaattgggatttgcatgctgaatgaggtgtcatgagaattgagccttttcttgtttgcatgtcgctgtaaactattagtttggtgtttggtaagttctaagataaacatcttggtgggtttatctaatcttttttatctcttgcttcaaaattaggaaataagttggtttctctgcaccgccatagttgttgttctgtgaaaagttaccttcctttatctattctctgtttttcttagtgagtttcaactgcagcttttattttcaccagcaacaaccacaattatgtttgagttaagtaaattggcaaaagggtatattcattttcgttttgaaattgataaatctgttcccttaaagtgaattcttgtgtagtctttggtttggttagcctttttgttgctattgtcaatttttatatggttctctgtatctcaattggatgcatttgacgagtaaatagcaaaaaattgcataatcattgttttactacttgtataatgacattatttctttctttggtattacctgcagaggtgct

SEQ ID NO: 26494 - DNA, 800 bp, Glycine max
  Intron number 2 from transcript Glyma20g03640.1 (locus Gly ma20g03640) derived from phytozome v7.0 (chr-ID Gm20; pos 3497498 to 3498297)
ggcaggaattcaggtactgaatttatatgtatgcatttccttcaacacaaggttaaaataaaatagagttttgttctcttatttatatttcatatggttttatcttttgcttataagtcctatgtaataggagtttgataggttgactatagttgcattccttattttcatgctggtcttgataaaatttgatattccacgagtggtggtagtagttactggtgtagggctatttaaaaagccagttatcttcttcattcgataagaaattcactctcccgattacagagtttttatcagtttcaatagatgcagctacaggccagggcacagtaatttctcttaaattgttcaatctaatcaggagacaatatattttgacattgttaaatactctttgacctaaaattattcagtttaaatgtaaaataaaaacctaaaattattgagtttaaatgtaaaataaaaaaatttcttagtaagaaattaaattttggctccatcttgcttttgtctttctttttctttctaccccttttattctcttcactgcccaatcttacatatcttacatatgttttcaatattttttttcttggattgagagagataattctagatttattcaatctttgctcgattttgaatctctgactccctttcatgttttttctttggcattcagatataagtgttttatttttgtatccttatacaaattaaaggaattgtaatatgcgtgtatgtgtctggtaaaataattaggcgattccacgaactgtgtggctcgattttacttg

SEQ ID NO: 26495 - DNA, 772 bp, Glycine max
  Intron number 3 from transcript Glyma18g00480.1 (locus Gly ma18g00480) derived from phytozome v7.0 (chr-ID Gm18; pos 174291 to 175062)
tggttggtaagttcagcctgctttcattgttgtcatatgctgtccaatttcagtcccccgttagcctcactttaccatatgttcttcggtttcctttgatgtcattataatattgccatgacattgtgtaaatccttcttctgccattgcgactcctttgtggtgcaacttctgtgaaaacagctgttgcagttgcaatgtgtgtcacggtttcaattggcttcacatttttgtgacagtgtgggactactcacaacctccctccgttcatagtgtctgactccccctccccccgctcctttaaatgttttcataggtattttgtcttgagtaattgaagtttgcagttaatattaattttaaaatagctgcttattcttacttgcttatagattaattttttatgcacatattaattgagattttatttcaactgctatgtaacttgttatttgcctgcaataccatctctgctataagtggaattttggcccccatcctgctgttggaatttgtgtgcaaattaccattttttgtctggttatttccacatgtgaatattactcagaatcacagcaagcatagcattttgtatcttattgttaaattgtgctggtgtattcaagggaaaatttcttggtttattattgacaaaactggaataaacattagaagtgactggtgagatttcacagctgctttaaaaaatgactgcctggtttgggtctgtttcacagcaaaagttataactgatagagacagtggaagatca

SEQ ID NO: 26496 - DNA, 411 bp, Glycine max
  Intron number 2 from transcript Glyma18g05860.1 (locus Gly ma18g05860) derived from phytozome v7.0 (chr-ID Gm18; pos 4497477 to 4497887)
cacaaattatagtaatatatttcacttctctcttagtttgtttttcttacttgtattaacacttgctcacgtaaacacaaaccatatttcatgttcggtttttaatgaggtttaagtatttatttgatatctgtagttacattttatttttttactttttaacctttcacttatgcttaaaaacattcacttttagtccatttatatatattatttttaatctctcttagttcttgtcctaagaactaaaaagattaaaatgatatgtatattgattgggatcataaatatgtaacggtctcaaatcatacaataattgatcgtaaacaagtgatttggtaccatttcatggaaaaagtaaagtttgaaagtgatagtcaaactcaaaattaaactcctttgtaggaattg

SEQ ID NO: 26497 - DNA, 733 bp, Glycine max
  Intron number 2 from transcript Glyma20g31110.1 (locus Gly ma20g31110) derived from phytozome v7.0 (chr-ID Gm20; pos 39770858 to 39771590 reverse strand)
tggtgggtgaagggaaatactaccggggattcgaggtatgatactcccaattcctattcttccctttcatatcttttggggttgttgtattttttatgcataccaatacatgccacatgacattagctaattacatatctcataggtgttgtcctcgaacacaatgtcaacttatagcagaagaaaatatagaggtaaaatgaatcaaccttctctcataagttaaaattaacttatgcacctcaacttctttagaagttctctcattaacttctctaaatattgaggtgaataacttagttttaacctgtaaaagaagtttgatttattttacctccttattttaagtgtttctcaagttaatccaagagctccctcttttttcgtgcttatttacttgaatggaaatatgaaagaaaagtactcttatcggtctcgtatcaatgtccaactccaattaacttttagggtggaagtgtattatagatatgttgcagttatgataattttagttttcaaattttctgctttagctgattctttattccctggatagtttctagcatggatctgaatagtttccaatgcagcaacgatgtctatattatgatactgacatactcatgaagtgctatggtctaagtactaagcagtatgagataggagtgatatctattgattctgtttgcatatgtttttggtatgcagtgtcccaactatttcgttgtaggtt

SEQ ID NO: 26498 - DNA, 742 bp, Glycine max
  Intron number 2 from transcript Glyma17g05920.1 (locus Gly ma17g05920) derived from phytozome v7.0 (chr-ID Gm17; pos 4176948 to 4177689)
ggctgcaatactgtatacattctactcaaggagtatgctatatttcatcctaaaatacttttttgtttagaattatccatttttgatagtttgttatacattctaaattacctaccatatctgtaatagtattattgataactgtgatttaagtagatttaggaacaatgtagttatggcaatggtatatagtgtaataatttattagggagacggccactgtggattttaggtgtttgtagtggccgtgatgataaaaatgaggggattattgatgtattgttaaagatacgtagaatgggctggtaatccctactcccacatgtcttgaagttgtgagttttccattcaaatgagtggaagtactctttggtaactggaatttattaaacataaatatgtggtaaactggttactctattcttctgttctcattccaggtaactagctgatttgacattatgttcttttctttttttggcggctatctttgatccatcctatagatatcttatttcaggaacatttcatccctctctcccaacctttggaaataaatgtcgtgttgctatccttaggattgtaaatatgttctttcccgtgctgttgttcctcttttgtatatcatgcattacatttgcacattcttttataggaatttgatgttctttgccttacatcaccttgaaaccagtcaaacttgaaactattcctttgtcaggtcaatatctggaaatttgct

SEQ ID NO: 26499 - DNA, 930 bp, Glycine max
  Intron number 1 from transcript Glyma17g09550.1 (locus Gly ma17g09550) derived from phytozome v7.0 (chr-ID Gm17; pos 7087622 to 7088551 reverse strand)
gcctttcttctaaactcaacttcccaagtaagttactacatttttttttccctctaattaataatctgaatatactttaccaaccaacaaaaccccactcaatattttatattagtaaaataaatgctgatcttctgtttttggtaattatctttttgactttccgcggttaagagactaatctttgacctgagtctagtgcgggttggattgactattggttgaacttgccatggttttttaaagcagcaaatagttgcttttatggtaaagtcgccatgatttttatctttttgttgctttcaaaactcaaggtgccacttcaattcatcactaatcaaaatacattcaccttcatatttctcgtcttttcttaaaaatgcattgtgggtgaatgtgttgccttaagagtcacgtctgcttgattttctttgggattatagttttaggatctcactgttacgtgctaagcttgtagcgcgaaggttttggtaactatcttttggctctcgggtgagatcccaagagctttggtattttaggtcacttatgaggctaatctttcatatgagtttagtctcacaagttctttatccctttctaaaaatgtgttgtgtgtaggtttctgtaactatcttttggctttccattaagatcccttgatctttgattttttttaggtcgactatgagtttagtctcacttaaagttcttcattcctttctaaatttgttttgtgtgcgaatggaatttaagtcctccaacaaactcacagccacttgattttattagggattatagttttcggatctcacatgctacatgctaataagcttgtagcgtgtaggtgcaaagggaatttgtggttttctggagtcgttatatatacttttttctttgattgtattgcagatactggaaactacttgc

SEQ ID NO: 26500 - DNA, 863 bp, Glycine max
  Intron number 1 from transcript Glyma18g08770.1 (locus Gly ma18g08770) derived from phytozome v7.0 (chr-ID Gm18; pos 7521046 to 7521908)
gtcccaaacttttccactcgcgtttctccgatcgccgtaagcatccgcttcattcatttccttacacttttttcgcactcgattttgatcttgtgctgctgctgctgctgctgctgctgttgaatcaagtaacaaggacaatcgatgtattttaatcagattaagataggcttggttagggtgaatacgatgggaatgtatcttcaccttgttgtgtttgaatgacagagtcctatcgttatggttttataatgactatatgatgtaacatggtgttatagtatgtcaactgatatcatataatcctgaattgtgattggaagtttgttaagttatagataataatgtttagtatagttgtgatctgctctgttttcttgttaattatgcttgattgagtggagtgaatagaggagttaaagatacataagtatttagagctcttcaaggggtatttttgggtttgttgggataaacttttccaacagcgttgataggagaataaaacaagaagaaaaataaatgaaataagtttatccataagctaaaattagcttatacataagctagtttttagaagttctctcacttcagcttctccaaaagctaatttttaaattgtgcatacctaatttcacttatgaagaaacttatttcattttttcttctcttataagtgcttatggaaaagtttatctaaggccatgtttattctatgtttcagtttagtttttttgaaggtgcggccttggttatagactttgactcaaattgactgtgtgatataaactcttattggtgcttgattttgtcatcatttcttttgcagattacaaaattacctgggactgaggtattctcac

SEQ ID NO: 26501 - DNA, 354 bp, Glycine max
  Intron number 1 from transcript Glyma20g05050.1 (locus Gly ma20g05050) derived from phytozome v7.0 (chr-ID Gm20; pos 5641451 to 5641804)
ccaacgactttcaggacctttcaatcaaagatctggtattttccccttccttcttgttaatgggtatggatatttcttccttctttgtaatgggtatgccttgttttgattaaattcatattttgaatttctggtttgtttggacgattttgggggtacccaattgggttttcatgtgaaagtttcaaaatttatgttgtgggcatgatttgtttttaaccaattgttgattttgttgatttgttttttgggttggaaatgttagaattggtgttccttttgttgatgccatggttttttttatgctgtttttgttcagggtgagaaaggaagtgaggcagagattcacgaggt

SEQ ID NO: 26502 - DNA, 746 bp, Glycine max
  Intron number 1 from transcript Glyma19g22500.1 (locus Gly ma19g22500) derived from phytozome v7.0 (chr-ID Gm19; pos 27333016 to 27333761 reverse strand)
atttggtgaaagaagagaaacaaacatgtatgattttgtatttggaatttgggttgaaaaggcggctagatacaagtttgacttagtcaattatcatttcaattttaattttaattgctaaatagttagcaataataggtaacaagaaataatatagcttaaaaaaggatactatcaataatgattttgatttgatcagaaatttggtatccttagcgtgctataaatagactgcacgttcaaaaaaatcccaatatcacttctctattcttatttttccatttgtcaaagttgttgacgaatagaagtcagtctcgatgtggatatacgtagagtcttcacaattttgaagaatttttacgcgtcaagagctcatcaacaggtacactttttaatacgtcatctgtttataatataatttaaatacaaaatagatcattttattccacaatgtgtgttttgagcaagttttaattatacaggatgaaatgactacatataagagaataagaaaaaaatactcccgaataggaaattaatgtattaatatgtatttcatgttttttttctattgtaagttaattttcagttctttgattatcttttattttatcattgcaagtttaaattttgagatgcccatattctaatcgccaaggattgtgctatgatgatttactgatatatcttgcataatgtcttgtgcttcaggtgctttcaaattctgaaacagtccaggtgctata

SEQ ID NO: 26503 - DNA, 932 bp, Glycine max
  Intron number 4 from transcript Glyma19g39790.1 (locus Gly ma19g39790) derived from phytozome v7.0 (chr-ID Gm19; pos 46335943 to 46336874 reverse strand)
tcactcaggtttgtgctgttcaaattgcttgaactacatgtgagaacagtttatattttgattgaaaacttgatctaatggaattagctaaaaactataatccggcaggaaaagcatgttttccctggcgattccctcccagaatatttttgttgttgtgagaaacgtggcaactaattcagttatttcaatcttataaaaaattatagaatagttaacactggcaaccaatgaactttaaatatttctcctagaaaaaactgtggaaatcttactagatttgaagaattaaaaggatgttcattgcagattaatggaacagtatacttgattcctcgttttctgggtcagacattgatagtcagactggttggaatttttgttttcgggcagtagccattttcattagttcagcatggctttaggcattacttgatcgattcaatacaaacttgctattgatgtaagattattgaagaagaattttgtaattggattttgtttcttaactttgaccttctgaaggccttgtagcagttctctgagtagaagtcttcttgtgagatggacatcataattgcatttgaaggcctcacatttttttggcttgatggcctctgttagtttcaacttgttttttcaccacttaccccttcctcctagaccctacttccccataattaatacatttatatttctggtttaaggtaacctgtcatagaatgactgaatgaggcaaggaaaatatttgttacatagtacgttgtgttcataagatgaaggcaacaatatcaatcgttttcattattaaaataaagctaaattcttttagtaaataaaatgaaattatttagtgacccaatgtgagaggcatgaatttatgtctgatttgttgaaaatgttcaattgatgctaggttcattttgtcccta

SEQ ID NO: 26504 - DNA, 508 bp, Glycine max
  Intron number 2 from transcript Glyma19g03250.1 (locus Gly ma19g03250) derived from phytozome v7.0 (chr-ID Gm19; pos 3294326 to 3294833 reverse strand)
agtctcattcaaacgtaaccaacccttcttctgtcacccttatcaaaattataacaaaaatgccttcttttccttttattttatgttttttcagaacttgcaaagtaaacaaggaaaataacaaaatgctgttttcacccccacttttataaattttggaaatcaggacaaaaattaaaaaataaggaaatttttttaattcttggttaaaacatatcaattaaagtaaactaaatgcatcttaaattttgtcagttccttaaatttatagcatatatgatgatatgatgagatcctttataaggagaatggaatgaatttactaaactgtaaccccatcatagtaaatcatttgaatctgagtaatatttgttcatcatcagcttgcataagaggttaaatgagatcttgtttgactgctttagttttctatttttttaaattgtaaattgtttacctgttgctccttgcaggctgtatattaaacaaccttcatcaagtacttcaa

SEQ ID NO: 26505 - DNA, 710 bp, Glycine max
  Intron number 5 from transcript Glyma17g32060.1 (locus Gly ma17g32060) derived from phytozome v7.0 (chr-ID Gm17; pos 35289469 to 35290178)
gtatttcccccttttttttcttcaacaaatcaattgtagccctcatatgaacattgttttttcttcttgttctccaacaccaaatttggaaggaaacctttagtgattgtacactgacaccgccaccgtttccatcaagtggatcaccattggagtctaaatatttcataacacctaaagagaaagagaaaccctggcctataggagaataatgttccgcatttgtgatacctaaagggatcaattaacacaattggaacttatgggactaaaatcgcacaattgtaatatctagaaatcacaagtttaactaaaccattttttaatagtatatataattgatgaaaggtggaaatatttaaagcggtgcatttaaaattatgaataataataataataataataataataataataataataataataatatattgataaaaggggcaaaatgtttaaagcggtggattcaaaaaaagaaaaaaatatatagtaattcatttaaaaaagtgcatacttataagaaacagagaaaggggaaactaatttatctaataagtattaaagagtgtgaaaaaatataactttgtttagctcataccgttaagattaagatggaaaaccaaactcattttcttttgtaaatgtcatccaatttaaaatataattgattagaatttttttcattttgattttttgaagcccaaacc

SEQ ID NO: 26506 - DNA, 646 bp, Glycine max
  Intron number 1 from transcript Glyma18g46310.1 (locus Gly ma18g46310) derived from phytozome v7.0 (chr-ID Gm18; pos 56090635 to 56091280)
attaaaccatttcaacgatttttctggaaattcaaggtaaaagtttcacctttgtcttagatttcatcaagttgttctgtttccttcaaattctgaggcaacttctctctctttagggtctaaaagcaaatgggtatccatgattttttttttctttttgttttgttatttggttaagtaggaaactcggtgccatgtggaatttgtgttcctgatgatgtgataaaaggtttattaggttggtgtttgtttcatttcttttgtcctgttttcaaggtttccaaagagatcgctgtttggtcttttatttggagctgaatagtaaagaaaagtcacaaactcactatagttgtttgcatttttttagaaagataaatataaatgcacttgaaaatgctgttgagtgttttggcatttagagctttgtgcgttgtataattcagttcaattcacgtgaacataattcctgtggaaaatgttatttgatctcaatttgctagccttttgaggtttgtaatttcactctgaaaggttagattaaggcatgtctgcagtggttgcactggaataattggttttatagttcttttggagctaatgttattatctgtgtacctttcttcttgactagtttgtggttgaagaa

SEQ ID NO: 26507 - DNA, 654 bp, Glycine max
  Intron number 1 from transcript Glyma19g30260.1 (locus Gly ma19g30260) derived from phytozome v7.0 (chr-ID Gm19; pos 37911211 to 37911864)
gtcccaccgtgtgagttttttttttttttttttcatttctccgctttcttctctattctctgcacgttttcatcctccattcttctctctctgtttagtatttgcctgtcttgcaaaattcctttgtggtttgtctgttatatgttctgatttcctctgtcattgtgcaaaaaccctaaaaagtttacttttttatgttgttaggcttagagggtagtaaaattttattagcttgctttcggcatagtggaaatgcgatatcacatggccacagaaatcggcgagtttctttgtgggtatcatttgctggtgattctgtgaagatatatgcccggttgagtttcaaagttacctatttctataatgggttaattacttttttttgtgttggcgtgttggcatatgataggatttcgcgtattttgtggggataaatgtgcatcgttatttcctctttttttgaacaatcaaaggtctggcctttttaatgattgaggcaggaacaggacatgataccatgtttctttttatgattgtttatttatttagttatttattaatctatttatttatagttcatagtgttcacatactttctcttgtattctgtgatggacagatttgacaagatcatcaataaggaaattccttcta

SEQ ID NO: 26508 - DNA, 697 bp, Glycine max
  Intron number 2 from transcript Glyma19g30260.1 (locus Gly ma19g30260) derived from phytozome v7.0 (chr-ID Gm19; pos 37911883 to 37912579)
ataaggtgctgttttatgctttcttgagtctttttttttaatgtttgaagatgtgactaaattacagatagagaggatattaaataaatcttcaaatgccacaccaacaagagatgatagcgtagagaagtttgctatccaaagcaaaagttttcctatagttctcatttgttttttcagtttaaatgaaacttcaggctcttccttgttgtttctgaagtcttcttgttaacgtttcattatgctttagagtctatactttgatcaggaaaacatgtaaaatagttcaaagggtgttccatgttaaaggaaactaagcattgtgatgtgatatttgaattgactgccttaaaaagaaactagttttagttttcttgctgggttgcacatccttatccttacacatggcccaagttcggagttgaaaaaggttaatgatcaatttatgccagtacttaattttttgcttattattgtatgtatatggatattccaaactctcagtaatctccctatgttagttttctactgctcttatattcttgttttgtttaatgccttgacaacattcgtttaaataagtaaaacgagactctgaaactagctaaaatattatttaaagatgaattataacctttcatcttttattttctgtttgacaggtccttgcctttagggacatagatccacaagctcc

SEQ ID NO: 26509 - DNA, 825 bp, Glycine max
  Intron number 1 from transcript Glyma19g31240.1 (locus Gly ma19g31240) derived from phytozome v7.0 (chr-ID Gm19; pos 39005157 to 39005981)
agcagatcccgtggtgcgaccgtgacgtcatcgctgtaattcaccttcatttccctttccattcttccatcaatctcaaatccaaactttccttttcccctcttattttgtttttagtatttggtttttgtattttataaccctagttttgccatcagagacatttgaatatgttaggattgatgatttttcttgaatcctgattgggaacatcaacactgttgcgccttgagtcgattcgcgtctcttttttttttttttcattttttgtgttaatttgtggctgatttattttgcgttaatatctaattggatgctttgaattgataatttgtcgtacgaatttccttaaattgatctcggatctttgttttccacattatataacctttggtaattagattttagaaatttgcaaattaaatagaggaagtggagaaattctattagtaattgtcttttagatcagttatggcggtaagagaaatgaaacaacacactctttggttgaaaatgattaaaattgtgtgggtcccacacttttttcaatgaactctacacatgattttgtaattttcaatcaattttaacaaataggaaagtatgttatttatagtgtgttgctaacactactcgtggcagtaatggtagctgcagggattgcaaatacactgtttgacttgttgtcataggttggctattgtgtttgctgtgatgaattggcttgcattgggtgtaggcatgtttatttgtttttccttctttcagtcttaactatttggcatgttttgaagggctgtgagagagaagttgcagaggctgcta

SEQ ID NO: 26510 - DNA, 948 bp, Glycine max
  Intron number 1 from transcript Glyma20g02980.1 (locus Gly ma20g02980) derived from phytozome v7.0 (chr-ID Gm20; pos 2686715 to 2687662)
ctcgacaccaaggcacgatacgaccaccagattcgattttcatattccatattctcccctttttgttcgatttgtatttattttatttatttatattctcatcgccgattttgttttgatttacttttaaatcttgtgttttaattgctaatgtttatgattggattaggttatgtataagcggttgttattattattattattatctaattctagcccaactatgtatgtgtgtggaagtgaaatgttgagatttgagtacttaatcttatgcgaatagaatctaatcttgaatacaatgttggagaatcgagatcacctgatatgatacgtttgatttatgtatgtatttttttatcggcaaatgttagtgttagtctgttagtgttagtttttttcttagtaggagggatcaaacttgggaccttttcctccttcctttcttcttaaccacccaaccaaccttatgtctcttgattttggtcacaatactatacccatcgtcatgcctagcattgaagagaaatgggtattctcacctaatcaatatctcaaatcaatgatggattccgttttatggctaaaccctttgtcttgttttgttgcatgagatggagtatgacttggattccttactaagataaactcttttgattacaagatggactttttttttataaaaaacatatgtatatattttggcgcttgtgtaaacattgcgctctacctaacttagctattgtccttgtgcttttgatacatattttatcacagtttgtagataatttcttttgaagatccaattgtttgaattgatattgggttagcattgttttgtggaccatttttttgaaaacttccttccacaattaagattatctttcaatttatgttactatctacattgctgcaggggcctgagattcgaactggttttctcaaggacgg

SEQ ID NO: 26511 - DNA, 666 bp, Glycine max
  Intron number 1 from transcript Glyma20g06760.1 (locus Gly ma20g06760) derived from phytozome v7.0 (chr-ID Gm20; pos 9258040 to 9258705 reverse strand)
ataccacccgatccttctttaataacttgccaaaggttttgttatgctcttttcctattttagttttgcttagggaagttgtccctctaataattaaatttgaacgcatcaaccattgtggcaaaactaaatacacttgctgcaatgtttttgcccatgcggagcggagcaatatgatccatatattattggaaatattttcatgtcaaaattagctaagagttgtatttcatctttgtaattaaaattgatgctatgttagcggccaatatattttatgaccaattttaattagagaatagtaataccagttttatggtataatatctaagttttgctctgtattatatgcagtatgcttcaagtttcaaactagcaatccaatttgtgaaactacatgatggttgaaggattgcagaagtgttttcttatgcttctatatgctattctgttctgcagaagcttcaatatgatttagtttataaggtgttctgcttacttacaaaatccacgtggtgtattgaagaatttggtgatctattgttaatgatgtaatttgttagaatcaaagaacatgaaatagattcaatagctccaaatttttgaagttgaatttatttgggtttttttaatatcaaccctgatcatcatttgactgctctacag

SEQ ID NO: 26512 - DNA, 843 bp, Glycine max
  Intron number 4 from transcript Glyma20g36050.1 (locus Gly ma20g36050) derived from phytozome v7.0 (chr-ID Gm20; pos 44267400 to 44268242 reverse strand)
gggacgcaggacgaatttactactgtgtcactaaggttcgaatgaaattaattgctaattaaattccttctctgtttggataaacttttccatcaatacttattaagggaataaaataagaaggaaaaaaaaacgaaataagttttttcataagtaaaatttaggttgtgtataagtttaagttaatttgcagacattttctcatattagcttctccaaaagcttatatttaccttatgcacaagttaattttagttcatggagaaacttatttattttgttattggtctcattttcttctcatataagtgcttatggaaaagttttcccaattagggtgtaagagtttgattttactcttttcttatgtccattctgaaattaaggttgggtgggttagctggatacttagatcttgtaatgcttcaattggtttgtgtctttggttgagtccttcatacttgtttagtttgtttatttggactggactgtgtgttgagatgttattttgttgtcttggtttgtccgtaaagagttaacgagctagtatttgctaaccttttcatcagccttgttgtaatgcaaagactttaacgctatattagtagaggtttgttttttaggaacactgcatggtcatcttacacttgacttgaaccttaattaaactgaacttattcgaattaaagtaagttatttccaatttgtaacaatagctgattggtaattatgactgtgttctcattctttccggaacaatctttttacgttatacatatacttctggtttgtgatattgacttgtggcttgttttgcttcttcagggagtaccttgcccctcc

SEQ ID NO: 26513 - DNA, 383 bp, Glycine max
  Intron number 2 from transcript Glyma17g10480.1 (locus Gly ma17g10480) derived from phytozome v7.0 (chr-ID Gm17; pos 7875252 to 7875634)
tcctctttgccacacccacagctcctactgcccgggtataacataatcaattcaatgcagtatctaatttttgttttctactaacattttcaggtattataaaggcttacaaacgttaattacaattcaaaaaacaatttattttactcttcttgtttatccactatggtaggcctaataatatggaagtttagattgtttgcttgaggtcataaaaaaatacttttttttatatagagaacactggtagacaaaaaaataaaatcacccaaaaaacaatcttagctattgctatgcaaatcttcatgcattacaattctctctcattattttaattcttaattgagaactaaatcagcctcatgtgattgtgcagaagtaca

SEQ ID NO: 26514 - DNA, 840 bp, Glycine max
  Intron number 2 from transcript Glyma19g42850.2 (locus Gly ma19g42850) derived from phytozome v7.0 (chr-ID Gm19; pos 48685796 to 48686635 reverse strand)
tgcagtttctgcggatatatcaaaccttcctgcatgtgtgtatctctctctctccctctctctctctctcttttctctcacagtttagagacgtctttttagggatagagaaaccttttttatcatggatgttttctggatgcattagttatttatccttctaagtcaggttaaagccataatgattatccatagttctcaatcgtgtgtaatcacgatgctatagtgatgcagcactgtgttctggcatctggcttctatatttttcagattgcagtgagttttccatttgaggaagttgcatacatggcttatagcagggtgttagaaatccttttttctcccttttgctgcattatctgatgtttgttttggggataaatctctctcaatgttgcgccctttcattcagtcaaaaggtttgaaaccctagtttcatgtttagtagctggaaatatgattctctccctgctgtttggatgaaaaccatctgacttactgctatttgtcgtagtctatggccaagccagatgttttctagtagtagatttatgtatcacaaataaaacgcatttagttctcatgattaatagtggctaggaagttgcactcaattaacatcagtctaggaaatagtctccactaagtctatttagaacccaaacctatatacatggatatcttgcataacatatgaaacatgctatcttgaataacaaggcattccctaattctgtttgcgtataaaattgtcttctttgcatgagttgctgtgatcaatctcttgttttacatcattgagcaggttcatttgtggtccgtataaaagcttgaagggtt

SEQ ID NO: 26515 - DNA, 501 bp, Glycine max
  Intron number 1 from transcript Glyma20g25020.2 (locus Gly ma20g25020) derived from phytozome v7.0 (chr-ID Gm20; pos 34720346 to 34720846 reverse strand)
aggtgcaccagcagctcgaccatttcttgttcaaggttagttctaactcttcatggcttcaaattgctgcggtttcatttttcagattttggaattgttaaagaaccagtctctgattttgatgcttcaatctcttactgtgtttgtctttgattggcgaactagactgctcctcctgggatcagaaccgaagaagtaagttttttctgcttttggcaaaaactctatggattatgagcatgttgttgtgaaactgaggggataaacaccgggtagatttttaccaatggacctcagcaaccacattagtgaatcacaccatactaatccaaaaaccttaatgtgttcatgggtcttatcttcacttatatgcttatatggtgtataaacttcccattcatacccgatgtggctcacacttgtatttcaacacatgatatttttcttttcttggttttgcgaaaaatatgatgaatttggttatttttgttaattaggggt

SEQ ID NO: 26516 - DNA, 1006 bp, Glycine max
  Intron number 1 from transcript Glyma19g39170.1 (locus Gly ma19g39170) derived from phytozome v7.0 (chr-ID Gm19; pos 45946421 to 45947426)
cagtgcaagccactctccgagcaacaggttcctttccattttcttcgatctgcttctcttccccaccaaaacaccgcacacgtctccaattatcctcgatttgtatagttctttccctttcgcggccgggtatggagtagttttagcagtgcgtgtgttgatttcgcgaaatggcgactcagatgcggtgattccgttgcgttttgacctgatgtggagcgatttgagaggagattaatatgttttgttcactgaatatgaatttcagatggcgattctgccttttagttgttctggtaatgttgttagcgagtttgatttggaggagattgtctcatggtcctcttagaggttacagagatgttatgttaggtttttggaagcttgatgtttgaaaaacgtagggtttctgtatttgaaactgttcaacgctggaaatcggatttttctcaaaccgttttgctagtgccctaagataacatgaggcgatttcttgaaggataaaattttagatgcagttagttaggtgggtttggtgctgttcttcaattttcgaacttgtaacttttgtttcaaacttgtaatttgaaacttaacactgatcatggttgaagattgattagattaaaagaaagggatggtgcctgataggcattgtagggggtactactttagtggtctcacctagtttgtcactcttaatgcagcaacattgcttcatttgtctttccttgcaaaggatcttaccttgctaagtttgtttacttcaaatgtactaagatggaaaaaatgtctggatttcatcgccacacgagtaatatattttagtaaaggttttgccatcatttcattttatgttgattgtcattgtattgtttgttttaagcagtcatgtccttttctggggagatatctcaaatatcattgactccttgtcaaaaaataaacatgcaaaaaataaactcatgattgtgttttatgcactgcctgtgtaggtcagaggttt

SEQ ID NO: 26517 - DNA, 870 bp, Glycine max
  Intron number 1 from transcript Glyma20g33870.1 (locus Gly ma20g33870) derived from phytozome v7.0 (chr-ID Gm20; pos 42341207 to 42342076)
aaaaggtaataaataaattaatttgttttttgctattattaatgcattttttttgtcaccatgatattgatgtgaagtatctactagttttgatgatgattaatctccgtcgaaaaacttaactagtcacttttagtaaaaaaattcattctaatcatatttttttcatttacaaaatgcgaatccaagaccttactcgagatttgaagtcaaagtcactccgactaataatttgttgcttcattaatgcattctattatatagaatatttaattttttattgcagtaagtaaatatttattttactatataagtaacattataacattcaaattctgaatcaagtgttgtccttgttatagaaagatgaaataagcaagttaatttttttatttttatgtaattatatataaccgattttaaatgtttttttatatgtctatgtaaaaaataccataaaatgtttaaaacaaacataccatttgtaattggtcgtaattgttgaacagtgttataaaaactgttaactttttttgaaatatgaaaacatattataatatattaaaatatattaatatccataaagatggaaaaagataaccagtttatatgatgacttagcttcatggtagaagaataacaatatacatcttgaataaatttaatttaagtcaaaccatgggcttaatatgctatatggcagttcaataccgtttaaccactgcccagctaacattaactccttctcagtccagtccaccaacttgatgaaatgcacattccaaccttgcaatgtagaagcaactattatttcttcttttttttttttatcaagttttgcttttctatttaatttagtctttttgttgg

SEQ ID NO: 26518 - DNA, 803 bp, Glycine max
  Intron number 1 from transcript Glyma20g11680.1 (locus Gly ma20g11680) derived from phytozome v7.0 (chr-ID Gm20; pos 16491513 to 16492315 reverse strand)
agcttgatccaagtaagttcaacttctttaggttgttttttttatgtttcttttaaaagagtttataagcttgatccagatattataaagtttgtttatatggtaaattaggtaatttcagtcatttatgagaattaagtaaagatgttacggtacatatatacataataaattatgaatgtattgaaatgataaaaatcgatttactctttttcatttggaggagtcaaatctttatatattgtacccgtctctgaagtgatgagaaatttataaagtattgatggatgtgaaaaaggtgtaaaaaaataatgaacaatacaacctttcaaaaaaaaaaaaaagtgatataaatatgttttagaatttatatactcaatttgattatattaataattacattttatatgttagaattgaacacgatatcaaaaacttataatatacacacactttatttaaccaattgaactagtttttttttttttggtgataacaattgaatctaataatattctgttttaaaatttaataattatttgaaaatttattaatatcgagattttattgcaagataatagtttttattgtataattttttgagtttgagtttgttgggattgcaatgatatttttttttttcaattagttgtcagtaagttgagtatgaaaaatattcaatagtgaagatacttctccattcagagaaaagtctctttttctttttatctatctgattccttgttttcaattattctgtgaatgaagaaacaaatatagagaagaagacaccaaaaagttcg

SEQ ID NO: 26519 - DNA, 1018 bp, Glycine max
  Intron number 2 from transcript Glyma18g22680.1 (locus Gly ma18g22680) derived from phytozome v7.0 (chr-ID Gm18; pos 25749658 to 25750675 reverse strand)
ctgcggtgacagcaataagagaggtttgattttgaataacctagtgatttacttatgcagcatgaaaaacatattttcttgtagcaaataatggtattgctgtgtttttctgacagaaatttgcacatgatggacatgccctaccccgttggatagcaaagttagtgatacactctttgatgctctctattattggtttgttttttttaatatgtcaatttcgttgtctctgacataggtcactttttaaaacaagtattgacatttttaaagaatggactgctagtaattacctcttttagttttagctcattgggggcaaatcttaaagccactcactaagtatttttattgacaacatgcctggtgtaaaatgatcaattaggattttacagtggtcaaataatggttttgaacttgtattcagttccatctatgcaagaaaaaccaaaaagggatgatacatgtaggacataatcattatcttgtaaccattatccaggtttcagacattcagtgaacacctgcttgaaagtgggctatccttgttcatatatcttgttgaatttttagatatgctgctgaaagatttgacaagattagattatactttatacatatggtatgaggctatgcatgcttctggttagtgttgcctgtttgaagtttaatatgcaaatcatgtctgtctcagttgacaatgctgcagcaatgtgaagaactttaaaaaaacatatttgctaccagattagttgcttcactttttgagcaacaggttaatattagacaatttgacagctagtatcaatgtatcattccatctaggttttagaaagcctagctgagactttatgggctcttaagctccaaataaaattaaatctcgttgtatgactctgtaggccttactttttttatttagatgtaataaactttatgcggtgttaaacaaaaatgattcatgcagtgttttcattttacaggcttgtaagaagcttaagcagatagaacttgcaga

SEQ ID NO: 26520 - DNA, 842 bp, Glycine max
  Intron number 1 from transcript Glyma19g01810.1 (locus Gly ma19g01810) derived from phytozome v7.0 (chr-ID Gm19; pos 1386374 to 1387215)
cagataccatcatcaaatccactttactggtacgtatactggaccgactatgaacatctttggttaacagaataacagttgaattgaagaagtacttttaaatggtgaatacatttttggaaaataaattcatttaggtaacatgtttggttactaccaaagatgtgcttggaatgaaaattttgtcttacgtactactcagttttataaaaggaagaattgaatagcctttgtaaatttaaatttaactcaaactatagtttgtaaattttaatccaaatatgcattatactgtacgttataattaggttgttagcacagatgactttaaatgggactaactatataaaatcttcaatttcaattattgatgttgtagaagtaagctgtgattttgctaaagtaaagattaaagaatcgaagattcttcttagcctgactaataattttatgattagaatattgggctatgaaatatgaatatagtgaaacaggtttaagtttttcacaaagtgagaaaccacttatagaaacacatttacgtttaattaagggtatcaattgaatgatttaaataaattttaattagttcgactatagtagatgagttcacagtttattaatttacttatgatttattggaaatgtctattttgagagagacatgtactagagattcgaaggatgtgtaactacaagatcttaagcatgcaaatatcatatccatttgctttgacttatttaagctctcatttatacgacattctacttttgtttaacattttttttttatattttgatttgcagtcagtaatttcaggaggaactgaaacaaatattac

SEQ ID NO: 26521 - DNA, 566 bp, Glycine max
  Intron number 1 from transcript Glyma19g02840.3 (locus Gly ma19g02840) derived from phytozome v7.0 (chr-ID Gm19; pos 2800715 to 2801280)
cctgctgcgttcattccaaattccaaacccaccatgtaagcatcgcatcgcatcgcatcttctcctaaccagatctcatcatcttcttctttctttttcttttctaattcccttttacaaatttaatctcattccataaaactctttcttttttgaattcccaattcaattaccctttgatttgggagtttactcaaaataatagtaataataacgggtggttcctgctgaaacttcgaaccctaaacgtcgacgtttttgcgtaattttccatgtgtttgttcatattcatacgatggatctgaattttctgtttcatgtgagtttatgttagcatatcctgcaaaagtagttagtctctttcacaattcacccccaaaatagattcaatgaacatgttattaagtttttaccttttttttaatctcttgagtattatcattgtttagactgttcatattgttgttgttttttttttttgaagaattgttcatattgttatttagaattctgggtttgtgacctttgcagaatatctagcttcttgtgaaggctgttagtttgat

SEQ ID NO: 26522 - DNA, 602 bp, Glycine max
  Intron number 3 from transcript Glyma19g42150.1 (locus Gly ma19g42150) derived from phytozome v7.0 (chr-ID Gm19; pos 48197680 to 48198281 reverse strand)
ttaaacaagtaagtcctctctctctctctctctatttctctctttgcgggatcagccaaatacgaactcaattacttaaacactgtttcagaaactagttcttggttttgaatatgcatgccaactcaatttcttaaaaactgtttcagaagctagcttttgattttgaatatacactgtttcataagcaaactagacgtttattgtactcactaattttaatttcttcgattcatttaattgtaatgaaggtggaaaaaaattaaaggttgtattgattgtaatctggatcatcatgcattgatctcaacgttagtattgatgtgaactgtggagcattataaggttcaactctgcttattaaacatgcctgctgtagcatgggttttcagcgaatacatcaaaatctcaagaaaacttcattggaaattagggaactaagcaaatcatgaaaattttgctattgtaaccaattatgacttttatgatgaataggtttaagtgcaatactgcagtagtccaagttgtattgcttattgtcttatgatagtgtgctcaatgtctcaggtttgtacagaggtgagacctgccacagacgaaga

SEQ ID NO: 26523 - DNA, 444 bp, Glycine max
  Intron number 1 from transcript Glyma18g02490.1 (locus Gly ma18g02490) derived from phytozome v7.0 (chr-ID Gm18; pos 1578170 to 1578613)
caaatcaaccaccccaatttcctgcaccctccaaggtatcatttttttatattattattattatcattcacttgttagggtttttcatttttagggttcttctcttgacattttcagctttccaccaagacccagataacacatcgtggagctcttaacttttttcgtccccaaattaaatgaagtttttttttttaattataatttaacagcccagaactcatagttgacgattttcattaccaccattttgccatgaacttgttattatttaaattcgttgcgtgtttttagtcgtcttttttggtcaaagctcaaaagtcaaaacccattcttcaattttattccctaactaaagaatgagcttttattattttgtatctgagtagttctggaaaatcttgtgcaggaacagttgcagaaccaaaatctacagctgctggt

SEQ ID NO: 26524 - DNA, 877 bp, Glycine max
  Intron number 2 from transcript Glyma18g02490.1 (locus Gly ma18g02490) derived from phytozome v7.0 (chr-ID Gm18; pos 1578698 to 1579574)
aaggcaggttcatgcaactatttctatttgtgatttatggtttacttaataatcttcagaatttgggaattccattgaagttgtagaagtcaaacttaattgtaggtttaggacagcctagtttggtattggtgtttgtaatttttttgtatattgtgtagaagttactgttctgaaccgcttgctcttttaaccggaatgaaagaacagagttgactttgtttcacatgcgcagtgggattgtgttgctttatgaaaatggaactgcttttggactctgttgggataaacttctctataaatacttataggagaagaaaacaataaggaaaaattaaataacgttcttccatagactaaaattagcttatgtataagttaaaatcatcttttggagaagctaaatgagaaaacctttgcaaattaacttgtgcataagctaattttagtgaagctaattttatttttgcttcttatcttatggagaagtttgtttaaatagggatttggtgtaaatagttgtgctgttgttaactgggtcatttttcagttttaaccttgtctgaaaccaaacatggctaacagaatgttaacattttccaaaattatattcacatcagaaatttttttagaagtttttccggatgattttagcccaagaatttgtttgaatttccaagatccatgctatttgcttcaattgtaaatttaaatccaacgtctttcttgttataaatgcaaccaaacatcaaattgagaattttgtttttctctgtgaattattagttaagtgtgttttctttgtttaaaatagatctaatttgttaagctttatttaccagagttaccaaaccatctgtgagaaatatccttcatt

SEQ ID NO: 26525 - DNA, 412 bp, Glycine max
  Intron number 1 from transcript Glyma20g32670.1 (locus Gly ma20g32670) derived from phytozome v7.0 (chr-ID Gm20; pos 41302609 to 41303020)
gtggttagttttctctttctctttctcttcactgatcattcacgcactttctttttggttgcccaatttagaaacagtggaaatgaatcaaagggtcactgcaaaattctagctttctatgatttttgtttccaattaccatatctagcgccccggctcggtgctaatttgtttccccccttttgattttcaatgcatgcagatgtttcctttttgttgttgttgttgttgttgtaattttggaaaaaaaatgggcattcattaaggggaatatgagtttatgtaaatcatgcgcaagtccttcatgataatcatgtcttaaaatatcattgcaaagaagatagagcatattcttccctattatagctatattgtaacatgtcttttttggcaggaaggtattttttcctct

SEQ ID NO: 26526 - DNA, 636 bp, Glycine max
  Intron number 1 from transcript Glyma20g30820.1 (locus Gly ma20g30820) derived from phytozome v7.0 (chr-ID Gm20; pos 39496422 to 39497057)
catcctttttctctttccgtgtcaccctctttcaggcaagttatttctctctctctctctctttgcttctccgttttgaacgaaggaacgtgctgtgtgtttggtttgctgagatgtcacgatttgctgcaactttatggctctgagctggaatttggacataccctttttcttctctgagattttcttcactgctttttgtcccttgattcaggtctccaattgggctattcgagtttcgttcgagtttgattgagtgtgagataaaagtttcatttttttcaccttctttcgtgtatgtgcttcgaccgtgaagcctcacgattctttgcattatgatttattggcatcgaatatcgattgtgatttagtccaattgggttttttgaaaaattggaataggataactttttagctttatttagttgttattcagttttctccagttggatttgcgaaatttttctccagttgcttgctttttgttttagactgattcaaactagagaactattggggttatttgatgtgatgctatccataatttgaacaagtaaaaagaaatagctgaagtggttggttcatcatcattgccatcattatttttattttctggtttttacaggttaatttgca

SEQ ID NO: 26527 - DNA, 472 bp, Glycine max
  Intron number 3 from transcript Glyma19g17460.2 (locus Gly ma19g17460) derived from phytozome v7.0 (chr-ID Gm19; pos 21086674 to 21087145)
gattgggattacaacaaaattatcatttgcaacaggtaatatagtgtcttcagtttattataggaattagaattcataggtctaaagatattggagctgataaaagtggcgaggtaatgactgtttgggcaatcaacaaacgatctaattaatgtcatcttgaaatgatataagcaagaagaaactccagcattttgtctaacacatttgacaattatatgcaccctttcttatgttgttcaattccatgctcagcagtctccattctgctttgccgaaacagtttttcagccttaccatcctcacttatcagtcagatcaccgctgacaatgaaaccatttgcttataaaaccttttttttttcttctgcaagattgaactatccggcaagtttttgttggttgttgttttcttactcttcattttgaatttcgttgcaattaatataagaatgcattatatattttatag

SEQ ID NO: 26528 - DNA, 414 bp, Glycine max
  Intron number 1 from transcript Glyma18g02510.1 (locus Gly ma18g02510) derived from phytozome v7.0 (chr-ID Gm18; pos 1595221 to 1595634 reverse strand)
gaaggcttgcgcttttcttgttggtgagcacatatactaatcgattatatattctagccatatgtattatgattaatatttactcactgcttaagcttttcttttttcttacaagatctgcactgtttgattttaactatctccaacctttgaagattaattttttaattatctgtagatagaaggagaaacaatttgtagacccttaattgcattatgctgatatatagattgttatgcaagcagcatattcgatctccacctagtagtatattattccaaaattataagtctttacactgtttctgaatatatagttgttaatggttatatatgtctgtggagttatatgatacactaactctcaagtttgatttgttatatggcataacataattaatatttctgcaggct

SEQ ID NO: 26529 - DNA, 694 bp, Glycine max
  Intron number 1 from transcript Glyma19g02720.1 (locus Gly ma19g02720) derived from phytozome v7.0 (chr-ID Gm19; pos 2652895 to 2653588 reverse strand)
gtctgaatcagaagctcagcttcctactgcctttggtatgttgtaactccctgataagtttttgcatactgtttggtttataatttgcattcattttggtagagatgcagataattggacactaacatatatatgaactttcccctgtttgatgggctattgaatctaaggtttaaatagtggtcacagtagtggttttctcacgatccttgatattgtgggaaatggtagacaaatgcagctgatgtggctgcaattgtagtttttgaaactccaaaaaccttgatgttgcagccaaaattgcagtcggggaccattgtttaaaatcttgattgaatcttcggtggccttttttatatatggatactttgcttcattatgtacctgtgataattcaagtttgatttatcttatttttttgtttgtttgtgttggtggtcaacttggtctaatcttaatggtttggatttgcaattgagattttttttttttaattttgagttttttctcatctgaagatttgattccaaaccagttaaggatttcttttaataaatttaaacaatatctttacaaacttagataaaattgctgaagggcataattttgcatgcttcagctttttgttatgggttcaatatggttatacattatactagttctgatgtttgctttgtctcttttgtagttgctg

SEQ ID NO: 26530 - DNA, 909 bp, Glycine max
  Intron number 1 from transcript Glyma19g30880.1 (locus Gly ma19g30880) derived from phytozome v7.0 (chr-ID Gm19; pos 38563537 to 38564445 reverse strand)
ttcggtaattcttccggtaactcgtttccttctgttttctatgtattggtggtctacgcggaaattgtttcacgaatgaccctctgattggaagatcagttttttgagataattgcttggagtgaattggaatgagtttgctcttctctgggtttattgttgaaagtgaaaccatttgattgtttattgatttctgtttaattgaattcttattcagctgaacttgaatgttgttttgtttggttgtgaacgcatgcatagttcattctagaagttgaattgatggtttatttcggtgcttctgaacagggatagtgaggatgcacacaggaaattttagcttatattagtctatattaagttatgctgtaatttgatgtaaaaaagaaagaagttatgctgtaatttgaagatttttcttggtagaagtaggatgggttgattattatgtgaattttcgctaggtttggagtaaaaccactcagatgatgatgaactatatgtgatcctctttttctgctgtttacgagtgttatgaatgttgatatatgtgtggtatttggtcactaggtaacatacaaattgatgggtagatgggggcaagttgtatctttatgcatgacttatgtttgggaatgataatggtataatggaatatatactgcagaaggaaatgttaatgttgataaattagtgtttgggagaagtgtaaatgtgtatgtatgcactgtagaaagactctaatataattatgtattgttcagttttacacttttactccttgttgatttaattaattatgaaagtttgttaaatttttttgagtaatggctattactttaaacaatgttctttactttcctaatcttgaatgcaccagggaaattacaaacacaagagaagttaaga

SEQ ID NO: 26531 - DNA, 967 bp, Glycine max
  Intron number 3 from transcript Glyma17g09020.2 (locus Gly ma17g09020) derived from phytozome v7.0 (chr-ID Gm17; pos 6690483 to 6691449 reverse strand)
gctgagctccgtgcagctgaacagcgttctttaaggtaatggaatttgctaaagttctagtagagcaggagagaatattaaccagtgcaccgttccatctgatatctaactgtgaggcactgtctgtttgtgaatggaagacacaaagtatctgtctgaatagtctccagtccagttttaataagctgataatgaaattccatttttgcggcagtatttgaatccagctaaaatcctttcatttaacccagttttggctttcaatatatacttctcattctttgaattcagttattagggaagttccttaatcaattagagagtttgatggacaatggataaaacctggctcgggttccacatgtatcacttgatactgttatcaattatagttttcccttttcataatccctgaaaagagcataaacgtgtccctaaaggcaccggcagaaccagagcaatgacttacggggtgcagatagtttagatttatgatacaaaacatgtagagatgtttttcaatgactccagttgcccacgttgtcatcaatgtagttttttgcccatcttaaagttgtttaatcttggcaagcggattatggcaaaagtagagaaatacatggaacatttttgttgcctttatcctctacgcctgttatgtgagaaatagaggagaaatagagaggcactaaagatcaccctaggcaggtccagggcttgcttgcaatgtaggaatataatcttactaatgctggtgatgattttaatctaagagttatttttatatagcctgtttgtcttcaatgccttgcttttgctgtcatttatgcgttaatcttttacttttaattgattcgagggttggtactcataatcatcctctctctctctctctctctctctctctctctctctctctctctctctctctctctctctctctctctctctctcttagagagacgag

SEQ ID NO: 26532 - DNA, 685 bp, Glycine max
  Intron number 2 from transcript Glyma17g09020.2 (locus Gly ma17g09020) derived from phytozome v7.0 (chr-ID Gm17; pos 6691497 to 6692181 reverse strand)
tcttaccttaactggttcaattggagtggtcacaggtgaacctgggtgtttcagtaggagaaagaaaggaatgtgtggatgataaaactactaatataaattttaaaatttattgcaaaccgacatacgcatgctggtatgttttgacagttgacacagatgatctctctgtgttataaacctaattgatattttgttcaatttaggaaactcctggtgatttagatacacaagatatcactagataaccttactgattgttgtgatttgtagctatttttccctttactgaaatttctccaaataaactcgtcttgaaaattaacttgaataaaagaagagtagatatgcatgaatttaaagatttctggtttctgttaactttccatgcacatgatataatatagcatattatgagttgtgtcaatatggtaatataatatatagcattttatgatgaagaaaaatatagcagtttgaaatttaaatggtaattaaatgcaaccaaaggaaattgtatcaggaaagaaaatattcatttgagctctgagataatgagggaagacattgtaatttcataaacaatcagctccccagatattgtccttaggttttgtaatatattaatttgatggtataacactataacatatttttgtaggaaaatttaaccttgggaaacttt

SEQ ID NO: 26533 - DNA, 695 bp, Glycine max
  Intron number 2 from transcript Glyma17g09690.1 (locus Gly ma17g09690) derived from phytozome v7.0 (chr-ID Gm17; pos 7184658 to 7185352 reverse strand)
ttccattccgatcctgagaagcagcttgtgagttaatgcttttatttgattgtgttgtgccagcgagcattttactgtctgaaccgattgatatgtttgtgcaagagtgaagtattagtccctgtttgtataaacttcacaacaagtacttaataagataagaaaataagaagatcaaatgaattaaacttctctcacaagttaaaattaacttatgctcatacaaacactctcatctaacttcttcaagagttgaggtgcataagttgattttaacatgcggaaaaagtttatctttattttcttctcccattagtgttcatcgagaaattcatcaaaacagatcttagatcgtaattttggaccactgatatatcacttgttataatctgagcttaatcgaatgaggactggacttgttctcctgtttttccaatggagaagtgaaatactttttgtggtgtaaaatgacacaatccattagtgtgaatgtcaaataagtgcactgaatctagtgattgatgggggtgggggttaataacactgacataaaggagttgacacgattgtttgcttttagtccttttaatgcaaatctgattttgtttaaccctaccctattcctcatttttaactattcccaattttttatttgacctttcttcattggtgcactcagcttttttctggcagtg

SEQ ID NO: 26534 - DNA, 571 bp, Glycine max
  Intron number 1 from transcript Glyma17g08630.1 (locus Gly ma17g08630) derived from phytozome v7.0 (chr-ID Gm17; pos 6385093 to 6385663 reverse strand)
ttaggaaacagacacagtcttgcgagtgaacacaagtaatctcagattatgcaatcttgcttttcttcttcagttttcaccttgattctcttcgtttttgtttaatctcactgggtttttttccctttcatttcgattcgatttatttgtttacttttttcgtgtagatcaaatatgttggttggtatatggtatgatacgtgtttttgttttccgttttcaatcggcgaacttgtttttctttggtgatcgtgagatctgtcttgagatcagagagtttgagatttgaacttgttttgatattagttttgttgggtgaccttgaaatattttctctttggattagcgaagttttgtgacgtagctgtcttttagggtttctgttattgtttggaaattggaacctaaacaaagaaatgatataagcttttatataatttactttcgttttctctaggtttatgttcgaggttgggttttctgatacctgagaggtgttagtttttaaatttgtgttttaagatatatattttacagagtcactgacatatgtttccttcaggttacaaca

SEQ ID NO: 26535 - DNA, 939 bp, Glycine max
  Intron number 1 from transcript Glyma19g28900.1 (locus Gly ma19g28900) derived from phytozome v7.0 (chr-ID Gm19; pos 36454764 to 36455702)
agattcagacacccagttgcttccttttattcctggtactcactctcatttcattcttctcttccctttcccttttttttttttttttttctatttccttttgttatgtgtctcatcttcttttttttttttttgttacaaactatataatttggatcatctgtatttttatttttcaatccttgataataattaactgaacattgtgatgtagaggcattgattttagctggatcatggtatttcaagggaaagggtgggtagaggagcattgaattgaaaatgtttttgtttttatgaagtgatgatatggaattggagtgtgtgtggccatgccaacaaacaatgctttcagttttcttctagaaaggaactaaagcctctcgatgggactaatgggcgttgtgctgttgggcccttccacattcattgcctttgtcatgaaatcaatcattgagtttgttgctggtagaattgccatgcatgaatcatatgttaaaagaaagtaaagggtgtacatctagttaattttatgaatcttgtttggaaatagagttttttttggttaacatgttaaagcgtgaattatctaccagtttcgttgataactactttctgtttgaaaatttggctgacgtgggatctcttttcctaacaacagtcttttttttgtccaaaagagactttccttaaaggatccgagtctaattctacacggaagtgacttagtgactttttgaaatacaatggtgtaggttttggtacatattttgaggatttggatagagtgtgaaaatactacttttttttttttattgtacaaggacccaccatgattggttatatggtctaggggtcacttgttatatttaaaattaaaattgagtctttctcttttctgtagaatcgtgtgctgacagtcaagaatagtagaggatc

SEQ ID NO: 26536 - DNA, 985 bp, Glycine max
  Intron number 1 from transcript Glyma19g42050.1 (locus Gly ma19g42050) derived from phytozome v7.0 (chr-ID Gm19; pos 48128507 to 48129491)
tcttctcgacctccgtgctcccatccgcatctgcggttagccacctctttcccctttataatcacactattttccatatacatatctcatttaccctttatctcctctctcttttttattagcttgcttcttttgtttacgtgattgttgccatatatgtgaccaccgcgatttagatgttcatttggtgagcaagttttttcttttttttttagataccataagtatcttcgcgggagtcaaatctttctcttgaacgtgacaaaaggatgatttgccttgcttgaaaaggatgatattattttaattatatgtattaaaatcagcgggagatgtctgtttgtttttgtttagaaggtgaaggaaaattgcttacaagctctggagaaagaaaaaaaaaatggaactttggcttttggaatttagaacattggtcaatcaaggaagacaatgataccatgatatgtgccctgtttatttaatgaattattaaatggaaacagacgggaggaaagagatatttgttcacaattgtttgctgaaactgtaatttgatttcatgtgccttttttaaaaaatttgatgtttttcttcagaatgcattcttcctttctgtctctgatattttggtgaaaattaatcttgtacaggttttacggtctatctataaaaaccgtgtgatatattttgcgttctagtgtagataagggatttggctcaggagagtgcagtttaggagataaagtgcaataatgatcattagttaaaaaatcaatagtttggattgtaattaactttaaattttgtttgttatatatgtattttgtttttatcacaattctcaacctgttgattttctaatcaactattgtgagggcactttcaccttctcgctctagaggagtcaaatccgcatatcagtatgcaattgccccatcttcaatcccttgttcctgatgttgcagttctcttgcaggtgatatac

SEQ ID NO: 26537 - DNA, 907 bp, Glycine max
  Intron number 2 from transcript Glyma18g07920.1 (locus Gly ma18g07920) derived from phytozome v7.0 (chr-ID Gm18; pos 6662911 to 6663817)
ggcatgtaacattactccccattgatccctttttttgtgtgtgtgactaaatttttaaattttgtatcgatatattttctcataatagccctcaggagaatgaaacagcaacttatgttgtttaatttcatggattagaggatgcaaagggcttttatatttcccttaagtataggccagtcttttgggttgttgtacctgaatatggcttcagggctaatggaataaaagtgacatattggccacatagagatttcttcatttgaatggagaaagcataagttaatgtttacaaagaaatgtggtaggtttgctgttgaaaaaaattgagtggcttagtattgaaatcttgtttaataatctccactttgaaattactgtgggaacttttgatgaatttaagcaatgtccttttattacttttggtggatgagataacatgatatgatgttatttttttattttttggaatgtgatataaccaaggattaatcctttgattaccttccatgatccaaaatggctatactatcagggaggattttctaagaattaggacttgttagatcaaatcaataaatgcattgtgaattatgtataatatggaaggaaattcttagcaaagttgcagttgaattttttccacgggcttcttgcaagaaatgaaacattatgttatgataccccggggttaaaattgagaagcttaagtattataccctttctgcaattctgcttagagattctcttttagtttttgccgcttcttttatgtcattgtaaacaattttatcattcttgttattgtggttagaaatttaatttttctgttttgtgtgtttgggtggggggggggggggtgtttattgtagggcaaggtcaaagatattgaattgaaaggtcacac

SEQ ID NO: 26538 - DNA, 1015 bp, Glycine max
  Intron number 1 from transcript Glyma18g00220.1 (locus Gly ma18g00220) derived from phytozome v7.0 (chr-ID Gm18; pos 2730 to 3744)
ttttcaaaatcgtaggtttttctacttctcacttttttttgggtgattacttttatgctgcgacttaatatgattaatttcgctttaccccttttcttatctcgtaagctgactttgtagttggtgctgtactcatctcatgaataagttagtgcaaacatgtttaacgactaaaagtattgtaaattatcgtataattagtcgatacaaggtgtttattttagaagtaagtttggtttgtgacggcatataattttattacacacacacacacagggaggctttaacaagctttgagcacgttctttcttccctatttgatcgaattctggaattgtggtttttccgctaagcatcacaagggttgactggagaattttttaactatacctgcactgttgctctgtgctgaaacacaaatggttacatgtttcagtcccccttccttagtggatgactagtttcattatctgcacatgcttataattatgtttggtgttgcagtatggtactctagccaagggttacctgtatctttgttgcttggactagtgaatggcctgatccgaaactcaacttatctataaggctttcttttccttttgatctccattagtagaacaagatgagaagagtcttttgaaagctaggctaactaatttttttttttgtttagttgcttgatcatatcaatcagtggcatggatggatatcaaccgagctttagcaccttttttcataaaagagtttaaaataaccaagacttataacttgctgctcttgtgggaaagatatcaaataaaaagaaaatgacctgctggtctaattagagatctcaaagtcaaatctcccttctccaatcattaaaatgggaacaaaaagataaagctcaaagatgcgatttggttaacttttaccacaaattaatatatccctagctgcttcacttttgttatgaattgcttgtatgacttcatatatgtgtttatattgttggaaaattgtacagggaagt

SEQ ID NO: 26539 - DNA, 728 bp, Glycine max
  Intron number 1 from transcript Glyma19g36330.1 (locus Gly ma19g36330) derived from phytozome v7.0 (chr-ID Gm19; pos 43649564 to 43650291)
aaccgatcacttctgcagcagcgatctcgaagtttgtgagtccttccatccctcacatgccaatttcgtttcaacatttttctgcattttatcacttttgacctaacttctgctctattttttccattctctattctttttcctcttttcattccgcggtcaaacgaacgatgttttcttcatctcgtacaatcgaatcgcgagcgaaaaaaaaaaaacctaatcaattagagtctatatggtatcccgtaaaatttgaatttaggaatgattccgatgaatgtttcaatcgcacgtgttaggtttccatttgaccgggcgaaacttgtttccgtataagcttttatatataatttttttttgaaaatgaatgctgtgtctttcaatgaattcagctgcgaaaagatcagcacccactatgagtggtttgtttagttgattctggatggtaattttcccttaatcctaaaccattatgatatgaccggtgaaatcatgtgttattattatatatcgggttgtttttaaattttaatcaggaagaaacaaaaaacaaaacaaaaaaagtgctattattttaaaaaaaaaatgcttctggattttaagcctcccgttccctttgatgtgttttcaatttggatccatataacgtttattcactttgcttatacttgaactgatgtcatgggctaggtcttcttgggagtgtggctccttgcgtgctgtat

SEQ ID NO: 26540 - DNA, 734 bp, Glycine max
  Intron number 2 from transcript Glyma17g37250.1 (locus Gly ma17g37250) derived from phytozome v7.0 (chr-ID Gm17; pos 41047588 to 41048321 reverse strand)
tgctggattattggttgttggctctacttaccagaagtaactaattctcttaaacgtgcttttctaattactctgccttcaatttgcaatatggcctagttaaaaagaaaaaaaaaacagttatgctatagtttcatttaattattatctctattgctcttgatttggtgaaaacttggcatcacgtagaatgtagatgtatggaagtggaatgtctgatttcgagtttcaccagagtgattgattctcttgctatctcttgtcattcacttgaatgccgctggctatgtgttgttgctgtctttgattgcttatatttttttttcattcttctcttggtgttaatagaactaaaagttatttgtgcgttccaccccttacatcccaaaaatgggttgtataatgatattttttgtaatacaacaatgcatatccatgtttttccttattttcattttaataatactgagaattaacccatgtcgtacccctttgatgggggataatagaccatggctgctaccaattaatgtacagctttttcccttgggggccagggaaggtttttggacctgctgtggctgtgggtctattgtaggcagccttactctgtgtttgctaaagtacatatagattgatatttcttcttcttttgagataaaatattgttagttgactcaatttactataaatgttacaggcttacttctccaaatcctaggacgtacattggc

SEQ ID NO: 26541 - DNA, 403 bp, Glycine max
  Intron number 1 from transcript Glyma18g51560.2 (locus Gly ma18g51560) derived from phytozome v7.0 (chr-ID Gm18; pos 60415591 to 60415993 reverse strand)
ttttggttgagagggtttccagcctcgagaaagaggttggttagttaattattgtagttttttttggttttaattttaagcgattcgttgtcgttttgctgttatactgtgacgtaggcgtgtggattaatttaatttttttttgtggtgtttcaagttttgatagcttttggttttgatttgaatttcttgggtttgtagtactacggtggaaattgagctattgctacggaagtgttttttctaaaaggattttgaattatgggatatattctgggttggtcatttgttaaatttgggaaatatcttctttttttttttggtttttgtatatttggtttgggcactgaaaattgaagcttgattctggggtggtatagcttgttatgttttgtttcacagg

SEQ ID NO: 26542 - DNA, 719 bp, Glycine max
  Intron number 1 from transcript Glyma18g46980.1 (locus Gly ma18g46980) derived from phytozome v7.0 (chr-ID Gm18; pos 56638238 to 56638956 reverse strand)
tctctgtcgtttcaaatttctcttttggcttcttggttagcttctaacttctatcaactcttggattcttttcccatgttttttatatacacagcaatatagactattcatgcttggtttattttttcttgatttcttgaatggtatgtcatgtttaccttttttaagagccaaacttataaactccccacatgaatatgtgacgtccacttgttactagacaatagacatattctagttgaactataagaaaaccttcctaattgacccaaattttaacttcaattagcaaatcaaccaaggaaaatattcagcatacacccattttctttgcaccttatttttttttcttatggtactcttccttttgtatcacataacttattatcgtatctatcactttctttctcttccttttctttttttctttctatcactataactaaaaccactccattttggagtggacattttatcattcctcatcaaccaattccccttgtgttggagggtcatgttttctgttgcactttctgctctcatatccaatttgatccatggaaacattaacaagttcatttgtatagacatgcacttttgaggtcccaagtaacacaatttgtcactttctgggagcaaattgcatattttaacatctttttctctcgagttttaaaaaaatggggcattgaatttttgaatcaaatttgcagcttggt

SEQ ID NO: 26543 - DNA, 847 bp, Glycine max
  Intron number 1 from transcript Glyma19g30390.1 (locus Gly ma19g30390) derived from phytozome v7.0 (chr-ID Gm19; pos 37998632 to 37999478 reverse strand)
caaaaaccacttcaggtttgcttcaattttcaccttttttgtctgaaagattccattttgtaattcaagttaggagtccacaccctggatttgatattcttgcccctaaaccgatctgatcggaattaggatttaaagattgtatttttttcatctctctttctcaccattttctggttcttttcgttccttcgaggtggttcctttgcatgtttctttttgtcgttagattatttttttttgtgtgttgttagattcttttttttttcaattttctcctcttttatctgaatgagggtggctgtaagaaatttttgtggttttattcagagacccaatttttgtccctctttcatctgaatggggatgactgtaagaaattttatggttctgttcagcaacgcaattattttcctcctttatcttttatcttttgagctttgctttctttagatttttgtttttcaattttctccttttttatctgaatggggatggctgccagaaattttatggttctattccgcaatctaattttgtttgtttgtttgcttgttttttccccccttttgttttaacattttggatagatttattttttgtcgtttttcttggctactgactccaaattttcttgcatgtttgtttcaggaactgtgttgtatttcccagtgttgactccaaggattgcatctttcattccttgtagtgtgtggtcttttgtactttaatttatattatctagcatttcattgatttttctgtacactgagattgttgggtactatactttgggcaaggttgcttgtagaagagagagtatttgtactgctttaaaattgtacca

SEQ ID NO: 26544 - DNA, 891 bp, Glycine max
  Intron number 1 from transcript Glyma18g36130.2 (locus Gly ma18g36130) derived from phytozome v7.0 (chr-ID Gm18; pos 42465610 to 42466500 reverse strand)
ctgccactgttgaaaccattgccaatctcttgcaggtcctgattttttgtttgtttgtttaaattgggtgatttcatttgatttgattgcttcatcttgtttaattgggtgattgattgggattttgagcatcttggtgtttctggaatgggaaatgggatttcttttttctgtttcttaagtgaaaaatgaatttttttttttggcaactggggttgttttgctttgactaaaactgttttgaagtttacaaattgaagatttgtaccattcgaggttgttttgtgtactatgtttttatagctttatggttttgctgttttgtgccaattttagtagtccagatttggaggcactgagttccatgcatggagtgttggagtttgtagtataagattttggagaagtgtgctttgttttcttcttcgtgcttcttttttgtattagtactaaatttgtttccttgattttaactctctgattcagaataattgtcatattaaaaattcgtactcttatttctagtcttgatcttgtgaaaatgctataaacttctttttattatattatcttcttggtatttctttaatgctctcttaatgatttgctcattgtaataccattgttgcatcccaggtttgagacaaggcagtcccttgactcatcaaaaccaaaagatgaaaatcagtaggaaaatataattgattttttttattttctaaagtatcaaataaatttggatgtcttttagagactgttgaataaacaaaaaagaagatagatctcaccttaggaactgaatttatctaatgtgaagagcatgtgctattgtattcttcaaactcaaatgaattttgaaatgtttggcgactttgtgttataggaggttgg

SEQ ID NO: 26545 - DNA, 561 bp, Glycine max
  Intron number 2 from transcript Glyma18g29640.1 (locus Gly ma18g29640) derived from phytozome v7.0 (chr-ID Gm18; pos 34270861 to 34271421 reverse strand)
tccacgtgccacccacaattgctgggcttataaggtaccataataaaggctttttttttttcttttactttgatgaaacaatgagtgatggttgcttgtatttttgcctctgcattttggtttttgggtctcagaaaatttagtttgtttattaggaatgtttcactcgaaaggaagggtataagtaggaaatgatttgtcttttgccttgcttatagttgaagatagctactttgtggtccctatgtattgaggtttcagctatcgtagtctcagcctcaaggtggttgataatacttttctcattagctagtttaattacaaattaagggtgttgattggatttggaacatagaagaggcatggcataagtgaagatagaaaacataataaaacatatgcataaaacagataatgaattgttacttgtctgcactatgcacaaaacagattttgtcttccattaaggttgttgattggatttgctcttctatttttattttattttatttgttttacccttccatctgttataacaggtgggggatcaatatcggtcca

SEQ ID NO: 26546 - DNA, 711 bp, Glycine max
  Intron number 1 from transcript Glyma20g33150.1 (locus Gly ma20g33150) derived from phytozome v7.0 (chr-ID Gm20; pos 41767195 to 41767905 reverse strand)
aactcactcggagaaacatcctccaacaggtatacttttagtgggtgtttggaaaagattaataaacgtggatccaagcttctctctccacgtccttagtttaaaatgcgtaaaaactatgagattagcttctcattttcgtgaatcgattctgtagatacgggaaaacaaacatgctattagtttatttgatgcttgcatgcacatacacagtttccaaaaccgaatctgtctacaaagttcagataaatttcttcgtaaatatttataaaaatgaattgattttagttcgtgaactaaaattaactagtacacttttgcttttggagaaattaaacaagagaattaaatggcataatttgatcttaacttgggaaaaaaaaagtcccaattcattttatctttatattatttttctataaatgtttacaaagtaatttatctaatcagacccataaggtataagttaactaacacatgtttgtgttgccattggaatttctgtagcagtcattccaatccaaatttaaggtataagttacaaaatgtatccttttgcaaacctaggatgtttgtttgccggtttcaattcgggttttgggtcttatttttttatttgtgtgttggtgcttagctatgatgtgactcattgggttagtgaaaattgattgggcagggtctgagcagaaagctggttcatatattgtctgg

SEQ ID NO: 26547 - DNA, 698 bp, Glycine max
  Intron number 1 from transcript Glyma19g02730.1 (locus Gly ma19g02730) derived from phytozome v7.0 (chr-ID Gm19; pos 2674817 to 2675514)
gcttgtatgtgacgtaccattctaatcctactatatttctttatattttaacaatttatttaatttccatcattttttaagcaaattactttgacacatcctttgatttcttgagattgcacaaaatatcctatctttcgaacccctctagtaatcccttttaattgttctaaatacattacattgacacccttatttcacaaaaagacacacattacaatgtgtgccctctaagggaaatattgtaaatgttaaaaaggcaagagtattttacacaatctcaggatatcaaggaaggtattagtgtgtaattttgctcattttttgaagagacaaaacaaaattttattctcataaacttatcaaagccacaagatgtgacctaaatatataagccaaacattacagaaattatttgttgccatatggttgcagcaccaaattaacatcatccctaaacacaagaaaatttaaacactaaatccatccagaaagccttcctaaacatagtttttctaggcttagaaaccacaatgaaaccacaatgctagaatcaaataaacataaaggctgcaaccatagtgtaattttactcatttttatttggtacaaagtgctatgatcgatttacaattgaatcttttactgtttcatgcatggcaggctgaaattaattatcttagtgagctccatcatcc

SEQ ID NO: 26548 - DNA, 831 bp, Glycine max
  Intron number 1 from transcript Glyma18g05010.1 (locus Gly ma18g05010) derived from phytozome v7.0 (chr-ID Gm18; pos 3736079 to 3736909 reverse strand)
gccagagctaccttcttctccaggtgagtatggagatatactttttttttttcttttttttactatctttgaattcttaagtaaggcagggtactaatagccataggtcctaaggttttctttggttttttgtttatgtaagcaaataatgaaatggaaaaatgatagggactttatttttattttttagcctacttaagtgttagaaaattaaggggggggggggggggggtgtatgacatttttataagttgattcaatataattttagaaattattattcatgagttatggctttatacctgatatcaaaataatatgactatctttagcattttctccaattgaaaaaagagataatgatgtcttatgtgaagataacaaattgatcaatttttaagacaaaagacaacaaactgatcgttatgcttaatacatttgtatgatcaacctatctatctgctcatactatatttcttaaaaactttgattagggacagtagctacctgtattagctaagtgccaaagtcatttctaatcaaagatgggggaattttaaaatagatcttatattagtataacagttcatagtaatagtaagttagtaacctttaaaggaagacatcacgttctgtttacttaaattgactctgtcgtttcttctgttgggaatgtatgctagaaggaatcaaacatacaaattgctatttttctaattagtttcatgtttgccgaatttttcctgctaagctgtgtttctagcctactcaattatcttccatcaattctcccagaataattcaaggattgcatcaaggactaaatattgc

SEQ ID NO: 26549 - DNA, 810 bp, Glycine max
  Intron number 1 from transcript Glyma19g39070.1 (locus Gly ma19g39070) derived from phytozome v7.0 (chr-ID Gm19; pos 45876356 to 45877165 reverse strand)
cggcgcctgctttctttgttcgtgttttgcatcaggtgcgaactcaccctattgatttctatccacagctgatccttcttctctaattaatttattattatttttcatgtattgttctcgcttcactgcttcttatttggctccgtcatttgaaattgttttcttttaattcgagtttcaaattttcaatatctgttactgtgtttatgatttcaatttcatggtggaattattattgctttctacgtgacgttgaatttgtactgtatgtgttgatcttttgttcttaatttgggtcgcatagtgtttgtggcttgtttggtgaagtaacgtagacccgagtgttctaacaaatgatatgttggattctttcattagcatgctttttggaatttttgacctttggaagtcgtatactgttcagcatcactaaatttagtcctccctcaacaaaagaatctggtgtaggatgcatcctatcaaatgaaacaaggtttatgctgaagtacaagaagactgatctgttattttgatgttattgctggacttggttttcttttttccttttatgtgatgtgtgccatgtccatatttgtatttttaccctatcagttgtttggttcgtgtgaaactgtgaatgcttttgttatttcctgttactttggatgtcttcaatttaaggtttttagtcttctggatttcgaaggtgatacatatttacctgtcacggtgaccaattagctgtgatgcattaaacccaattgttttccacattcatctcataaaaactgttgattgtgtttgagcagg

SEQ ID NO: 26550 - DNA, 737 bp, Glycine max
  Intron number 1 from transcript Glyma19g31050.2 (locus Gly ma19g31050) derived from phytozome v7.0 (chr-ID Gm19; pos 38781978 to 38782714 reverse strand)
atttcgcgttgaagataccattaatcttagcagaagtatgttgctcatgttttgatctataatagttggactcctttttttgtgtggtatttattgtttctgttttatgaatttaatataatgtctcatactcccacttcttgtattgttgtgcttgccaattttgtgtatttaaaacagagtcatatccttttcaaatgattgcacttgtttgtaacttgctcctaacataagccttcgattctatttctatcgtttgggggtaatatctctatttctatgaaagatgctactcactttatgtagtattcacactctatcaatcagtactaaggattcttttgtttggcttctgtgccaaattggattgctataccaactgagaaataatatgatattctttccagttcttcctataaactactggtataaatgcttttaacatgagccttcatcttatttctaccttaaaatctttattttctactttttcccgaataaatgtgtgtttcctcaagtacgatccttcaaaagcaagtagaagatgtaggattgttgttggaataaaataactagacgttaaaccacaaatgtttgattttcctcagaaaactgtttatataataaaactgaataaacactgatagaaatgcatgatattagaattgtcatccccctgctggcaccttatcaaacctctatttacccttttgtttttatattatctttcagatccg

SEQ ID NO: 26551 - DNA, 533 bp, Glycine max
  Intron number 1 from transcript Glyma17g20370.1 (locus Gly ma17g20370) derived from phytozome v7.0 (chr-ID Gm17; pos 19285067 to 19285599)
tgaaaatacttgtctttagtcttatccgtcgtgtagtataaatataaagtaatgttttgtttggttgaaagaaaataaggaagatgaaaaggggaataaaagaaaaataatatgaattacatttacatcttacaccttctatggtatattttaattatactttaattcaaattgtcacacacttgcattttgcacagtgatctaaatcaccacatttcactcatcacttcacttcactcgacagttcactgtacttcactccttcgccattttccaaccccaaatttcaaagcacaccaaaactccaaataataataataataatatttacaaaaagaaaaaatgttcctactttttatatacacaatagaggcaaacacacaacaacaacttgttgcaagcttttttgtgttctgcaactgaaagtgaaagaagggaagtagaaaccaaaccaaatcatgtgttctctactttggagttccattgcattgtgtgtagcaatcctactccttcagcttggcattgtgcaccct

SEQ ID NO: 26552 - DNA, 697 bp, Glycine max
  Intron number 1 from transcript Glyma18g38050.1 (locus Gly ma18g38050) derived from phytozome v7.0 (chr-ID Gm18; pos 45299251 to 45299947 reverse strand)
tactaatagatctttataaggtattatacttaaaaaaatatccttttatttttacacattcaatttttaatttttttaatctctacggcgaggattaaaaataattaaaaaatagtatgtataaagatcaagagtctgtttttaagtataaaggctaaaattaaggaaattttttatataattatatgaatcaaatgaataattaaacaattttttttatttctttgaaattgacatgtttgtccgttcgcttttttttatctcttccttataaatatgaattgcattcttcaattgtaaacaaccttgacattatacgaaaacatgaaattgaagatatgttaattaatttgtttcattgctttatatattgctttttcagatatattaaaataagccttacaacccaaatacttgttaatttttgtagatgtagaactcaaataattgaaaagttttgtcaataattttgaaggtcaactatttgaagagttgttttctagtgtgtacagcttgtatttttttcgttgaaattccttttaactagctgtgaacgcatgtctttttttggttttttttggtacgatgtacgtgtgtcttttaattttattctttgttggtacaatgaatgagtgtctttatacttgggtcttataattaacttctacattaaattttatttgttgaaatgatagaa

SEQ ID NO: 26553 - DNA, 639 bp, Glycine max
  Intron number 2 from transcript Glyma17g15000.1 (locus Gly ma17g15000) derived from phytozome v7.0 (chr-ID Gm17; pos 11730465 to 11731103)
agggagagtttccagagttgtatctaaaataactggtaggttttgaactctgccttgtcttttgtggagaaatgtaaaattgtcatcccaattggcttcaaactatcttcaaccaaaccaaagtcaaaccatatttttaaccacacacacacacacacatatatatatacacacatggggtaaactaatcaattgatcaagtgttacttgtttagaaatcagtctctttataaaaaataaagtgttgtgattttactacatatcttttgcaaactttacgaagaaaatattaaatgaaaagtaaatatatttaatgtcttgaaaatttataataaaaacaatacaatatcttctttatctaatgagtaagagcattagttagaaattataaaagatttaattagaattattttcaaaagaataacttcacataagaactaattcctaaatgaatctcaaaagtcaaaagaccaaatggtttgtttataactcattaatataaaaaaaaaagtgtgctattttactaacatatctatgccatgtcatcgaaggaatattcaagaatccattgttaaactaaaatgaattgtcattgtgttacaaaactattacttgcagggttgacagagtacacagttg

SEQ ID NO: 26554 - DNA, 634 bp, Glycine max
  Intron number 2 from transcript Glyma17g37740.1 (locus Gly ma17g37740) derived from phytozome v7.0 (chr-ID Gm17; pos 41466250 to 41466883 reverse strand)
gcaacggtgcctctgttccacggaagctacgttcaggtgcgtgcctttcaaattccaaatccaagcctttaaatgttgttatgcataatatgcactttcctttgtattttctcttttgatgttgattttggattagagttgaagcaatatgtgagaaatcttttttttcccctccttttctttcttcgttgtaataattggactaccggattctgttttgatatatgttttttttaattattgtaatatattttactttcacttaaatattaatttactataattgaccaagtagttttcttctgatgtaactggaaaaaaaaagataatgtttgctaaaaatattatgattttgtttttctatttttaaattgtatagtgacgaaaaaacggggtcgcgaatccatgttacttgattcagaaaagttgaagcatacgatgcatggaatagaatctctcaaaaaggaaagtctaaagaagtccaaagtgagtgttgtaagtaagacatatatctgtgggctgtgtttgccggtttcaaaacttgacccttttgcttggttggttttctaagcattttttttctgtttctaattcaacttttgcttggaattttatgcttttgcagaaacaagga

SEQ ID NO: 26555 - DNA, 684 bp, Glycine max
  Intron number 1 from transcript Glyma18g26140.1 (locus Gly ma18g26140) derived from phytozome v7.0 (chr-ID Gm18; pos 30073960 to 30074643)
gaagtaagtctttttctcatgtcttcaacattcattaactcatcttcttaattgatatatccttttttttttatcagtcttggttgttagtattatgttacaatgttaacagggttggggctttgaatcacgacttcttctctcttcgcccatagagagcttctaaaattttcaaatcaatttaattgtccataatcttaagtcacatagtcttcctaatgctagaactgacttatgtaattgtgaaactaataatcaattaatttgatgaagctattatcaaatttcaagttcaaataagttttgttgtttattcttgattattaaactttataatcattacagtgttgaattcattgtttctactaagaaactttcaatcaattcgttaatatattatgtttgatttctactaagcaatataaaaaaaattaagactaaatcacttatcatgtctaatttaaaaatattcaatacaaatgtctcatctttaaaaatttgtttgataatataaaatgattaaaacaaaaacctaaaattaatcttctgtcttccatctttgattcaacatcaatgggtttgtttacatttatcctaggttatttgaattatattgattcctttatggtttctaattttttatttatttatttacttttacttttgtgtgtatgtgtaatagga

SEQ ID NO: 26556 - DNA, 1024 bp, Glycine max
  Intron number 2 from transcript Glyma18g26140.1 (locus Gly ma18g26140) derived from phytozome v7.0 (chr-ID Gm18; pos 30074834 to 30075857)
atcgttgttcctcgcagaagggtatgcatgtgtcacaaaacctcttcttatttgacatattatgtctggataaagaaaacaaaatgttaagctgcaacaagaactcgatccatttctaattacctaattttgtttattgtgtattttgttttccttgaaaaaccaaggaaaaagtcagtttacaaaattaagaactaaattatcaatatttgtagtctcaatattcaagaacaattaaggattttctttctattattattattatttgaatttccgtacttgtgcttgggattcaatcaggatcgagggtatcccatattaattagatttcaatttctattcagtatatgatttttgatttagttattgtaaaaatctaaaagtttactagctagctatataatatataataataataatttatgtttagaaggactgtaaaagttactatttgcatccatagattatttactctaatgattatttcaagaaacattatagccatctatccgccttattttaatttcatatttttttttttaaaaaaaagaagaagtgaagggcctgaaaagaacatgaaattatcaaagtacgtggtcacgaaaacgaaattcaacatcctaatcatacatgtggggttagacggtgagtgttgaaagcaattttgcctttatctctgattcctccatggatggttggtcccactttataatgggacctcttaagtcctaagtcctaattattaaatgacctccatgatccacgcgtcaaagagcatgagaaattattaacacgagcggtggtagtaacaagttttttatttcttgtgcactaaagattgatgcaacaataaactaaccaaagtattgaaatttttattaaatgaagtaactttgttagataagatttcatgggtagagagacacgtagcgtcaaagataactttatgtaaagcaaagcaagaatgactttggttcttaaattgatgtgtttttgacatttcaggcaaaggtggttgaccagc

SEQ ID NO: 26557 - DNA, 829 bp, Glycine max
  Intron number 1 from transcript Glyma20g37110.1 (locus Gly ma20g37110) derived from phytozome v7.0 (chr-ID Gm20; pos 45069064 to 45069892 reverse strand)
gccacaaggtatcttcttagcattgactttttaaacaaccttctttgattcatttatttaattttattaatggggttctttccttttcttttcctctctctctctctctctctctctctctttgatagaattcctgagattaggcactgtttttctttcaataaaatgaatcagaattgagacgggttgctacttgctattttgacgtcaatcgttacgctgttatttatttgatttcacatattacatcactatgaacacagagaagatgccttgtttatttatttgtatataaattttgtttggatgtgaagtagtggcattaattccattgttctctcgtttaccatcttccatcgcgtactgcttcacttcaagagaccgttaaaataacatgtttttttaggaggaaaagggtttatgacgttaccttttttgtaactctccaactggattttcttatcttgacttaacactataaatgttttgtcaaatgttgtgcagcttattgatggatatttgtttgcctttgagaattgaacgatattaattcattactgcagcacttgtgtgtcgatcttacagtcatccaaattttccacagataaaatgctaagcttagtttgtacttttgcttgatacttgagcaattgagcatcaactaagcatctttattgtcgacatcaaaattgaattcttactactgataatcttttaattctgtttggttcaaattatttgatcttctgtgctatgctgtcaaatatatgtggcttaattatctgatttatctaaccctgtgagtgatctggtcaggtggtagttttgc

SEQ ID NO: 26558 - DNA, 726 bp, Glycine max
  Intron number 1 from transcript Glyma20g21200.1 (locus Gly ma20g21200) derived from phytozome v7.0 (chr-ID Gm20; pos 30313084 to 30313809)
tctgcggcggaagaggtgcaggaatcagctgatatgtacgttccccgattcgtctctttgattcacggttcctgttttggacccctttcagttgtttttcattggcttaatttaatcacaagattaggtaaattccttgttaaagtatgcatcttggggattgtgtcaattgttttggttctggtgttttgcttttcctattgtcgtgtctttcgttgttcctaatttctatttcttctttactcgaatagacttgtatgatcattgagcttcggttttaactttgagtcactcacttgttcaggagcaaaaaaacaaaaataagaaactatttttaaaaattttatagtttttttcctttggcgcttgcaaatggagtttttggtagttgaggggaataatagaaacaaaggaggaataagaagtaagagaatctaaaatatattttttcccttgtatcaaaatttggaactattactgagttagccttttatttgattttattgtgcatgtgaatgatatgcatgccccaacttatatctgggttcaaaatgaatgaagctatttggatggtctgtgcactaccatgccctttgttgacttattcctgatttaggagggagcttggtcagttggtcatgtcttcaatgcactatagtgtgtaagtactatattggactatgtcatatctgtcttacgtaagtttcatgtttctttttatccaga

SEQ ID NO: 26559 - DNA, 839 bp, Glycine max
  Intron number 1 from transcript Glyma19g41230.1 (locus Gly ma19g41230) derived from phytozome v7.0 (chr-ID Gm19; pos 47533551 to 47534389)
aggaaatcacgtgatgtaagtatgatgcagctttaaagttaataaatagttgatgagtttgaactgtgacatgaccacttaatcaaataatgctatgtatcaagtagagaaaagtctacgcaatttcgtaaagcagtcttttcctttcaatttgacccatgaaagcttctggtttaggaagtagataaatgccagcaaatggattgttcaacgaagacaagcatatagatggagtggggtggggcaagtatgttgggttgattaagataattgataaattgaatgactaagcctccacaattagtagccttaaacaaccacttgtgcctccaaatcagtgagtgatgagtgtcatgccctgtcaagaatacaacccaaatctttctttttctgttttggatttgaaaatgccaaactggtgagctaagaggccttgagaaaggagggacagagagcatgatgagtagcatggaggacaattagtctaggatagagggaatcaatttaaggtcatggaaaattataaactaggtcctcttgtgcattttatgctcaaagttgctctctctcttttaccatccttctctgagctctagcttttctcgaaagcttcctttttgggctatatgttcacaaacaccatttcccctgaacacccaattcctgtctaaaacacacttctcaatatctatctctagaatggtaagccactaagtctagtgactagtgactcattcattcagttcaagtgttcaaccttccttctctatctccctttctaacttctccctatgtgtgtatagttgatgattttcaaattcttgtcatacaggctaacc

SEQ ID NO: 26560 - DNA, 951 bp, Glycine max
  Intron number 2 from transcript Glyma17g13800.1 (locus Gly ma17g13800) derived from phytozome v7.0 (chr-ID Gm17; pos 10601221 to 10602171 reverse strand)
gggaggataagaggaagctaattaggtatgatcgtatgatatcaatgtgatagtgatattgtctttttagtcctttgcatagcaaaaggaaaaaagaatctgcagtcttatgttattttagtgtgatatcaaaagttcagggactgaattaaaatttctttctaacatgggtaatttgatcttagaccaatatattatttctttgtgttattagctgattgttagtaaatcattcttaaagtactctgattgaacctgtagacacaaagatggaaaaatatatgcaatatattattattattttttaaatatatgacaaacctgtcacgggtttgatccggaaacaatctttttacatatgcaagggtaaggctggatcgaatgaccttccccatacctttgcatggggaagagagcttctggcattggggtatattagttttactaacataaaagaatattatgcataacgaattctgcaatgcgcagccaatgctcctacaaagtttcacacccttgttcacagctaacaaaaaaacaaaaactatcttcttatttctcttgctatatgttttccaaacccgaggcaatggctgagttagagttagactggaccaactgaatcttgggacctgacagaacctcaatgtatttgtcctgggaaatccataactcatattgaacactttgtatattttatattctgaaagaatcttgtggaaattttagatatatgattattaatgattactcgccaccattgtttgtaacatattattttaatcttttctttatttaattatttttccgtcttaaaaaaagtaaatagttgatttttttgtcttgtgtttgcttatttgatttcttacacctgtgttcaatgatcacttaccgatctgtattttatgatgcacagagtaaatctgggtaaaagtaagatttcaatcttcg

SEQ ID NO: 26561 - DNA, 425 bp, Glycine max
  Intron number 1 from transcript Glyma17g35710.1 (locus Gly ma17g35710) derived from phytozome v7.0 (chr-ID Gm17; pos 39715328 to 39715752)
ggaggatagtacctcgaaactttcctccgcctaggtaagtaataattcgacaaaacttatatacaattctataggcatttttggtgatgttcttccatcagaattgaagtttcactccagaatccatgttgacatttaatgaaaacctttactacatggactactactgaaatgaaactctaattttgatcggagaacaacacaaaaaataactatgggattgtatctaatttttgtcataagtaatttaacaacatatatagaatgtgtaagacaaatgaaccacacgcatgttattaccatttaccacctaggtaagtatgggaaatttgactgtatatatgtatgtggatgtttgtttgatgtttaattaattattttctttgtaggtgggaatttggaggaacagctcttgatcgctcaaa

SEQ ID NO: 26562 - DNA, 880 bp, Glycine max
  Intron number 3 from transcript Glyma18g45200.1 (locus Gly ma18g45200) derived from phytozome v7.0 (chr-ID Gm18; pos 54950918 to 54951797)
tgtttcgagggagtttggaaaatcacttgttccgaagtacggcgagttttgccctttctaaacaaaaattcaatttcggttggttttgttcttgctttgtttaggaatggaatggatttggatctaagtgatgagatgttctcttaggtgttttggcttctgagtaatctaattaggttttgtttggataaacttttgaacaactgcttttaaagaaaacagaataaaaagtaaaatgaatcaaacttctttcataagttagaatctaagccgccgagtgagtgcattactctctgaatgcatttgaatttctaccaagaaagtggatgtttgcttggttgcacttgttctggttatatattgattggtgtggcaattcttctaaagtttcaaatttaactgttgaaaatggcctaatttcttcctattctagagtagagatgattactgttgaatttctaccaagaaagtggatgtttggttggttgcacttgttctggtgctataaattgacacatgcagtatttgatcagtgttgatttagaatctggaaatatgtggttactgatctgcttcattaaatttgataatgttttatattttcaatatgtggttaaacattattgacacttgaaatagtatgaagtatcttttctaactttatcaggtttttggtaaaaaaaaaaaaactattgtcttacttcataacaaaagacaaatcgtcttgaacaataaattctgattttttgttcagtattagttgtgaaaaataaatgccaaagctgacagttatgaagctaagattttttttcttggggtgttttttcaacttgttgatatgacttttcctgatgcttccagaggcaactgtccctttatc

SEQ ID NO: 26563 - DNA, 918 bp, Glycine max
  Intron number 1 from transcript Glyma20g10260.1 (locus Gly ma20g10260) derived from phytozome v7.0 (chr-ID Gm20; pos 14311010 to 14311927 reverse strand)
aatcctgcctcggcgacagcccctacgttcgagttcgttcgttttcctttcttcaatgttggttttttttaattattattattcgaatctttctgttttgttttgcgttaatttgaatgagttattcattgttgcgtgcttgttcatacctctaatttgatgtgtgtaatcaccggattgtgtgattatgaattgcgtggaaaccaccagtgtttgtgggggtggtggattgtattctatgattatgaatcacttggcctatttatgataattgtgattgttgtgtgtttgttggggaattgaaaggttgaacgaacaactgaatttgattttggagtatggaacctcgttgtgtaaccggctattaagaatcgaagagtgaatttgtgcagtagttgttgtaagttaggttgcactttgcggttttgttatcgcgaggatgaggaatttctagatgcaagtgttaagtttaaaaccttttgttgttagtgaggcgggccaatgcttttggtttcaactgtttgaacatggaatcccaaagggtcatagcttaattcttctagggctttttgaatgaaagaatgattttgagtttttgtttttcagttgaatttgtaattctagtaaataaaaactgagtaagttttcttgtggtccttttattgtctggtaatttaaagctaggtaattatttcaatttttttaatcttggcagtataagttcgtcacccactgagcaatttcaaattatcattatatgatcttggtgatttcttatggtgctgtgggagtccatgaatatgcatagtaataattcagatttcagcatgtttcattaaagatgagatagtgggaatccaattggttgtttaattgctttttgttatgtttatctttgggtgcagacaaaagcagagt

SEQ ID NO: 26564 - DNA, 1011 bp, Glycine max
  Intron number 1 from transcript Glyma17g17040.1 (locus Gly ma17g17040) derived from phytozome v7.0 (chr-ID Gm17; pos 13877635 to 13878645 reverse strand)
cagtaaggttcagtgatctctgggatcagaaccaggtcaacatacctcatatttatgtgtaaaagctttcatctttatcatcgtatcgttactcctttattagttcataaatacttgttttaggtatccattatgttgactgagattttattttgggtgaccatgacattagtgcagagtatccaccaatttcactgatgattaatctctaccgaataatctgactgaccaccttagtagggtcttccctcccaatcacagtttttttcatccacaagggacgaggcttgaactccagaccttacttaagggggccgagcttaattaatcgcccattgtggtttgaaatagcttatataaatttgtttgatggttcttaggttgtgtgtatgttcttttctactgcgtgttttaacttgaggtgaagccagccttgggagtggactttctggaaattatgcgttgactttttgagcatgggtgattgattagctaagaatcgccgatgcttctgaatgctagccttattgtgttaaataaaaacttcaaacaccaaaaagggaataaagagaggagatagaagtctaagtattataagtaatatgatacaataagaagagagaaataacaagtggggatagaaagtgtttgactttgataatatataaaattgtctataatttatccctcttttatacaggaaaatgtttgacggacacccaaaatgctattcaacacttagagagagaaaaatataggtatgatagggcttataatgtgataagaagagagagatagagagaaataagagatgttggtggggtgtttatgtatcattactcttttataattttgttttttttagattaactttatatgttgtattcaggtgttgtttcttgtgatttttaaaatttgtcatatttctgtatctcgtttttgtgtcccatgttgtatccatgcttcttgggtgattagtcttaattcttgcagggagtagctgtggtggca

SEQ ID NO: 26565 - DNA, 655 bp, Glycine max
  Intron number 2 from transcript Glyma18g45530.1 (locus Gly ma18g45530) derived from phytozome v7.0 (chr-ID Gm18; pos 55265609 to 55266263)
tgttcaagacttttggaaactgactccaaggtgtacaaggatgtactggattcacttatcaacattgaagaaaccggttatcaactgagtcacaatgagatgttacatttatttctggttagaatttaaatgttttccaattattaaattatataaattattcatagtgaagagcctctgagcaatggggtacgaagtttttatttgtacttatttttctaactattggaaagattaattacgatattgtgatgccatttttataattaaagcaagcccattgcaatatcgttcaaaattctaagttatcaattgttattaattaggtgtttagacatcagtttagctgctaagttgatgcttgttaactccaggatttttaagtgattaatttaatccccttatacttatagaggatcaaactatgtatgtatctgttcactattaattgaaattttacccgtcaattttaactttcatttactcccaagtaatcctatcacctatcactatgcatttgtatctcatttttgcaagcatttaatctttaagcttcaccttttactgataccatgtacatgtgtatttcattgagttttgatataatgttgtattagtaggatttacttgttgctgggattgacacaacatcaaa

SEQ ID NO: 26566 - DNA, 840 bp, Glycine max
  Intron number 2 from transcript Glyma17g38010.1 (locus Gly ma17g38010) derived from phytozome v7.0 (chr-ID Gm17; pos 41731017 to 41731856 reverse strand)
agcttgcttcaggttttcttcttttctttaaaattataattatactgagcttttatgacgactagttgaactttggaaatactgtttgtctttgttttattgcttgcttgtcgagtcataattattacgcttctcgtttgaagctctcaacataaccatggcctcttgtttatttatttatttatttatttttgtttagccctttgtgtttggttatgacgaaattgtatgttttggattttggagcgaatgggaaggatcagtgtgtgtggtaggtggcgtaccttaccctacttgtttgtacttctatttttcacttttaaataaaaaacgaaggtgactaataaatgtattatgagtttatgactagtatgccactatacatatgattattgtaaggcttagatcctcgaaatataatttaaagcatgtgagttgtgacatctccttccttccttttcccttctctccccatatttaaatgtttcaagtctaagtgtgtgtgtgtgtggagggggggtggggtttagtgcttctgctctttccgttgcgaaattcacaacaaggggacactctatcttccctttccttctgtctgtagcattctctgggggcattgggaaaagtggatgttatgagtcccgcgcttgtgtcacgaggctctctcgcctgtttgagttgatgcttactgcttagtcataacattggagctgcagaaagtttgtgtgtgaagtcttttatttcctgaattctgaattaagatattgattctctgttttctgtgctaacttctgtaagctcactttttcttgtttatgtcttcacaggagaaaggttcta

SEQ ID NO: 26567 - DNA, 376 bp, Glycine max
  Intron number 2 from transcript Glyma20g34060.1 (locus Gly ma20g34060) derived from phytozome v7.0 (chr-ID Gm20; pos 42498171 to 42498546)
attgtagctggtccaggaagtggcaaggtattcttctactttagggcccttcttggtccattgcatgttaacattttcttttccctttctgttttttattttcatattggagctgatttttttatttttttttaatttataccagacatcaacgatggtagggcgtgtattgatgctgctcaatgaggtgatgcaaaataattgtgcctaagagatagatactttttacttacttatctttgatccctgtccatctaaacctacctttctgaatcaagtgtttttacctgttaaatgttgttgctcaatatattgtttgtaatttctattttctgctaaatacgagcagggcattagtccatcaaacattcttgca

SEQ ID NO: 26568 - DNA, 618 bp, Glycine max
  Intron number 1 from transcript Glyma19g40850.1 (locus Gly ma19g40850) derived from phytozome v7.0 (chr-ID Gm19; pos 47155569 to 47156186)
actgcttcttttaacaattttctaaatcaggtaatgcagttgctattctttttttcaaaatttctctctcattctcttagatgttttgttcattagttttaattgaactacttattagtttgagaatattttgcattttggtcctctgttatggttaatgagtaactgcaattttattcatccgacaacatttttatcaaatttagtctccttttcttttaattgctacaatatagtctttttgtcagtttctctctgcttgaaactcaaatcttcctctttttttttttttgggggggggggggggggggcggaggtgtaaaatggatttggaataggaaacgatttcaatgattcttattcaagaaattaaggatttgattatataacaattaaaggattaaatttgagcagaaatttgctaaggggccatagtcatgcattaaccggaccaaaatacaattaagcctaaacttaatcttataattgaattatgtttcagttgattatcttatgtttaatttctgttgctcattgaagacagccagaagcatcaccatcagagtatgcaagagctaactaggagctttggaagctaagtggttctattgaccttat

SEQ ID NO: 26569 - DNA, 877 bp, Glycine max
  Intron number 3 from transcript Glyma19g41450.1 (locus Gly ma19g41450) derived from phytozome v7.0 (chr-ID Gm19; pos 47717299 to 47718175)
tatttgccctctactacagtggcttccttcccgaggtacaacaccttttattgcatgtgcacctttgttctttcaacttgaaagttctggtacatgcatttcaaaagcctcaattcataccttgagactcaaaattcttagcagatttgggcataactcatcccgatagctcataaagtgaggattaccccctacttatatacactatttttgaccatatcattagttaacgacgatctccaacacaccttcctcacgctaagaactgatcatcttgaacgtgaaatttgcaagattggacgcatgtgagtggtccgatgatgagtagcttgataggcctaataacaacgcttagcataagttttgataccatattagattttgggcttggaccttactcagccccaaaagttagttgataaaattataattgcattccactaatatacactatttttgccgtaccactggctgctagtcaatgttggatcttcaacccaattcaaatatactaaaattacattggattaaatcatccacctaacgagcaacaaaaacaacaacacaccattgtctgtacagattgaatcagtctagagtttagcacaatccttgttctttagctggccttgggattcgctatgagaccataatcaagttcatcacccacctaatgagccttttatgtaaattaatttgtagctttgctctttttccacctcgaattcctttgttgtggatgcataatcaattggattttggcatgatattttattccaattattttttactatgataaataaattggaacatatcaagagtgcttgtttctagtgaatcttaccttttccaattgttacattgccatgtcttcaga

SEQ ID NO: 26570 - DNA, 917 bp, Glycine max
  Intron number 2 from transcript Glyma17g06610.1 (locus Gly ma17g06610) derived from phytozome v7.0 (chr-ID Gm17; pos 4729547 to 4730463)
ttgctctaagagcagtggtccccaacattaccaaggtacgcaacaaattaaccccaccaccttcgtatatttcgattcctgaaaagagggttaaaaacagctatatatctagccaggagctaccacacacgtattctttgcaattattactttaagtgtgatttgaattcactgtgaaaaaattgatttcgaatgtaactgattttacagaattgattatacaataacatgaaaaaattatattaattttttatattaaatctcaattctaaatatataattatacgattcagatttaatttttttatttttatatgagttattttctctcataaaatatgtcttatgtatataattaaaattaaggctatgtttatataatatgctaatttttgaaattgaaccacattccttataaaacattaaaattaaaatagataataaaagtattaacttaacataagcatcaatttaaagtataaataatattaaggacatgagtgtgaggataatttttttgtgaaagaggataaatactattttctctttttgatatttttttacgttacatttctttttttaatatgatttatcacattattaaggatatgagtgtaaggataaattagacaaaatgtatttaaaattaaataaatatagtaagaacatataatgaaagtattgatacgaggataaattagataaaaatgaactatacttgattttggtagaaggagaaactattgctacttctttcaactgtaacatgattttttttcatcataattgattctataaaaataaccaaacatgcaaacttttggtcaaaattaaatttgatccaactcatcatgtttcaccatgattttgaatgcaatccaaacgtatactaatttgttgatgaccaatgtgcacag

SEQ ID NO: 26571 - DNA, 972 bp, Glycine max
  Intron number 1 from transcript Glyma19g35730.1 (locus Gly ma19g35730) derived from phytozome v7.0 (chr-ID Gm19; pos 43228064 to 43229035 reverse strand)
aatcacctctgaaactcaaatcttgatccattcttgtaagtgcttttcattcacccccttatttgtaggtgcttgatttgtttactttgtttttagcatcactaataaatactcctccattcttcacttggtttttatatcttccctttcaaaaccgtcaagcatagtctcctttcagcaatgccgtcgactcacgttccaataacgttttatttgcgtttcgttatatatggtaactaatgccacttaaaagccacttcttttttctgcatatcttgttcttgttcattgttctcaaaagactttcggattttatttttttgggggtttgatccttgtttcatgttattaaaagaccttccatttttattttattttttcgttttggatttccacaagtcaatctgtgtgcaaattttgctttggtgagtggcgagtctttttttctggcaagaggataatcagaaaaggtgcactttttcaatggatgttgattgagatctcaatctttgctttaaaattattaccgatcctaaagatgaaggaaaaataaagaaacccaacaagccttttggtggttcttgaatcgttcatccccacactattttctgtaaagtgcaaaactttgcgttactcaaagaaaaaggatgagcctgggcttttatctgtttctcatgtatattatatgcttttttattcttatttttttggactcagaagctgcctttcccctgcaactagttcttttatattgccgttgaaaaccgctcgacacttaacataatttttttggacaagaaagataaatatctaaacccacgtaatttaatttaattttttccccatatgtgaattccccttattaatctggatcttcctcttaaaacgttgttgttgccaccttgtttttctctgatcatttaattgctatctaacttgcctcagttttaagtcatcgaaggtagaggaaca

SEQ ID NO: 26572 - DNA, 950 bp, Glycine max
  Intron number 2 from transcript Glyma19g36340.1 (locus Gly ma19g36340) derived from phytozome v7.0 (chr-ID Gm19; pos 43654721 to 43655670)
aggtatgctttatttctgtcacctaatatttatgatgatgcattattagtatggtttatataacactgttctgtttcatgtgcttatgtatggtctggtgagttgataattgggtaggggtatatgttcaatttttcatgttttttcaaagaaaaaatgaatatgcctacttcaactatgactttgacacatgaatcacaaatccatgataaactgatagcttttaagtgtgtgtttagtttggttcattttgaatatagaatcacttgccaacttcctgagagagtttttggaatataagagattgtttccttagaaacaattgttttcgtacatgctcttatacctaccttgatttaatgcctgtttggttatgcatcgaaaggagaagatatgcggtactttgatgtattttcaagtagcttctgtgtcctctttgaagagttgacgccaattcatagttgaatgtgcataatcaaagccaatccaaacacgcacttactctctgtccaggtgggaattggtgaaaagaccccccttatgggagtttgagtagtttagccattttgaaatttggacctcggtttagaattttaatatcaatgtagcaatggtagaaagcagagcggaatgagaaaatgtgacaaaaagtcaagcgggagaacttaaaatttgagtgtgttttgtttctgaatatttctgataagttaattaatatcgtgcaaataggataccaaatacatttatacttactagttgtaacagcttaggtgaccggcttgagtctattgacagattctagttgctatcatatgaactagttagagtactttaataagccaaatttgtgatttcatcgtaaccatgaacatatttcattttatgttgagtattgacaattgttccttatgttatcctgtgcttggcaggatatcagaaaagagcttgga

SEQ ID NO: 26573 - DNA, 601 bp, Glycine max
  Intron number 1 from transcript Glyma19g06080.1 (locus Gly ma19g06080) derived from phytozome v7.0 (chr-ID Gm19; pos 6783806 to 6784406)
acgttgtcttcaacttggttctgcctcgagtaaaggtttttccacaattcaacacacaaacagaacacatatatcatatatgtgtgtgtttgtgtttttaatttatttatggtttatttgatttcaaacgtggtcaatttcatcaaagtttcaatctttagcttatgggtactaatggattctggtcatagtgacatttgcaaagtagaaagaatgtaaaattttaacatacatttatagttttacctttttattttcgtaaattggatgctagctctgcattgtggacttactttcatgggtgatgcaacagcttcagttattgcaattgcaaggcttattaacgttttaaaaccattgtacactttttatttcttaaggtggtgtttaaactgttaaacaggttaatattaggtttcagtttggtcgtcagtagtggaacttttaagagctgtttttgttatgtgaatatacttgacaagcaattttatggaagaaaactaatttgtgatttacatttacataatggttttgatggactcttattttttaagattgttcttaaaacatgttatgttgtgtttcagattgattgtcagtg

SEQ ID NO: 26574 - DNA, 747 bp, Glycine max
  Intron number 2 from transcript Glyma19g33880.1 (locus Gly ma19g33880) derived from phytozome v7.0 (chr-ID Gm19; pos 41506668 to 41507414 reverse strand)
cgcggtcatccttgagcttcttgccattgaagtaactaagttttgctatttcctttctctctaactattttaattatatgaaattgtaactatagtgttggctttagatttatcgatcaaaaggtttcagttcaagccagatgaattatccattgatagatagtcgtgcatgtgtgtaggtgtggaaacttacctgcaaattagataattctaaactacaatgttttagaccctaaatgaatattagtaaataataatttagaatgacttgtcaatcaagatcaacgtttagttttcaactggtggctattgaatatataaggggcgaaggaattggaattgctcatttgttgtgcttgtgccctattgttcttgacaagttcaaagcacccaaggttcctctgaattgtgtttattattcacctgctcaaggagcagctgccatcacagtctttaacagatgcatgttgtaaagaatgtggctgtatggggttaactgctcaatcatactacatacacataataacaatgttgaatttctatgtgcattccatttgatcttctttagcagtatatcagtgtggtccttgtttccaggaaaatgattatgttttttttatagttttaatgcatttctctttttctttgtttcagactattttataaatcatgaagcatcttaactctgattttatttttgctttatctttatcatgaaacagaaagagtatcagcaactcgttgtgg

SEQ ID NO: 26575 - DNA, 603 bp, Glycine max
  Intron number 1 from transcript Glyma19g27280.2 (locus Gly ma19g27280) derived from phytozome v7.0 (chr-ID Gm19; pos 34557402 to 34558004 reverse strand)
gccttgctgctatagctgcaaattgcaggtgagaatgagttgtttgttcggttcaatcttacgttgtttggtttatgggttttgtttgtgcaattttgatggttgtgttttggaggttgtatggttgaaggtatatggttttgtctttgtcttcttgtgctgccaaagtttgaaggtttttatttttggatgttttgaagttgattattggattgtactctgtagctgccagtttgggaataggagtttaattagttgggcaaagcggttgaatgaatggcctttgaacttggattttggtagatgtcaaggtttgtgggcaatctagagctcaagagggtcttgagagcttgatctgtgttattactttagtttatagtcaatttgtgaactgttcatgattaggagtttttccttgaggcagtttcatgcttcaacattgtatcttgtttttatgtgttaaggatgaatgatgttgatgattctattctgctgattgagaatggcgtgtaggatgttcggtatgtgttcttgactctcgatgttgattgtgtttaattgttttgaaatgtaggttccttagggagctggatctgcaagaaa

SEQ ID NO: 26576 - DNA, 738 bp, Glycine max
  Intron number 1 from transcript Glyma20g31830.1 (locus Gly ma20g31830) derived from phytozome v7.0 (chr-ID Gm20; pos 40435871 to 40436608)
cctcttccaacaatacatcttctgcctactgctaggtactccctttgattttccctttttcattttccatttgttctcttaaagttttcatttttactctgattcttaatcacccacatcattgtttgttctacctgagctatttgcactgcaggcccccactttcttcaatcttcagcttgttgatacaaacgatgatcgtgttttattcggtgtcggagcggaaaatgttatttttatttaagaaaaaatcaaggggggagggggagggggagggggggggggggtgattgaaattattcatctgcgtctacccaatttgtttttttttttaagtagactcttccacaacattttgggtttgttttgttggcttccttgtgttgttaagggtgtttctttattttgatatactaaccgtattgatttgtgattcatgcaacattgttgttatacttgttaaatattattgaaattttacctgacatttgatatggctttccatatgcttggtttttgtagaaataatgatacagtctatccttgataaagtttaaaaatagtttaggcggtttttgacaagataagattacaatagcaattatgcaatgtaatcgtaggtgttaggtaaaattttaaaagctgtggtttacttgtcttcccagtatttatgtaaacaaatgaaccttaaattgtagttaaataattctaagaaaggatgtttgagatgtaggtgaa

SEQ ID NO: 26577 - DNA, 1029 bp, Glycine max
  Intron number 1 from transcript Glyma17g29540.1 (locus Gly ma17g29540) derived from phytozome v7.0 (chr-ID Gm17; pos 32215966 to 32216994)
atcgtactgttccgttatcaattctcgtgtttaaggtttggttcccttggaccctgtatttttcaatgtactttgatcacttttttctttcgaagtttttctctttttttgcttcttcttttttgggtctttgattgtttgctgggtccgcttcaatttatgtcttcttagctgtttgtgtgtgtttttttttgccagtttttccatccctttggaataccctttattttggattggtcaacttgctcatttttgtattaataatgaaaattgggttctctattttctttttctttgagaaaaaaatttggatgttagatgaagggtttaagctgatgttagatgaaaattggcgtccttaatgatcactaaacgatgtataagctgatgtcattgtcttgttcctcgtgagtcctattggttttattaactttgctaaggaaatgttggttgattcccctggattagttagctgaggtggcaggtggttagcattttagtcaaataatttgcttgatgcaaagggatatttaggaggccggggtgcttggaaagagggggttgggaatgttggatttgttttgtatgaagcagggcagactgctatgtttgtctcaaagctctgtttttagttggataaaatcactctaaaccagaattttattcttggttcctattaaagatcaatgttagctgagctacacgcatcgtgcaatttactgaataattttatatcaagacgatttatttttttacaatggcaaatcagaatctagtgtgcaacgtgtcttcagcataataattgtgtctttaggaaaatatatgtgaaaaaaaacacaaatagttagttatacttatgtcagtttgtgttcagtcaaaaaaaaaaaaaaacttctatcagtttgtgttttcctttccctccttttgtctgttttatccgtaaagaaaccctattttacaattttgttgattttttccctcactctctctgtagtctgcctacgttccgcttcctttgccatcagagca

SEQ ID NO: 26578 - DNA, 506 bp, Glycine max
  Intron number 1 from transcript Glyma19g02050.1 (locus Gly ma19g02050) derived from phytozome v7.0 (chr-ID Gm19; pos 1769798 to 1770303)
gtgtgctatttataaacgcagctaaaccattgtcatcattcacacagtggatgaataaagagaacctcagtcaaagaccctgatccaatcagaaagtccagtcaaaccagctcttttcaatcaccaaatccccactgtacacacctccaaaaaccaaaaaccaacaataatttcttctttttttttttttttttcttttttctcttgattaaagttaacaccccacccacaacaaaattccaccttcaattaacttcctctcacattctctgcacttttatctccacatttcctcgcaccccccacaagtcaatggcaccaccttcccaacaacagggctagacccaaacccaaaccccaccttaaaaatcaaacctttcacaccccccacaacccgttttcccttccatggatcgcagcaacaccttttcctcctcgctccttctgttgagcttgttggggttccacctcttctttgtttcgtcgcaggtcgaagacgacgtgac

SEQ ID NO: 26579 - DNA, 556 bp, Glycine max
  Intron number 1 from transcript Glyma20g19000.1 (locus Gly ma20g19000) derived from phytozome v7.0 (chr-ID Gm20; pos 26706014 to 26706569 reverse strand)
aacagcctgagtataacctcttgtccaggcacaaggtttttgcttagctataaatgctattaacattttatcattgctatgagaaatcctagtaatgtgtttttgtgtaggcacatggtatttgttcgctggaggagtgttagtaccacattctcttacgcacttgttgattcttgatatgattgtgttgaaaacggtgtatttgataatggatgctagctagcatttctgttatttgttccctttctttctgtctcttttattcggttttggtctttgaattggacaaatcttagatgcagctcgttaagaagcttttggtactgttttctaattaagaattgaagtttcaccttgagaatctgtgtgagccttttattattctaatgggataataaaaacaaaagcacacttgaagaactacatttatgttttgtgtattccatgcctttttttttttttaatttggttttggagttttcacctgattggactttttatttgacttgataatgttgcaggttgagtctgagtttcttcctctgtacaccaacta

SEQ ID NO: 26580 - DNA, 517 bp, Glycine max
  Intron number 1 from transcript Glyma20g34750.1 (locus Gly ma20g34750) derived from phytozome v7.0 (chr-ID Gm20; pos 43080594 to 43081110 reverse strand)
ttggtatgtatgttttaggggttttcatttaatttgctctaccactattacaaaccctgtaatggatgcacttatcaacaacgttactaattttgtttttttctcctctccgtactgtacttttatgtgacaaagaaaaattcacacttttcctatattcttagagtttgcttgattttttatgctatatttggttggacgagaagaaagtgagagaggaatgcaaaattttatgaaaaaaatttcaaaacttagataaattttagacgataaattaattgttgaaaaactgggattttagaaccaagaatgaaatcaaaccaccttttagatattatttttaaccagtgtataccatttgccttcttttattaaggtggttataataattgatgtgaagagttggatcaacataaagacggtcgagcattaatgcattatgttaggttgagcattaatgcattatgtcaggtaatgtttttttttttactcatgtgtttgcattgcagcaaggcaa

SEQ ID NO: 26581 - DNA, 711 bp, Glycine max
  Intron number 2 from transcript Glyma17g14600.2 (locus Gly ma17g14600) derived from phytozome v7.0 (chr-ID Gm17; pos 11345554 to 11346264)
gtgcaaggtccctacaagtacctacaggtaacaatctgataccaataccatgatccagatgctaatatgaggactgtaaatttgtttagtggcttagcatcttataatccttgtgtctatcaaagtagtatcaattgattagtttcatgagtgcaattttggcatcatcaatttctttctagaaactcaatttacaacctgaggtgctcataatattgtttgatatgtaatccttatttatgttgctatttatgttgcaattgtctcttgtgctatggtaactcctggtatgacctgtcgtttcattttatgccaaggattaactcttccaaagcttaaggtggagacaatgtatgattccactttaccttttgctgatatttgatttaattatgatgaatgatggtggaagggatcacattcctgtagtcatttaggttctaatactatgtcaataacttcctctcccaaaattttaagttgttaggtggaagtacttgagtggttttatatctttaatacatgacattattttttactctgcttctgttatttataactttatgtttttgtggttctctctcattttctctatctatctgccttaatccttttccctctgcctcagcttgtttattctatttctgcttgacatgtattttttttctttttctaggacttacctttggcagtaagacaattagcaacaat

SEQ ID NO: 26582 - DNA, 386 bp, Glycine max
  Intron number 3 from transcript Glyma17g14600.2 (locus Gly ma17g14600) derived from phytozome v7.0 (chr-ID Gm17; pos 11346337 to 11346722)
aagcaaaatcaccctgctaaaaacatcggttcaaggtgatgattaattagaataattttttgtttttatagttaaagagacgttttttttcttgggtgggagaagtagaatgacagtatgaattgccatttattttgaaatgcaacattttattgcattgttctacattatctctgtttgctcgaagcggtgcattaatttaagtgctcactaacttggatgggcattttattcattatgaagtcatattcttttaataagtacagctatgggagtattattactgtatatctttgattttatttttttctgtttctggaaaaaacccatacaaccttatatctgcaactcttcctttctcagatttcagaagctacgaactcaga

SEQ ID NO: 26583 - DNA, 670 bp, Glycine max
  Intron number 4 from transcript Glyma17g14600.2 (locus Gly ma17g14600) derived from phytozome v7.0 (chr-ID Gm17; pos 11346771 to 11347440)
agcggcaaaaattagagagtggtctcttgtgtaaggtttgcaagttgttttagcctttcttctctgatattacaatacttgaacttgaagaaagttcatatttggcttctagaagtatataccagaaattgatcataaagttgaatatgtaatggtgtgaaattttatgcagttccttgtaagttacaaatgatgcatcttttgaaaaatttcctacaatcattacatttgtgtgtatcagaattgctctaaggaacttatgagtgcttagttgatatttttcatgggtaacagtaaaatacactagaagaattacattatgatgtgtttgagagttgggttttggaggaaaaggaaagggaggacaagtttttcatttccaataaatattctctaaacaaaatgatagactagcataaacttatgccataatcttttgttttttttttttacgtacattacataacttccttaattaaaaattaaaatttttgtcctcccttccctttccctcccaaaatgttactcccaaatgtaccattagtctccaatgtttgggtggtaaacatggaccgggaattcaaatggaacttgagtaatgttgacatcacatttattgtagacagggcatttgaaatgattaatgtattgcctccatgacaggtttctg

SEQ ID NO: 26584 - DNA, 919 bp, Glycine max
  Intron number 1 from transcript Glyma18g09750.1 (locus Gly ma18g09750) derived from phytozome v7.0 (chr-ID Gm18; pos 8623644 to 8624562)
gtattcacggtgagaggtgagttgtatgggctgttttggtttggaatatatggaaacagaggaactctaacaggaagaggtagataatgactcacctagaggattatgttttttagtgtattctgttaggttcttagtgctgaggggcagctctgttagaatcatagtgctggggtagtttttgttatggcatgatagcataagtgctttccgttatcgcttttgtattttgggacgtggtgtttgtctggtagcttgttgcaatcatgttataaatatcatcgtctccatgcaagaaaggaataaaaaaagaaatttcttctccctttctctcttctaaggaggcattcctggacctcgaatcccaggaggttcactgtgtgaacctaacaaactcgatcgtctttaggggagcaacatttatttgacactcaagttgtgttaaaggacaccatcttttactccggatcatggttaaaaggtatttaaagagtttttccctactcttttcagcaatggcagggtcgacccaaggctaaggccatccaaactcttgttttaggccactaaaaaataatttttttactattaatatatgtatattaaacatatgcactatcaaggaccacgaactgttatacgtgaagttctgtcgtgacatgcgtgtggaaggtatcaaatattttaaaataaaatatgaataattttattaaatattttaataatttagaaaaaactccatttttttttgtcaacaaaaaaatcccatttcgaagtttggtttaggcttactaatatgttgggcccggccctgaggataagcaacctgatgatcctcgatgtgcagctttactatgtgaggctgttgccttcatcaaaactcaaatccttctccttcaaagtgcctataagattcagg

SEQ ID NO: 26585 - DNA, 601 bp, Glycine max; identical to SEQ ID NO: 19304
  Intron number 1 from transcript Glyma19g01650.1 (locus Gly ma19g01650) derived from phytozome v7.0 (chr-ID Gm19; pos 1260444 to 1261044 reverse strand)

SEQ ID NO: 26586 - DNA, 685 bp, Glycine max
  Intron number 1 from transcript Glyma19g41950.1 (locus Gly ma19g41950) derived from phytozome v7.0 (chr-ID Gm19; pos 48076927 to 48077611)
gaccacttttcgaactgccacacttggtaagtaacaccatgacatactttgtttcattagaactctatactataatttatcatgattattttttgtttgtggttaactaattgatgacatcatttagtagggtatataaccattaaaaaaatgtatataccaaggggaaaaaaaattaatcattagacatacccctttgatatatatttcatttaatggaaatcaaatattatgcttgtacattatacatcaatattcgatattaatattaatgaggaatttgattcttctaaattgaatatatatagttaatttcagcaacttcatgcattaactaagaaaacaattgatgttttaatatggttatagtttgtcataaatatgcatgtaatatcaaattatcaaattgtgattaattggttgagatcataaatgatatgatagtctcaaataattcctcactttagaggaattagatcaattaatgagatggtttgattttatgatgcattatattattaaaatagttctataattgccactttgcatattttcatttattctgtatgaattgaaacaagtctaatgattaaaaaaaaaaattgcgttagtgtgtatgaatattggttgacaatttgcaatttaatgtgtagctgtatccggaaagggtttcattgcaaaggac

SEQ ID NO: 26587 - DNA, 862 bp, Glycine max
  Intron number 3 from transcript Glyma17g34650.1 (locus Gly ma17g34650) derived from phytozome v7.0 (chr-ID Gm17; pos 38638792 to 38639653)
aatttgtgccactgcccccaaaggacctgaccctggtacgcttcatctttatcttattcttttatgcttcttcccagaaaccatcaacttcttcaaaatgccatgatttatctatataagcatgctctggtgccatagctaatgattctagaatttgggactgtttctcagtatgttgtgaccctagcgtgcttatttagtagacaatgctaggagtatgatttctacccagcttattcttatcactgcttatatgggtttgactagctagggaagtgagcaaatcatttcctccacagtcaaaatgtttgcagcactgcattgaagagcattttgcaacagctctgcatctaagagctttctgccatagctctttatatttttttctgatttctgtttgaatcaaacctaggtgtgactcggcgtgtttcattatttctcgaatgtctcaacagtattggcttattctgcatacccaaactaagaaatagggagtcatacaacagcacaaatttatttaatatactagatgaaatcaagatattatttttcttttccaagtattgatcataagttatgaatggcatatggcagaaggctggagttccgccatataaacacgccgttgcagcctattgccgccataacaggcctccctccataaatgcctatggggtggaggggttgatagggcatgtgctttcttgctcttttttttttttttttttctgtaggtctcttagtcttagattgatagggcattttaaaatgtcgagaaattgaattgccttcatatataaaatttttggtgacattgtctcctgcatttgtttctgcagatctggttgccattgcagaaaga

SEQ ID NO: 26588 - DNA, 879 bp, Glycine max
  Intron number 1 from transcript Glyma18g47660.1 (locus Gly ma18g47660) derived from phytozome v7.0 (chr-ID Gm18; pos 57263618 to 57264496 reverse strand)
gcgattcccgtgtctcgagagcacttacctcaaggtcctttgctttttcttcttcttctttgaaatgatatgcttttgtttttgttccgatcacgcgcgttttcgtgatcctgtttatcgccgatgatcaacgatggatgatcgtcgtgcttattttgctttcatattttgttgctctgaggtctgattttgtgattccgagatctgagattgctttgtttcagtttcttctatgtctgttttttttttttttgcgtaagggactaacttgcaattttttttttaaattggtttccactgtgcttgtttgtgtgttgatgatttcttaactgctttgggaatgttctgtgttcatgtttgttcatgcaattttgttgttctgctttttgactggacaataaaaactactttttcctagttctctaaaattcaaattaataatgaatataaactttcctgatttcgtttttcaattttaggtttagatactgtggattactttcgtgataaattgttattactgaagtgatcactttaataatcgttaatctaggtgcaatctatggaaatttttttaatgagtattttacagtttaaaccgttttcaccaggttttttttttaaagaacctggagtatagagaccatggcaacgttggaaaagccttgggctcatagcaaaacggattttcaatgtggtttggacaaaaatatcaaactgaagaaaatgtccttgaaagttgaaatttcatacatattcataagtcaaagccaagtttgtattacactgagataaataaagtgagaaatagaagtctaaattaaaatgatgtctctttttgagagattgacttgttcatatgatgttgtttcagatgca

SEQ ID NO: 26589 - DNA, 834 bp, Glycine max
  Intron number 5 from transcript Glyma20g37420.1 (locus Gly ma20g37420) derived from phytozome v7.0 (chr-ID Gm20; pos 45322601 to 45323434 reverse strand)
ataggtgcatagttgcagatattatttcttttttatgcagcttgtgtatttttgtgcatgttcatactgtacgccatgatttattccattccacaagaatcctgaattagaccgtatcttctgttccattatactttggaaagtttgcttctatagtagtccttgtctgtgattccagtttggatgttttatctaggtgattgtacttggatgcaatatacagtttaaagagacaagtctatcctggtaattcatttcatcaagtaaaaaacaaaaccttcacgaaattgtccagcagttctttttccccccaacctgataatgtaatttcagccttcaagtatttaagtttaccttgttaaaatgaaaacaatagttattataaaaatgaaaagaagttttaagaatattgtacagtaccacagtatataccagaggatttggcctaaagtgcggttgcaatatggtataaaattttgagattcttgttaaactgttgaagccattcagcttgtagttgttatcaaatgagcacagatgttttgaagggtatcataccttattaagctgttggaactgttgatctcgtaattattagcaaacacttgatgcttcttataatcttgtatgacaaacattggatcctagcataatttgtagtgcagtaaagaatttgtttactattcagtattcacttgcccaactgcaatgcactggtatttttggctgtggttttgtattcacctgatgctttctgattcatggctttatgcttcctgaactctcttttttcatgcagtttgagaactacattgtgtgttcgatttaagagtg

SEQ ID NO: 26590 - DNA, 1026 bp, Glycine max
  Intron number 1 from transcript Glyma20g37420.1 (locus Gly ma20g37420) derived from phytozome v7.0 (chr-ID Gm20; pos 45324387 to 45325412 reverse strand)
ctgctcctccctgtttgatttcaaggtatttgcccgaatcttctttctcgaaggtcagtctaaacacccttttagtttgattccaaggtaattgccccgattcaattaaaccctaaaaaggacccacgacgataaccttccaactccggcaattgccgtctccggggaataccactttctttgtttttttgttttattctttaaatgtcgtgttttctgattttctctgctttattcctctttctttttagatttttgttaagggaaacgcttatcattacgaattcgtcgacacacgaacatgtatacaactgcaaccttttgatttccgcaaaaaacttgttttttttttaaattaaattatatttcaaccaataacatttaaacacgtgatttcgtgcacggctcatgcggaaaactttcgtaacatatagcaatgctcttttgttaattgttatttttttttgttgctagagttctgaattctgaatctgtgaccatgttttaaatcataatcctattgttttttttttttttttgtatacaagtgcattttaatttcttttcgacccctgatctgagcttttagttaccatgggatgccattaccaatgagttttctccattagttaaacagaattggacttgcagtccaaaattaacatttcaattatgaatccatcacaacgagttagttcagaatattgaatatattgagggagatgatgatgtggtacaagttcagaatattgtgttagttttggacttgtttttatgcgtagttcgtatttttatctaattttgcatgttactggtttaaaagtatatactagtttttatcaccgattggccatggtgaactgggcactcgtctaacaaccagtccagttttaaaaacattactgtaatagtgtaatgctcccatcctgttataatatcttgattcacttttaagttttggcaacagagttttgaaatttcatgaccaaaactgtgccctcttatgttagggtaaaggataaaggg

SEQ ID NO: 26591 - DNA, 556 bp, Glycine max
  Intron number 2 from transcript Glyma18g36490.1 (locus Gly ma18g36490) derived from phytozome v7.0 (chr-ID Gm18; pos 42833553 to 42834108 reverse strand)
ctgaggtaaatgaatttgtcatagaagtttcttttctatttgtgtgctttttctcttttaactgctcaatgttattgctttagaggtgttaaataaatggaatattatggtctatgttgttcatatcctgttaaatgttgatttatctgccagaagtgcagtttctattttaccttaattgaggaatattaatcatgcaaagtgcatctaaaacattgtctggagtggcattttgtagcttcttcctcaataatttacatgatttttctttctttgaagtattctttatcttttcaatagagatcccgatatttgattattattgatgttcattacagagattcagtaaatgcgctattaaaggattgttcgtctaaattgccattctttgatgtttgaaaccttttttccctacaacttctggcaaaaattaaaatatgtatttttctagacatgttgtacaaaagaaatatttttagacttgcagtatattaaaggctggtgatgttttcatgctgcaggtttctgaaagccaaaaagttcgacattgataaaa

SEQ ID NO: 26592 - DNA, 544 bp, Glycine max
  Intron number 1 from transcript Glyma17g14180.1 (locus Gly ma17g14180) derived from phytozome v7.0 (chr-ID Gm17; pos 10949499 to 10950042 reverse strand)
accgacaagaacttgacaacttcgtacatttttttccccactctcatctcctttttgtccttatattcctatttgtaattataaaaataataactgagactctaatttcgttttaaaaagatatatgagcaaatcgtgtttatatatatattcactgatcaattttttaaaattttagaaactatttttatatttaaacaaagatttatccgtttgcaagcatcgaactcattttacaagaacatgaatttgaattccttatccaaaattttattaaaaataccgtgtataaaaagtaatttatgagttaattttatataattaagaaatactccaagaattaaacgtgatattataaaaatattattacttagaatgttgccaattatctcggtacgttttgatttttagcttcaattcttcagaatttatttgtttatgccaacaaaatgcaataatgaaataaaagttaacgaattgatgtgaattttatgattattgtgacaatttaattattactgcaggcacaatatttgattgtgtt

SEQ ID NO: 26593 - DNA, 367 bp, Glycine max
  Intron number 1 from transcript Glyma20g03950.1 (locus Gly ma20g03950) derived from phytozome v7.0 (chr-ID Gm20; pos 3900656 to 3901022 reverse strand)
gttctgcctaaggaaactgactctactatatattggtgggtttcttttgctttgcttgttagggtgtgtttggataagattatccaaaagcatttccgggagaagaaaataaggggaaaaaaatgaaatgagtttctccataattaaaatcaaagtatttatttctggagaagaaaataaggagaaatttatttcattttttcttattttcttctcctaaaggtatttctggagaagtttatccaaagagacccttaagcatgcttaatggggatttgggttgttttcatatggttggttgattcagttggtaattggttattccagtgcaggtcagaggaggagctctcagagctacaaggttagt

SEQ ID NO: 26594 - DNA, 388 bp, Glycine max
  Intron number 1 from transcript Glyma18g44860.1 (locus Gly ma18g44860) derived from phytozome v7.0 (chr-ID Gm18; pos 54585060 to 54585447)
tttcattccgttcattgctctttccagattctatttgtaagtattcttatcaataatttcaattctttttctttcttcaaattatcctcaaatttgtgatttttttatatgctagatttaagatttcatgatgcccatcgtttctaatcgcaaactgtaagatttttgtgtgtgtttgtgtttacgttatgatgaattttgattgaatgtgaatctgggtcttggatcctgaagttggcattgaattgcatttgggggtcagagttgactaaacattggattttaatcattttatgttttggggtggcatgtttgaaatctaaacatgaaatttctgtttttgtgtgtgagtagtgcctcttagaagttggaatagagaactagagct

SEQ ID NO: 26595 - DNA, 1007 bp, Glycine max
  Intron number 2 from transcript Glyma19g00200.4 (locus Gly ma19g00200) derived from phytozome v7.0 (chr-ID Gm19; pos 19062 to 20068 reverse strand)
gcttggagaaatcgtcaccactatccccaccatcggtaattttcactctcctcactattattactccttagttttcctttttaatatatgttctcacacctttattgttgcctttcaaaaataaataaaaaacacctttattgcactttttgttttctaattctcttactttgaattataattataattatgtggtaatataataatagttgtagttattataattataattcaaacgtgcgaactaagactcgaatgaatatcagccaggagagctgcacacatttagtgtgtgacggtgtctggaacaggattgcctcgaaaggaagatacatgcggcaaaaaaaaatataattatgtacatcacacacctgtaaatttttattcagactagcgtattgttaatgattttgttaatatatatgaaaatttgaacttgttacataaattgatggatccccctaccaagggggtctagctccgttggttgagcaaggtgtgtgagtattgtaaatttcatgttactactgaattcaattcttacggataaaagaaattgatgaatcccctgggggcgataattgtgttgttatttttcattatggaaattataagggatgttacaaaatagaagttcacgcctaaggaatacatgtgcgtgaaagacaggttgtttctttctaataacatttttagtaattgtggcaattcagagaaggtggaagtttatgctatatgcttataggagtcaattttgaattattggtatatagattcaatggtgggatcaacagaatttacattctattctataaaaaattatttcacaaattccaagtgatccgcattattgaattatttttttcacttattaatttatatactttgatattattactgacggtggaaatttaaatgttgggaattgggtttgataaagcagaatgtcctcttatggttgtacatgtataaattaatgagagtcgcttttttctctgcaggattta

SEQ ID NO: 26596 - DNA, 844 bp, Glycine max
  Intron number 3 from transcript Glyma17g36020.1 (locus Gly ma17g36020) derived from phytozome v7.0 (chr-ID Gm17; pos 40011978 to 40012821 reverse strand)
agtgtcttgtgagaagtagttgcaatgatggagtttcatgctgctcagtatcaaatattctggatcatataattacgtaatgtttttttctagttttaattcaagcataattgaaataaatgattgtctataaactattatcaatttttttaaaaaaaaaaattatttggttaaaattctttacacattgcaacatcaagcaaaagcagattggtcttgactattgctccttgtgaataacaatataaatgctgaacccttaccgtatattttttgtcttctaagtatgtctaataactttttcctagacagataatataaattgcaaagttgactaagtctttcaatgttcaaaacaattagaagagtaagaacgtgtcaagggttaggtctccaaaagtttaagtttttaggttaaaattgttaggtttgaatgaagctgcacagggcttacatatttttttatttgaaggctagggatggcaagaataaaatagtcttcacttggttaaagaggctacaatatgatgtcatgaatcaattctccctaaagcttaagcttctacgtggaggcttctgaatggtttatattcctaacaagtaacaagaagaatattatgagtgtgtatgtcttaagttgcctttctgatttttatattttacttgctctcctaacaattgatatgctttgcagctctaatgaagggtgcattcaggtggcatcagaggttaatcatacacccttggaaaacatggtaattgatatgtttggattggatactaaatctgatccttttgagtcaaaacagggaaagaaagtaaaaagaagacaaaggcagaggaa

SEQ ID NO: 26597 - DNA, 440 bp, Glycine max
  Intron number 2 from transcript Glyma17g33590.1 (locus Gly ma17g33590) derived from phytozome v7.0 (chr-ID Gm17; pos 37497571 to 37498010 reverse strand)
cttcctttcttcgaccttagcgcatcgatgtttatgactaacgctttatgattaatgtttaagaacagtgaaatgtgcataattttatgaattagggttttgagtgtgattaggctagtgatcctctcataaactcttcattttgttcttgtttctacccattattttgcactgtttgtgattaatttgtgcttgctgtttattctagtaggagccaaggactaaacgtgggagttacaatgaatggggtaagcaaccagtcagtttcccgagtgaattagggttttgaattgaattgatttgatttcgacatcaaagggaacagggatgaggtatagaagaactcatagaatagcagtggaagggtgtttgtgtcactcatggcattcatcatcgatatggcggaggaggaatacagtgaacaacgagacattgtcgag

SEQ ID NO: 26598 - DNA, 749 bp, Glycine max
  Intron number 1 from transcript Glyma18g07700.1 (locus Gly ma18g07700) derived from phytozome v7.0 (chr-ID Gm18; pos 6457032 to 6457780)
ataatcgtatgttacttatgctttgttttttgatgcaattaacttcttttccaacacagattaagaaacaagataattatcccaactaagaaacaagataagtatccaatgtaatatttgtagttctacatgccaggtgaattcatcatttggaatactatctattgttgaaaccctaaaatggtagtgactcaatacaaattgtgtcctaaaatggttttgtagatgaaccagccatgaatgatatgacatatgactttttacatattacattgtcaggttcatactttggttgaagaactaaataatattttacaacgtaagtaaccaagtctattttattattgttttcttgactaatcaaggcttttattcagttcataccttctagttgggaagtaacaagtagttgattcttgatcatatgcatatactgacaagcatttgtctatatgtcttgaatcatagatcaaatcaagtaattgctatattctagtcttgacacttacattcatctaattcttggttgcatttggtatgtctaaatgttttcaactgctaattttcgttgtatttcgctaatacggggaatcacataatcttgttatgcaaatttaaggtagatcctttgcaataatgttatgagtcttttcagctttaaagtcctaatattggttgactattgtttgcatacaagagaaagatgaaaaatgaattatactctaatttaaaattcattggtgcagacc

SEQ ID NO: 26599 - DNA, 941 bp, Glycine max
  Intron number 3 from transcript Glyma20g36590.2 (locus Gly ma20g36590) derived from phytozome v7.0 (chr-ID Gm20; pos 44657407 to 44658347 reverse strand)
catcagttgtaagaaattttgtgttttacttatgctttcttaaaaatatttataataaagctttatagtggcacatttgattttgtgtaaaaaatatctcacagcaaatgatctccaataataatgaacatagaatgtgcagaatcatgtcctgatctggcattgttaactgcaatgaaatgttcaatgtccaacatgagcatttttgctagtgtgaatattagggggaaattttaagtttaataacacagcaggggtgtataaccacgaccataatttgagacagatcagctggcaatgaccatcttggttattggttctgtgtctaacagaaaaacagaactgggtaacatgaactccttttatactcaacttaatggaacatctttaactgcaatatttaaaaaatgtctacttctaaaatctcataatgattaaacaccttttagttccttatatctacattgaacattgtgaatactgaaatctgttggttgccaatgccccacgatataaaacgggctagtagttgtcctgtggaaaagcctattgtgactttactttctgccatcctatctcagtgcgtggctactatttatctaagatgaaatctaacatttacagtaaaataaaattgaacgaaaaggttagttaccatttgaatgattacatgtgacttctacatttgtttagtaagaagtggcataagcagttaaatatgatctgacctcttcactgcctattttcccgagtaatagtataatcttgttactttttctcagtcatagtgtgaggtatgagaataatatcatgccttcaattatatatccagttttttgcttcctgtttgctttttatttctccttcctgctaacatatccattactgaaaactttggttttttaggcacttggtgttccagtggataggcttgtccaggc

SEQ ID NO: 26600 - DNA, 433 bp, Glycine max
  Intron number 2 from transcript Glyma20g36590.2 (locus Gly ma20g36590) derived from phytozome v7.0 (chr-ID Gm20; pos 44658440 to 44658872 reverse strand)
caaagtaagcaatattttttggtttacagcatttctcttagactcgctctcatagtgatcttcatgccacataaacatgtataaccttttcataatgtgtatattggttgatgagtagaagtgctgcctattacaaagccttcagtgatcacagcagaacattttatttgtttttccagcactgcatgattaccccatgtgttgttaatcaagaaatgtggctgtgttttcataatgcagtgacttcacttcattgttccgtttactgttgctggtaatgagtaatgactaccatacagctactagaatgatttcaggcctggcaatttgctaaattttcttttgttttaaaagtcccatcctgttgttaattgattcaaatttatagcaacattatgactcgtattttacctgaatgcagctctggtggcag

SEQ ID NO: 26601 - DNA, 1033 bp, Glycine max
  Intron number 1 from transcript Glyma20g36590.2 (locus Gly ma20g36590) derived from phytozome v7.0 (chr-ID Gm20; pos 44659312 to 44660344 reverse strand)
gtgctttgcttgcgatcttgttggaggttcttctggtaaattaacaatctcctcagaaatttcatcacacactatcacgtttttgtttgttgttcctttctcaaccactgaaaccaagtaataatggcgtgtatatacatttctggttgctgatcttggcttgccttatcctaagaactgttcaaaattctttataaggagaacgaaacagtgtttgatttctgtagttcacgccttcgtgggttgtcttgcatcattgcatgcgtaatgtccttgcaggtattgcgtgtgttactatagcgtctttaactgtggtttttcattcttaacgagagagagagagagagagagagaggtaattagcttttcataatatatatctataatatttggtttctgaaagtaggaaattggacaacaatttgacttagagaagagcctttcgtgtcatgctctatttcgtgatatatctttattattattgtagttgttgtaattttttcttgaatttcgttctgagtggagactatttcaacatcatcattcctcctctcattttgcgggaaaggtttcggtcatttcttttttccttgctttttcttgctagaattgttcaattcggctcctatattcttgggaattttgtaattttttttttatatattaatttaacgcggattgtggaaattactactgatacacctgtgtttctgtctgtaatttgttattcatagaattttgtgaatagtgctgttataatcgaaaatactgatcatttgtggcttaggaaacttgtttttttttttgttttttttttgttttgtcacttggtaatttgctagtgcttctcaattattgaatttgagtccaacaatggtggcagagaaatgtcactgtaagcatcagtttgtttaaaattggtgatttgattcttttgaaattaaattcgtggaaatgatgagagactgagaatggggattgacttattttttattttttattttactttttgcttgttttagttcaagagaac

SEQ ID NO: 26602 - DNA, 651 bp, Glycine max
  Intron number 1 from transcript Glyma19g32260.1 (locus Gly ma19g32260) derived from phytozome v7.0 (chr-ID Gm19; pos 40023952 to 40024602 reverse strand)
ccgccgtcaccaagaccatcgtcgaagtcgttcaggttcgatctgctgccttgatctgtggttttttcagtttgttggatttgaatttgtgtgaaaaaactgaaaattgaaatcaggttatgataagaagaaaggaaaaaaatgaagttgaagtgtcttccagattaactagtggtttcgagtttgagtcctgagtaggtaggctgcgataattatttggaaggagagctttactgctcgtaatggtttgacttgaacaggattgtctctcgtggaggatacctgtgataaaaaaaaaaaagttagaatttcttttggggttggggagtttttatttaatgagctgattgcttgggtacgctgtgtttattgtgtagtagtttttcagtgaggattgatggggcataggttattaattggtgtttactttgttgtgttggggtttatgagctattttatgaggttctgtccttttttgttaaaaaaaaagtgattttgttttatttttgaagttagtaagtttggttgtgtgtgagtgttttttctttttcagtttgggtgctatggggaatctttgctctttttttgccccagtgagtaccttggtgaaataggtattgaattgtggttttgtttgttgttgtgttgcag

SEQ ID NO: 26603 - DNA, 545 bp, Glycine max
  Intron number 1 from transcript Glyma19g33130.1 (locus Gly ma19g33130) derived from phytozome v7.0 (chr-ID Gm19; pos 40768318 to 40768862)
gtaaaataatacattttaaaaaacagaatataataggagaggtaatcactattatgaataagaactttcttttattatagattgtagagagtgataaataattaagttgaaggttgaacaataactaactatttagtttgtaagtgtttgtttgggaccaaattggtggtttactttagtttttacttgtcacaaattaaagaataaacacaacttttagcttctaaaacgtaataccaatttatctataagaaaaacgtaataccaattttgatcctactaataaaatcaacaccaattttgtaattcaatcatataaagtaatatcaaaatgctttgaagaactagaattataacacttttacctttacaagactacaataagattattttaaattttaattagagtgctatggaattttgcgggtagacttgctcattcgattactttgttttattttttgtaaatgcaggatggctacttggtgccggaaatgcatctatttgaagcccaagttggaaaaattagcccctgaatatcacaa

SEQ ID NO: 26604 - DNA, 146 bp, Glycine max
  Intron number 3 from transcript Glyma19g33130.1 (locus Gly ma19g33130) derived from phytozome v7.0 (chr-ID Gm19; pos 40769151 to 40769296)
tacctcagactctagtcaagcgtggcaacatatctgtaagtatgaattttcattcttaattatttctggtaactatgtgtttatgttacataatttcgtgtgctctttttgactgttatttattttgttgttcttcattccagaaa

SEQ ID NO: 26605 - DNA, 824 bp, Glycine max
  Intron number 3 from transcript Glyma17g33730.1 (locus Gly ma17g33730) derived from phytozome v7.0 (chr-ID Gm17; pos 37689657 to 37690480 reverse strand)
agggttgtccttatttgaccttgtcatcctttcaggtgcatattcttccaagtatatattttcaggttcctataactattgacatgcttctctttaataagtatcattcctttggttttcagtctcttcccctgccctttattcttagaggggtaattgaccatgagtttcatcatgcttgaggtaaaaaaccataaaggcataaggctagacaatacattctgttaggtagaaagaattgaattattgatgttttgtagatgagaacgtactccctacatttattataattattgttctgcagatggtggcttgcttttctacgtagtttttttaatattaaaaaactgaatatgttttggtataaaggtatcatattataaaagattccatgcatttttagtgttaacttttaatcaattaaaatcactttagatataatttttgaagtaactataataaaaattaacaattttatgatatatgacattttatgattaggagactgtgtcagtgtattcatattaaatttataaaagattgtaaatcagtacgagtgtgtttggatttctggtagggggtagaggttccaaaagtacgtttaaaaataaaatcaggttaagatcacatttgattacccctcaaaagtatgttttaagttaaaattttggcctggaaacttagtttgagggaagtaaaacttgggatacttttgcaaactttattccaaacataggattaaacttttattcacacagtatgctacatagtgatgctttggctttgtaggggctcacaccataggagcagctcattgcagctca

SEQ ID NO: 26606 - DNA, 420 bp, Glycine max
  Intron number 1 from transcript Glyma20g31570.1 (locus Gly ma20g31570) derived from phytozome v7.0 (chr-ID Gm20; pos 40193298 to 40193717 reverse strand)
ctgccaagaacataggtaagattgagagtaatattttacatattttgagcactgtaatgtagtttaattagttattgatgataactaattaaattaatcctacactcaagtactaaaaaacaaatattaatttctatgtagcagcaaagtcataggtgattcatcttatttattagatggccgggcataaatataatggaagagaatgaacgataaactatactgtaaaaaaatatattatgcaaataaactttcctatatgttatatatagattgtaatgttctttaattttcactaattgaacaacaatttcattctctttcacaatcttgccaacttgggtgaataattatgcttatgtatgaatttaattatatggtgcagactgcggtgggaagtgcaattacaggtgcagcaag

SEQ ID NO: 26607 - DNA, 833 bp, Glycine max
  Intron number 1 from transcript Glyma17g36690.1 (locus Gly ma17g36690) derived from phytozome v7.0 (chr-ID Gm17; pos 40636914 to 40637746 reverse strand)
cgttttagccttcgattcgccgtcgttgttttcgaggtggactctgctacttcatgagtttatgatttttttttgttcgttcgtttatttgtttatttttcgtagattccttttagttcaatgttgttctagcgtatatggcataggcttttctgattagcatgctgaactatgcttaggatctaatttgacgctcaagaatgtgaggggagatttagaggataattgatgcttggccattatattttcggacctgaaatatgtcatttactgcctaaatgtttttggtttttttgtttgaagatttttttctctgtaacgtatatttacatgatttggacgaacattaatgagagagagagagagagaagatgaagatttagggtgtttgatttctatttttgaaatatgtcatttactgcctaaatgttttcaaaatacaacacttgttttggaaattattttcaaaacttgttagattttggatgagaaattgattgctgagtggagcgaaattgttttagaaagcaattttataataagaaaagtgagaagaaaatcaaacatgtccttaatagcttcagagtaagtaacattgagcttatgggttaaaattttgaagtttctatgttgatgatatctttgtagctagtgtttcattggtgttttctgatatggtcattgcttgaaagaaacaaattattaaattaataagttttgtttcataatgtttgtttaatatattgtttttaagggtgtagagtgtagacaatacagttgctaatgatggatatctattgttaaatcctgcttcagattgtattgatattggc

SEQ ID NO: 26608 - DNA, 587 bp, Glycine max
  Intron number 1 from transcript Glyma18g02620.1 (locus Gly ma18g02620) derived from phytozome v7.0 (chr-ID Gm18; pos 1666416 to 1667002)
gtgttgcgagggatccccaaaaggtcttttctttcttcttatttttatcattctatgtgcaatgtaataattgattgtacaccccttgtaaagggtatggtcatagactcatatatattagtgcttgattcttttaagttatccctcatttgatgccaaaattatgtgattttgttccctccttggaattggaactgagatagagtgcagggaagttgggcattttacttgctgttagattttaaatcccttttcttgtgttataatttttatcagattgttgttttttgatttagaagctctctcatattagcttctccaaaagctggtttttaagtcaattttagcttatcagattgttgtttttccttttattttcttctcctataagtgttcatggagaagtttatccaaatatgcctttaaattgctttggtggaaggggctgttagggcttctaaatcttgctcaattgtcaatcaagacccctcactgcagttaatttgaattgtgtaattggtatgctattagctgcttctcaacttgaggttactgactatactgtgacaaactttgtttataggggc

SEQ ID NO: 26609 - DNA, 994 bp, Glycine max
  Intron number 1 from transcript Glyma19g30540.1 (locus Gly ma19g30540) derived from phytozome v7.0 (chr-ID Gm19; pos 38160344 to 38161337 reverse strand)
ttcttgcgcaacacctcgaacagcaaaagatccatgtaatccacattaaaaactctctccttttccttttatgagtttttcctcttaattttgaattggactcgaaaatactccaattgagtttgattatgtgcaaatgtttttcatcacttaactgttttaggaattgtagcctgtggagtctcaaggactcgtagtagtgggtaaatgcagtttgctttctctgttttttcattagagattcgatcagtgactagagatgtggaagagaatgtaaattacttggttttctattggttaaaggctgaactttttctgtgcaatcaattgaaaggtttctggggattcatcaatttttaggaaaaagaagagtttagtttccaaatcaaacttagtagaagaactccgtctttagaaagaaaaaaaaccttagtcgttctagaagaacaattacaactaacggcagaaggtgtgtctctgaatattatttttgtttttctgcataaccttagcctgtgtttggattgatggtagatggtggagtggagagaaatagagtggatcagaaagttgatcaatagtttcttttgtaaaaaaccgaaagtagatcgggatgggacctgattcatcccattccatttagtccaatttgtattccctctcaatttggggtgtaggggttggaacaaatcttgtaaaataaaaaatccctattttgacctgctaaataaacataatcctttgaaagtgatattaaagtggggtaatatagaaactatcgagtaataacttatttcgttttttttccaaacaatggaatggaaattatggaatgtccattccattctattatagaatatccaaacaataaaataacacttttaattcattctgtcccattatgttctgatccagtccatatttaacaacctactatttgctatttgctctgttttctagaattttgaacttttgaataatatctttttctagg

SEQ ID NO: 26610 - DNA, 738 bp, Glycine max
  Intron number 2 from transcript Glyma20g38530.1 (locus Gly ma20g38530) derived from phytozome v7.0 (chr-ID Gm20; pos 46117558 to 46118295 reverse strand)
aagaagccaaggagaacccaaggaaaccatctctggttagaattacaaaccttccctgtattttgtttactatgactggttttatcgtttacacggagatttcgttattctttaaggactaggctgtctcttaaattagacaaatgctaacgatactctctctaacacactctttctaatacactttctattattgacttaaatttattgaaaattacaaaattgtgtaggagagaatgtgttaaaaggagtgtgttgttagcattcctcctgaaatcatggtgtattgaagccatactcaagctttctactctgccctagctatgtctagtctacaactctacgtcagaagtgtacgctgtttgttttcccactgctatgccttttatcctgttttggatgataataggattcttgggttgttggcttctgtctttttctcccaattagattataggaggagattttccctgtttgtcagtattaaataaaattctactctgtgatgccattgtattattgtttgtgtgtgtatatatatatatattagaaaatattaatttatgagatccttctttgtttgcttattatgtgtctatggtttcggatagttgatgcttaaatttttaagttgctaaagtagtccttgaaatagggaacgtaattgcatgttttttacctttgatatttgtgtttgttattctactgtttcttttcaggttctttactacgattctg

SEQ ID NO: 26611 - DNA, 874 bp, Glycine max
  Intron number 1 from transcript Glyma18g11530.1 (locus Gly ma18g11530) derived from phytozome v7.0 (chr-ID Gm18; pos 10265497 to 10266370)
tgaatctcaacacaaccttcgttgttctcaacactgtaatctctttctctttctttttctgtctctaaattttgttaatttagctcttgcatgttggttttttcactttttcttgtttttcggatgcaacccatgttacggacttttctttgattgattttggaaattgaagagaaaataatttaaatgggggatggaaaaaaattgcattttgtttccttagggtgaggtttaaacccttggatgaaaaaaattaaagggtaatgagcttttttctttggggagttttgatcaaacaaagtcatctttttttttttttttcttggttttgttttcctgagttgaaattttgatcggtttctggaaggaaaaattgaaatgaaaaaggatttttttttaaaaggttatatgtccttggattttgctatacagattattattggaatgggcaaaccatcaatttggtccttcaagtatcaccctccctcctaaatagtcctttaagtagtccttaaattattaaatatccatcaatttagtccttgcggtaatgtatttattcaacgtccgggcactaatttgtgattacttatataatttgtttactctagggaccactgaggagagagagaaatactttagtgatgagattgatagttttttttttttttgacgtggagattgatagtttattctaatcggaatattcaattctttggtgtggttgcggttttttttttttttttttttgagtatgtgttagtgttaatttgcttgttcttcatgattatgggatttagcctttttttctactggttttttttaaaactttattgcaggtgttcgtttttgctgccaaggttacaacactgaa

SEQ ID NO: 26612 - DNA, 891 bp, Glycine max
  Intron number 2 from transcript Glyma20g37520.1 (locus Gly ma20g37520) derived from phytozome v7.0 (chr-ID Gm20; pos 45383021 to 45383911 reverse strand)
ctaccgtctcagagaaccttcctggtacttgcaagtttgtattatttacaagagtttaattgtcatagtacaaagatttctataatatactataggattaggaatctacgacttttaaagtaattaggcttaattactaatttgattcttatacatgcaaatatttacattttagtctcttcactagaagctacttgttttagtcctacacctaagacatgctccctctagcctcatatataaacaaaaataattaatttcacactaattaagaaagttagttgacatgatttaattttcttaatcttaagtaaaaaataaagttatttctataatgttcttcattgaaacttactatcatgaataaaaaagagtcattgaaaatagaattagaattaaatgaaaagtattttaaaaatgataacattaaatatgacaaaattagttagatttacttatatttaagttcaacatataagattactcttttgcttatatatgagtctggagggagtacttgttttagtccctatgcatatactttttaatccattttagtacatactattttggataggaactaaaagagattaaaaagtgtatgtgtagatattaaaacaagtaatttctaggtgtaaaacataaaaattatccaggtatagagatcaaaagtcatgtgccatgacaattttacaatatatcatgacagtatatgattgaacgaaaatataaaaacctttatattgtgaatgttttctaattaatttctatttataaaacttgttgatcttctgaagctttactcagtaaggaacagctataatcatttttactttttgaaggggtacaaaactacctatgtctggtttatatatgcagtattggctacgg

SEQ ID NO: 26613 - DNA, 976 bp, Glycine max
  Intron number 2 from transcript Glyma19g44380.1 (locus Gly ma19g44380) derived from phytozome v7.0 (chr-ID Gm19; pos 49829089 to 49830064 reverse strand)
ggccaaaaggatattctcagagctaagtttccaaggttagattgaagctcttttcccatttaactttttcttgtaataaattaaacaagtttaattagcatttgattagaagcatgagaacatagtttagtctctaccagtggccttaggtatctgctaaatgaacaaccactggccaattagctaatgatgcttaatgagggaaataaatatgcatgtgcgatgcgttcgctttgcttgttttaatggttatagtccctccagtgttttaaaatgatttgcaatttgtaaacttatccaaaagaccatgtcagccatttacaaatgaatccaaattagtgctttctgttaaatttgtcgagttatattaatgaagttatgtgagtggtgcaagagggatgcttccatctgtacactggagaaacctgacactcttatcaagcggaacaacttgttgcaaagtgtcatgttggatgtgggtttggcagctcatgtgcccccattcagaagtaaacgcaataacatgcaaattggcaaattgcaaatcgaattcataatgagataatgagtgaggagacaagaataggtcattaatacccctttttctgattttttatttatttttggaagtatattttactagaacctttccagtaactaaaaaagtatttgttgtaaaaatcataatagtaggaaaaaaaatcataaataacgcaatgttatgtatttcaataattttttttaatttcttattcaatgtctatttgccaaaaaagaatgtaggttttttttctcaagcttccatttcaaggcataaaacaaaaggggtttctactaataattttatttgtcattcggaacacactaactttgccaatctaatgtttatattaacaacttaaaaaaagttattttctagttttacaaaaaaaaaaaattgactaactagtggtttgcattgcagaggatattacag

SEQ ID NO: 26614 - DNA, 897 bp, Glycine max
  Intron number 1 from transcript Glyma18g02200.1 (locus Gly ma18g02200) derived from phytozome v7.0 (chr-ID Gm18; pos 1350624 to 1351520 reverse strand)
ccaccttttatattcgaggtacatccattcattaatatcctgaataaatccttacatgttgtatatattaacataacaaatgtcatatttaaaattttgtgtcttgacaacgaaaaattattacatggtgttaaccagagaatcatcatctcaatcaatttccatatgatatagacagagttatattatttctttctcataaattaaaatttttgtcaacatatcatctaaagattaatcgagatcataatcatgtattagttcctgaatcatgtaattaataatctttcctctacagcctgtttaatattccttttgaatttatatataaggaaattaaaacaattaatttcacactgattaataaaattagttgaaatcatttaattttattaatctcaaataaaaaataaagttatttatgaaatgtcttttagatatcatgaataaaaaaatagttgaaaataaaagaagaattaaataaaatatattttaaaaataatattattaaatataacaaaattaattaaatttacttgtatttaaattcatcttataaaatcatttttttacttatatatgaatctaaacgaaatatttgttgcaagaactattcatactacaatttcggccatagtatcaagactttttggagttttgattgcaatatgagacccgaatcgtgattgcaatttaaaatcttattttatcataaagaaaatggataaatcgatagttaacaatacaagatccattcttaataacatcatttgaggctaaccaatttgctgtggtgaatatgtgtaactaactaagattaatgcatgtttctatgttgcatgcatgtgacacttgtaattaggtgcaagggtcggaattcagtgcaaagagaggaag

SEQ ID NO: 26615 - DNA, 343 bp, Glycine max
  Intron number 2 from transcript Glyma19g06340.4 (locus Gly ma19g06340) derived from phytozome v7.0 (chr-ID Gm19; pos 7217608 to 7217950)
ccttgcttggaattcgagttggaggtcaatttcttgcaaacacttttggtttaatcatagattttcttattcttagtttgtttcaacttattttcaagaaataatggcttctcttgctagtgtgctaaaagtacttttggaaacaaaacaaaaaatggttgtgttccaaaatttaaatttatctaacagatttttctatttgagagttatcaatatgtatcaaatctgttcctatctctgaccaaattttattcttccaaaacaagcacttggttttgagttttgatggttgatctgtttgtttgcagcacggtttcgtgtaccgtgagcacaacaggtcacc

SEQ ID NO: 26616 - DNA, 879 bp, Glycine max
  Intron number 1 from transcript Glyma19g34340.1 (locus Gly ma19g34340) derived from phytozome v7.0 (chr-ID Gm19; pos 41936075 to 41936953)
cttacactgccagggaagagagtctcaagaaagaggtcataagcactttggtctcgttcatgcatctcgtgaaaagaatgtttaattatttttatgttatgttttggaattgttctgagactcgatttttacgatgtcaactaatcaaaatcgttaattacgccgactttacaataactatttaaaagtcatccctaacatgactttctagaaattaaactctaattcgtttaggttctgatcggttcaaaggaggggataagaggaattttaacggaagggaggttgaataactgttttcttgttcggtttagagggaaggggtttattatctttttagtccctaaactttttaggatatttgttttttttttttttttttttttttgtaagtgtgtgtttggataccaaaattaattctaaaatctagttgaaggcgaaagcaataaatagttgtttcaattttttcaattttccaccatgattttgggggtcaaaattcattctaggaggtatccaaacgcacaataaatagtatatgctttgacattgtaaatgggtttttaagttctcatccaattacaaatcagtatgcgtgcaaagttagttgatttttacaatgactaccttaaaatttataacatgttttttttttattagatgacactgttagtgcattgaaattaaactctaatgcatttgttgaatatggatatttacttagatgtaatgtgatggtttcacattcggggcattttcattgttttacatttagatgaataaattgttacaaactgttttgatgtgataggtgttcatggttgtgactatgtttggttgaattctttttcaggaggaagcaggaaggctcaaatttgt

SEQ ID NO: 26617 - DNA, 919 bp, Glycine max
  Intron number 1 from transcript Glyma18g44300.1 (locus Gly ma18g44300) derived from phytozome v7.0 (chr-ID Gm18; pos 54009952 to 54010870 reverse strand)
ccttacaagatcagccgctccactaactgtgcaaggtatatatgtctatatcttattctacattctctcatacttcgttattcatgtaccatatgcagtgctattttggtactacaagagtttaatcaattaaaaaccatttgacttttaaaataattattataaaagtacgagattttaatatgttggcatgattttaaattgcaagtgaggtgagcagaaaagctttacctttacattgtgaataagtataaaaaaaatgtaattgatgcgattgcaattgtgattgtgattgtgattgtgatagtggtgcagttgccaagtatgaaaatatcttgactttgtggttacaattgtagttgctgattgcaatttaaaatcatggatgatagtgaggacgaacctgacacatgattaggttgcatcttggtgatcggtttgtcatggttttaatatggaaacagtctctggaaaatgtgctttaaatgcattcttagtacatattttggaaaaaggtgttaagaaatgggaatgatttttatttctaagcaatctgggggagaaataaattactattatagagaagaggaaaaaaattatattagaagagggagaagttttcaaaggaaagaaaattgacttattatattcttacaatacttttctgtcccatatatgtaagagaattatcatatacccctttggtcaatgtgatcaatcacttctagtggagaaaataatcatttgttattgtttgtgtttggcttcgcctattgtaggagtggtggaatccacactaaagaactcaatgtgcgacaaaattatttgttttgatttgaaaatggtggataacatatttaacttgtgtgtgtgtgtgtgtgtttttgtaatgcctgcagcatcaggttctgaacaagcc

SEQ ID NO: 26618 - DNA, 713 bp, Glycine max
  Intron number 2 from transcript Glyma19g38790.1 (locus Gly ma19g38790) derived from phytozome v7.0 (chr-ID Gm19; pos 45645751 to 45646463 reverse strand)
gctctgtaagtctcatacattagcagctacatagtatcgttcatgagaaatgaccacactcttttaccactttttcggacacactcttttattggatgtaattcatgtaagtccttctaaatatgcgagtttcattccacatttggtgggtttcatgtaagttcttttattggatgtaattctagtgtagtgagacacatgaatttcaatcaacaaggagaaaaatatgttggaaggaaagtgttagattgagtgttactagcactcctatgtgattcatttatgcaatcttcataatcataatcagaatgatgtgctgttctaattagttaatttgttttgtgttgttccctttgatcaatgtagtgctagagattcccaagagtatgtactattatttcattaaattatcaaaggatgatgaagtcctaatgaattatgataatgacttatcagcaaatgatatacattattcttaaaaattgaaaatttccaggttacaaaggagcattttctttcttttggcactatttatactaatatttatctatagaggagtgttggcaacacactattattgtatgattcttaataaattttagccaataaaagtgtgatagagggttttgtaataaattatcatttcaatgctaatgttaacgactgttttgtgaacagcaagttggtggtaggactgttaaggtaaacttccc

SEQ ID NO: 26619 - DNA, 913 bp, Glycine max
  Intron number 2 from transcript Glyma19g39040.1 (locus Gly ma19g39040) derived from phytozome v7.0 (chr-ID Gm19; pos 45865256 to 45866168 reverse strand)
tcactgtcagtcttgcccatgtaagtctttttttttttactttctatttgagaccattaaaatgaaaccatcttcttttaattactattttggcatggtgttaggtcacgaggtccttatttttatgcctttttttcctacatgcatgctcttgtgttcatgggaccaaagcggggattggctcctagttggggttgtggaagaactaatgtcttagaccattaggttaagtaatcaaaagtaagagtaaggggttatggtgcatgtttgggaatgtgggtggatcacgttgagaaaaccatggtgccttttaagttattctctgtcgtggtggaaaaaacatgttgggataccgtggtttccttgaatcatcacaaaaccaaacacgcaattattaatgatgtagattgcagaaagttcatttgttgatttttgtttttgaaaagaaagaaggaagtgggtgtttcttgaaggtccaataacaagcaagaggttatttgggggagagggttaatgctgtgaatggtgattagaaggttgcaagtaactttcattatatttatacggttctcttgtttttctaatcttttgagtgaaatagtttgcttagagcttatgttaactgagattagcattattcagtgaatatgattttactcttaagtctcctctagtgtcagagttttgtaacacctgttttcccttatgctttgctatctttgaatattatttgcaattgatcagaacttatcttacctgcaattagattcaaagcatgttataagcaaaatagtacttattaaacattatgatgtgtcttgtaatttaacccaagtgtattacattatgcagtctaataatgtgtttttgttttccacttgtagtgtgtgatcaacagttcttctctgagttg

SEQ ID NO: 26620 - DNA, 369 bp, Glycine max
  Intron number 1 from transcript Glyma19g40090.2 (locus Gly ma19g40090) derived from phytozome v7.0 (chr-ID Gm19; pos 46551885 to 46552253 reverse strand)
cccgcctccctttcttcttcctttggtaacatcctcttctctataaacactctttattctctctatttacttccgcatatttattttaaatacgcccttttattcatttccgctagattttatcaggattccagcgattgttcgttaccagcaatggtatttttttgtttttcaagtatttggtttggtcctcttgcctcctgttttagggtttattcatcctagttcatggtggttgttgacttgttgcttttgttcacttgttgattttgaaatttgaatacaagtttgtgaaaaaatagaatacaaatgcatagagaataatttttttgatacctgttgtgacagatccgttcatacggtggttag

SEQ ID NO: 26621 - DNA, 636 bp, Glycine max
  Intron number 2 from transcript Glyma18g32240.1 (locus Gly ma18g32240) derived from phytozome v7.0 (chr-ID Gm18; pos 37324351 to 37324986)
tcccatcgatctacccattgttgattggaaactagaaactgatattcaaaataaataattgcttaattatagtattgatttcggaatttgtatattttgtggtaactatattgaatattgtccaacaaattgtttatcaatgaccgaagaatatgaactttcaacttatgatcgccacaaattaaattataatcaaattgctttgggccatttaccagtaattgatgattatacaattagaacaattcaaataaaattcaattaattatttattaattatttaaaaaattcttcttaaaacgaaaataatagaatacttatataaaatatataaaaaaatatggatatatatattcgtttattttgaaattactcattcactgaaagaaaataatgaaataacattgatcctataacaactgtacctatagcaactcacacctcttatgttaggagttggtggaattcaatgcagagataattttagtatttaatacgtttttttcctggtcatatcaataaggtcatgaaatttagatttatttatctcttattttacatagaatggatttgcccgaaccgctacatgatattcttttagtcttcttggatcaggtcttatattaggaagtctgg

SEQ ID NO: 26622 - DNA, 548 bp, Glycine max
  Intron number 2 from transcript Glyma20g28680.1 (locus Gly ma20g28680) derived from phytozome v7.0 (chr-ID Gm20; pos 37622797 to 37623344 reverse strand)
gaggttggtatcttggttttctccaaagctctttctactagtgatcactttctaagggagcaacaagcctagaattaaatcccatgagagatttgtgatgatagcactgtccagtctgatgccttaaacaatttgaggttctagttgggcaccggagaaaccgaaggaagtagattagtaacatcatttggaaagaaaattgaagcctaggatcaatcgtcatgctctgtcaaatttagttgttatctagtgcaaaagattaagctatgcaaatactatattagcttttcctgaggcaaagatgtctttgtctgaagttttatgttctcaccaattttgtttgtggctacaatttcttggcatccaaacaaagtgcaagcatacatactttgaactctgaaatacatgtccatcaaatccatttgttttttttcttccattttttttcctgatataaaatcagttactatagttttttttggttgatgcatcaacattgatttccttcttcaggaggtgacacggaatatagaggtaggaatagcttc

SEQ ID NO: 26623 - DNA, 679 bp, Glycine max
  Intron number 2 from transcript Glyma18g46370.1 (locus Gly ma18g46370) derived from phytozome v7.0 (chr-ID Gm18; pos 56131945 to 56132623 reverse strand)
gtcgtcaagctcaattctggtgttgattacagaggttcctctctttatttaccacttttgtctgaaaattctttaaaatgtttgtgaattaacgggtatatctgggtggggtgatgtattgaatattgatgtgttaatgtttggtccatatttgcttgtcgcagttttttctgccttgttgagggaaaggaaaacctgattttgttgattggatgagaaagaaagttgtttatttagtctgctggtgattagtgttggattttgatctcaactattggtttagtttagattcctgggtaacgtgtatttgagccttgcccaaaattgttggaaaaggatggcatatgcttatccctttgatatatcaaatgttggatgtttcttttcatattgacactattttaagatcatatagtctatgactttatgatatttttcttaaatttcttgtttgagagtagttgaaaaggaattgagtatcaaagtgacaaaacaaggtagagcagttgaaattgtgaccataattttattgtcaaatttcatgtttgatggctttacaatttgtgtattggtgctcattgtccactgtatagttgtatttgttatgttatgcttctctgtatgcatgaagtagtctcactcctttgggctaatcttgcaggtatacttgcttgtctag

SEQ ID NO: 26624 - DNA, 988 bp, Glycine max
  Intron number 1 from transcript Glyma18g02040.1 (locus Gly ma18g02040) derived from phytozome v7.0 (chr-ID Gm18; pos 1216943 to 1217930 reverse strand)
acaaattcgacattaattatcaggtctttattttattcttaccgatctctctttttttttctcgtaattttttgttatcatccgaagatttcctttgatcgattatcaatttgactaattccatttcaatcactctaggttttgttttggttttgattttgtccgttgatctcttatttcatcttatcacgccattagatgaggcgtttccgttatacgttagatatgttccgtgtgattttacgtggatcaacctgagccagaactagagtgttacttgtttggtcatttttgtgattgttctgttatgcgttgagaatacgggtggaaagttcatgttatagatttgtaatttattgtgttttgttacgtttgggaaataagctccaccggtgatgatctttgctgtgatttttcagacgtgtttattgcgcatgattagcacttaattaggaggatcagaggagataggtatcatattttgcaatgcactctcagagatacgttttctactaatgatttttgtttatgttgtctttggagtattaaccgaagaatttgatctggatgcaaggagtaatatatattcattttgatagattgaaagattttttccgttaggcattgaactagaatctgatctggtttgaattagtgtagtaggaagaagagtttgtattagtgattgtgaaaattttcaaggtttgaactattatattattttaggaatagttgaatagatttttttggtgattatattttatgaaaattctgccgtcatgtgatgatacttgtttgtaattgtattagtcaatagttatcaatttatcatacaaagtaactcaacatgaaaaattatcttcttcgtaaatttgttttgcacaatgtttccatctcccttcccccttttcctgctagggtcttgacaaatttcttgatcatcaaaatttcaggctactattggtattgacttcttgtcaaaaacaat

SEQ ID NO: 26625 - DNA, 872 bp, Glycine max
  Intron number 2 from transcript Glyma18g07030.1 (locus Gly ma18g07030) derived from phytozome v7.0 (chr-ID Gm18; pos 5730576 to 5731447)
gaaaagaagcaggtcattgagcttaattaattcctccttacgccttttattcactctgtgttgtgtctatgctttgctttcgttgatatgattctaagtaaagtgagatgattgagtagacttatttctgcttagagtaatcttctaaaaattcaattttagttttttgcttacactttcacataaatcatttcccatgaccaaatattaaaacttatttaaccagcaatctacctaatggcaggaatcactgattcatataaagtgaaatattggttaaataagtttggtatttgattagtggaagtgatttgggatttcgtggtgatgtgatgggagtggaactggaagtgtgtgtgtgtgtgtgtggattcttttcttattaatgaatcctcattgcaaaatcccaaatgatcagaattccctatttccctatatatgtaaaattgaaacttggaaggtagaatttagggagaacttatctctgctagagaattgataggtgagaaaattgtcgttgttagaggtataggttttttttccttgatcaggtatcctcataggtaaagctgtaagataacccttaggttggggatggtggttagatactaaaacccttcccagaatggcaactcaaattcacctgtggtcacagtccatttctgctattgttgatagataagttggtgtagtgttgttaaatgacaccgccatagtttgttaagggaggcccactatggtggcacatagaccgcaatggtgttctgtaacagagttggtgtttcattatttcttttccccagaattttgagtttcaaatatggacctttggtatttatgcgatgatgattgactttccaggtcgtattgta

SEQ ID NO: 26626 - DNA, 621 bp, Glycine max
  Intron number 1 from transcript Glyma20g01830.1 (locus Gly ma20g01830) derived from phytozome v7.0 (chr-ID Gm20; pos 1396893 to 1397513)
cgacactactagccccaccactattttcaatccaggtagttcttgttcaataattcaatttttttttaattgattttagattttgttgttaattcaataagatttcaaatattggtcacagtcgcgttgctgggtttgttgatattgcgattaatcgccgaaaagtggccgatacgatcttaattacggtcgcatacagttaaaattttttgttgtgacttcaatcacggttgcggaccatttttcaaagccttgatcacgtatttcatcagcgttgtgccagttaaaattatggattttttctatgaccacttacttaggataaaacatttatacaaatttgattgtatgattaaattattaagtttattttaagtttggtgttgtcaatttgattaaattttgagagcatgtggtaagtcttcgctgacagccttaacattctactggcgctttgtgctgtagaattagacatgtcttcttattctattattttctctcagaatttttttttgtaagaaattgataatatgattaaattattaggtttactttaagattggtgttactgttgtcattttgattgaattttgagtgaatgtggttattattgtgaagggg

SEQ ID NO: 26627 - DNA, 520 bp, Glycine max
  Intron number 4 from transcript Glyma17g18600.1 (locus Gly ma17g18600) derived from phytozome v7.0 (chr-ID Gm17; pos 16097744 to 16098263)
gtgctgttaggaggtaggacaacagaagggaagggaaaaatagtaagggattagaagaattaattagataaatagtgggaagaactgaagaaggcattcagagaatgagcagatttgaaagaaaggggaaaccattggaggaaaagtttttctccttgttctcttcaatttcattcaatcagaaaaaaaaaaaaacgcttcttttctttatgtccattttgggaacactgactgccacctgatctaacctgcatattgctacatttggtctctcagtttggtcagtatgaaaatgtcaattggttattgtgggtgcaaaattgtatagtatagcttgcatatagcttggtttgtctattgccctaaatgtatttgattttatatggtggaaattatcgtctacagaatatatggttatttaataatcttttatgacctttcagtcaatttggatattgttctttgctaatactggtaaatttcaggtacagcctggattggagaattttcctcagggtgg

SEQ ID NO: 26628 - DNA, 629 bp, Glycine max
  Intron number 2 from transcript Glyma19g38320.1 (locus Gly ma19g38320) derived from phytozome v7.0 (chr-ID Gm19; pos 45249627 to 45250255)
tataggaaaagaaccctcaacactggaggaccttggtaccatcttgttctctagtttgatatcattatgctgttttggaattaatggctgttgttttgtcaaagttacgattgttatgatcaaagtacaatggtgcttgttgccgtgtttttatccaagagtacttatgatatacctgtactcttcggtgtgctcatgtggttgtgtgaattgcttaatcaaactatagtgaattaatgacttgcacctagagaaagcaattaaggatgctgccgaacatcaaatcaaaagtgctttggataggaaaacgaaacttatgatgaacatgaacaattagtcaacgattttttcaccaactagagtgccgctgctgccccttgcttattcagcattgagtagaattctctgttcttgcttttttttttgcaactccaaactctttagtgatttataaccttcctctactttccttttatttttagtttccctcccattatttttctggttacgatttgctactactgctttgagtaaatgagtttgtgaaggtgattttgacttttgaccaagcatatgaccgtatctatttttttactgggaaatttacagctgtagctgcaagaggggga

SEQ ID NO: 26629 - DNA, 444 bp, Glycine max
  Intron number 3 from transcript Glyma18g03960.1 (locus Gly ma18g03960) derived from phytozome v7.0 (chr-ID Gm18; pos 2741545 to 2741988 reverse strand)
gatctaactatcttgacggattaattcttgttctcagttaggggtaccctaggttcacctaaaaaagacttatttaaaatcttatgtataaatctttgaaatttgaatggtaactggagaggggtgtgagaaaaatataatatattacaaactgcgtgctttcttctgtgtcaaatgataaataatccgtgtcaaagcagaaactagtaattatatagctcattgaatttacgtggcaactgacaagcacatttttatatagctagatttgtttaatttggttgacctgaacaatgtgtgcatgaagaatgattcgctttcaaagtagtctccttccacttgatattcatcaataaattctttacagtaacactggttaagcattcatatgcgtgactttgtgttttaggtgaacaacgtcggaacaaactttagaaagccaac

SEQ ID NO: 26630 - DNA, 1036 bp, Glycine max
  Intron number 4 from transcript Glyma20g37500.1 (locus Gly ma20g37500) derived from phytozome v7.0 (chr-ID Gm20; pos 45376519 to 45377554 reverse strand)
ctcaagtcaaagcctcagcacaagcgcgacaagtggtaattctctcttaagtgtcttcttcgtttttatgacactcaagcattttctgctattcttcatggtatatgatatatactagcattgtccaatgtatacttattgtattggatttataaaatttacttgatgagttttgttgtatgaagtaaagtacctgtttcctttatctttcaggtatagtctttagttatggagcttctgatgttctggtgtttttaattgaattgttattgtctctctcatttattcccttcttttatgctgggctatatagccatttatttgactatttgaattgaattactggatttattatctcatgtttcctttctatgaaaaaaaataccaattgatgtaaagggattcttcaaaaaactgttttttctactcttcgatgggatgatgagtggaacctaagacatgcagtttatggctatagctaaggcattaaaaagattttgatcatttgtaaattcagaatatttttgcaacattcaaagcaaattagcatttcaattggcagaccacatgagaaccgtccatcattaacaacttggatatgctagatataagaacatgcacctagtttgtgtgttgttctctaaaacagtcacctagagagttgatgattagatggatttcaggttaccctcttatttgaatttgcatttatctacttaacaaaatctgtcattatagtactcttaaaaggataatgtaaccaaatttgatctatgatgacagtctgtggtcatttagagattgttccatttctgttttcagttttaaagataaaagaacaacaaaaaattgagcattaatttagctagttttaaaaaattgatcttaaacaaatttcaaaacagttttaaaaattgaaaacagaaacagatatcaaacaaggcattattttgcagatcagataataactttgatgctttgctgacatatcattgatgcagggacaacaaatatccctatcaagtcctggatttat

SEQ ID NO: 26631 - DNA, 731 bp, Glycine max
  Intron number 1 from transcript Glyma19g38120.1 (locus Gly ma19g38120) derived from phytozome v7.0 (chr-ID Gm19; pos 45121542 to 45122272 reverse strand)
gaacccgaagttcccaggagacctcccagcgctaggtaggttcttgaggaatcttggggtttcttcaaaatttcatctttcttcgaattttgttgccattggaatcgtgcttttttttttttaatgaggtttggttctgaaaagggtgttttcttggaaatccgtgttaatgtttccattttttcccctgtctagagtttaattgattgaacttgtgttatatataattttgaaattcatatctgatgcttaactaatggcatggaattttgttgcttcttgtttcctaattgagattttaagttaatagtttgtgcttaaattggttctatttctactgttctagtttctgctaccgtgatttgtttttctactcttgctctttaaaagcttggagtttaattgaatgatagatactattgaaggctcgctacaacatataattctaatttttcagtgaatggagtagctttcaactggcttgtcatgttatccatttacaaactgtagttagtacttaattcataatgataaggtgctacttgtctgtcttgcaaaattagtcttctgaagtgggtttggttcatcgtaacaaaatatgagaaaaatgagaggtagggagagatcattgatctaggtgctttcttcatattatgtgtccagtggatgcatactgaattgtattatcctcttgaatgttgatatattttcatttactattcgcagtgcaa

SEQ ID NO: 26632 - DNA, 911 bp, Glycine max
  Intron number 1 from transcript Glyma18g13610.2 (locus Gly ma18g13610) derived from phytozome v7.0 (chr-ID Gm18; pos 13113748 to 13114658 reverse strand)
caagtaagtgatagttcttatcatctatgatttggttgagaaatgttagcaaaatactctgaaacttttcatgaatacattttgtattattgattgaaatttattggaaatgacataaaattatgggttttactttttattttacgaatcttacttagttttcaataaattttgactaatagtaaaagagtatgttaaagagtgtgctactaatactcatgatttggttggtgcatcgattgattttataaattttatggtatgttagatgtaagatgaggatttggtctttaatggagtctaatgtgattcatgtagtcgaccttaagtagtaggataaagttgctgctgttgtactaaaaaactcagttgttaggatttataacagaccgaatttgaatgagtacttgggaatggaatgttatttctaggaatacaggatagcagggagaaattatcttctaattttagtttttgtgcaatattttaggcaacagaaaagaatgtgtaatacaagaaaattgaatttgtttcttgaattatgaggggtaatcttaagcctattgtgagattgtaagttaatctgctttttgtggaaaaaaatttggtacactaaaatacatcgtttagttaattgaaagtatgtgtcttacataaatccatcatgaattcagagttcatgagcacaagagacaagagtaatggagtgcaatttgaatttcttactttttcttatggtcctttatcatgtgaacattccaaatgtagcattgtcttttacatatgcccgaaagggtgtataccctacggtgatataagtgtttatattttcttatgaatatgtgataattaatatatttaatatagccttcattgactatccttgatgtagggaccaggcactggaatat

SEQ ID NO: 26633 - DNA, 836 bp, Glycine max
  Intron number 3 from transcript Glyma18g47960.1 (locus Gly ma18g47960) derived from phytozome v7.0 (chr-ID Gm18; pos 57481851 to 57482686)
aggttgtttggattactggtgctagccgtggaattggtataacaacaactctaccatttttttatattttttttatatcactcttctaaatctatagggttgattcattcattcatgttaacattggacttacatcaaattcaatatcaattccaattcattcagaaatcactttgataagtgaaggaatcaaaacccacaatgtgtggcacatgtggtcctttaaacatataacaggacttcaatccctcactatgcaaatagagcaacacctgtggatagaggagttgccctttagcgggtattcaacttcctggggagattagtttcatgtctttccactgtgggaatacccttaggcccaatcccaaatccgactaatttaataaagacatttaatgcaattcaatttattgaacaggtgccttaatctaattaatctgcaatgttgaacgataccagtttttgagtattttattttattatttcaggattcttttttacttaaattcttctctacaatatagaaggattcctttgaacagccagaatcttttacttaattgtaactaattttgcttgcataaaccaatgggtgttgggtctagcagatgggactagtctcccacaatgtgataaactaagattcaaatctccactgggagaggtgaccacttttagtatccaacactgtctcaaacatgattgctatccaagaagattacctatggagaaccaaaaaaaaaatgcttttataactgattccttttttttccttgtttcttcaatgaattgtatgaaggggagattctggctaaacagtttgcaagtttagg

SEQ ID NO: 26634 - DNA, 705 bp, Glycine max
  Intron number 1 from transcript Glyma19g04900.1 (locus Gly ma19g04900) derived from phytozome v7.0 (chr-ID Gm19; pos 5125816 to 5126520)
gggttagtaatttctccaacattcttttattttttgtttacttattttttacggagtattaatttccattattggagaaccttattgatgatcacctttattgaaatttttcttttccaatcacaattttttttttcattcacaaatactcaaatctgaaaccttaattaagaacaccgagtttgtactaatgacttgttggatacttactacttagttattagttatttatgtagatttactttatcttttatgtttttttacttacaattcagtgtttgaactttgaaatttaattattgaaattttttcgtgttggattttttactgaattagcgactagattgaataataatttcttgagtggcaaaattaggtcgtgagagatataaatataacatagtcttattatttttccggaaaaatgggaattatcacgtgcgttcatgaaatacagaaataggcattttgttgatcgaattagactaaatcatgtattttggagacctaattttcttcagtagggattaatatgatgtatctaatatcacacataatggactaaatttgtttaaattttagctaaatttagataaattgccattaaggattttcccgttcctttcattctgaattttttgtacctttttaaagacctatggcaatctctcacaaatatgtcgtttttttatgctctctgtagtt

SEQ ID NO: 26635 - DNA, 712 bp, Glycine max
  Intron number 3 from transcript Glyma20g28410.1 (locus Gly ma20g28410) derived from phytozome v7.0 (chr-ID Gm20; pos 37335239 to 37335950)
caagaaagttgtatctgtaagaacccaaatttgttgttggtttatttattttaccttgattcatttttctattcggtttttcttcttgctccacttatttgcatgcatattttacaggggaagaagccagaagctctttacaaagtagacaatcccgaggttaggcagtttgtagagaaatgcttagcaactgtgtccctcagactttcagctagggaactcttggaggacccttttctccaaattgatgattatggatttgactcaaaagttttgcagtatcaaagagattgttatgaagtaacgccattaattagacaacctgtgaatggaatttgtatcattaacaacaacttaatgagtggggacactgataatattggtggttatgggcctgtatctgaattggattatcatcaagacgattttgaagcgactgaaattggtctctttgattgtgaagaggacgacaatttggctgaagttgacaccacaatcaaaggtagaagagaagacgatggcatctttttgagactcagaatagcagataaggaaggttagcagttcactttcttattttctttttagtcttgataatttcatattctgttttttttttttctcatactttctacataagaaaaaaaaccaaactaacaatccattcctctaaataggtcgaattagaaatatctacttcccatttgacatt

SEQ ID NO: 26636 - DNA, 876 bp, Glycine max
  Intron number 1 from transcript Glyma20g30640.1 (locus Gly ma20g30640) derived from phytozome v7.0 (chr-ID Gm20; pos 39334816 to 39335691)
agtgttaaaggtcccttgtgggaagaagtatccaggtatgcgtcactcactactcaattatatatattaatctatcttattatatatatatcatttctcttctcttttcactttgcttcttctcattcaattcatgtcaattttgctgaggagatctgtggattcaataattttgcttttgctttttaaattttattcttgcaaatgtattcggttttcagttttcttctagcttcaaattcaattcaatctttcctctctattggattttgcttccttttccagttcctttttgtgtattttttcttaatttctttctttcttttggagtttaagagcataaaataattatagaagaatttagatttgcagtcttcacgatttgggtgtgatttgcttttctgacatttactttgattcatgtcctattttccaaataagttacccacttgaattgaattatcaaaagcgagatttttctccccactcccccttttatttcgcataccaactcctacgggaaattaaggaagaagattatctgtcaaatcttctaactcgggttcatgtgtttctcatgggagacatttctgttcatcatcaattcatgccattttgttacccaaaatttcaattacgtgcaacttttacattttctcccatctctttttcacttacttcttttttcccactgcttgattaattcacctcatatatgttttttattttatgtttatctcatgctcacaatgctttttatcctttgtcctctagctgaatttgatgagataagataaacccaggagaaaactctcctctctctctctctccttattttttttttcattttttgtcttctccttgtgtatcaggaaa

SEQ ID NO: 26637 - DNA, 813 bp, Glycine max
  Intron number 1 from transcript Glyma20g00400.1 (locus Gly ma20g00400) derived from phytozome v7.0 (chr-ID Gm20; pos 208872 to 209684 reverse strand)
gtgcaccgaaccctttaggtaattagtgcctactacacctttatttcattttttctctctctcagatcccttactttaatttgtttcaatttctcaagtaaaatatatatgcattctgccaaaagggctagcttgctttcttatctgtgttaggtttttagcatttttcttgattaatttctctcctcaaatgtataccaattttgtggtgtggtgtgtgttaagggtttctttcttgcttcttaggttttctgtgtgtgtgtatgttatgtgaggggagattttaggtcattatcatctttatttcattctcaaactttaaggttgacccacttgagtgccttggacttggagggcagtttcatgttcagtttttctgacatagtgattatagatctgaccagttcaagtccataatgtttaatttcttttcaggtatggcatgtggtgggttatacatttcgttttcaaccacaatatatttgtgatcttgtgctttaaactctcttcaaggatctaagtactcttcatgtttacgaaatcaaagtcatcgatctctttttacctgcatcgattctgtattaattattaacctacaattaactagtacttttacattcacataataattaaaaatgtcagaccaaaagttaggggtatttttaatgttgtgtttatatactgatgatgaacacgattttattttcccgaaaaatatgaagtaatttacagatataataattaataagtttacattgtggaatttattaatgtatgaaattaaataattaagatgaaaactttgttatcagg

SEQ ID NO: 26638 - DNA, 816 bp, Glycine max
  Intron number 1 from transcript Glyma18g52890.1 (locus Gly ma18g52890) derived from phytozome v7.0 (chr-ID Gm18; pos 61336490 to 61337305)
cttagcacaacaacaacaacaaccatatttccaactgtgagtttccttcttcaacgttcgtttgagtcttatctgttatgttttctatttcgaattcaatttcatccaaatcaattctaaccaaacgcaccttccaattacaagtcgaatttcccccacattttgttacatattattaattaattaaagaataaatttttagtggaaccctaactctccgttaatcaatcgaccaaacaggcatagctgctgcccgctccgatagatcctctattccgcaattagttgctcttgagttctttcctctttgctttagaagattttctacctttgtgtgctttttgtaattttattttaagtaatttacattagtttcaaacttcaagtacactgtgtatgataaaattggtgcttatctatacgttttgaagatgtgacactataaaggtgataacaaaccacttgagtttataggattaaaatcaattgtgctttgtgctattaagtgtgatttctttctattctattctatttatttatttattctgaaagcatacattttgtgggcataatgttggggttgacccaaggtctctatttgccgccaccccctttttggaaaataactttgatcagttctcaatagaaacgaggttgagttgtttggcgattttaacttttttttttctcttaatttctgatatagctaagtgatcaaattgctcatgttacctaatttattttggtcggattgagttatttttaattaacctcccatccagtgagacaccggattctgtaggataagagcttatc

SEQ ID NO: 26639 - DNA, 496 bp, Glycine max
  Intron number 2 from transcript Glyma18g18860.1 (locus Gly ma18g18860) derived from phytozome v7.0 (chr-ID Gm18; pos 20354543 to 20355038)
aggtaattctcttatccttctctctctcccgagggaaaattactgaaattgattttaaaaaaaaacattttcagtttagaaacaattaaaataactgttaaaatattggttttatgacttgcaagttgctgatttcaattaagtgattaattgttagtaaattggacttttataaacaataactcctttctagaagaaaaaaaaatctttcctaaaagctagatcatttcacagccttgaatatgagatgaggagttcatgtacttctgtggattggcaatgatatgttctgtaggtgccaaggtcccttcttttgttatttgataaatagaaagagaacaattcagtcattggaatttacaatatgttgaattttgtttgtggtgtttcttttttcatgacttgttttgttctatgtatggtttgttggttgcatgtcttattttgatgtttggtcataaatgcagtgtctgggttgctcgtagaccaccaggat

SEQ ID NO: 26640 - DNA, 242 bp, Glycine max
  Intron number 1 from transcript Glyma20g36730.1 (locus Gly ma20g36730) derived from phytozome v7.0 (chr-ID Gm20; pos 44770543 to 44770784 reverse strand)
gagacggtgtgtatcccttcttaccgtccctctcaacttatataatttggtagtttcataatttagttaattttctatgtcattgtgtttttttttttttttttatctttggtgtttgcatgcatgttttgtccttgaatttgttctcttttgagtctttttatattcttttcaaatgaaatgacttgcgtttctcatgtaattatgtgctacgtaatttactttaaaaaggctgcataacc

SEQ ID NO: 26641 - DNA, 739 bp, Glycine max
  Intron number 3 from transcript Glyma17g10050.1 (locus Gly ma17g10050) derived from phytozome v7.0 (chr-ID Gm17; pos 7524411 to 7525149 reverse strand)
caagacataggtaagcaaaacaaagtattttggatgctttattaggttaactttgatcctgtgcttccggttttaacttttagattcttactaactagtctccttagtgacattttttaaaaaaaaatttaaaaattatcataaaaatcacatgaaagcctaaaaaaacacaagcaatgtaattttatatgtttcgataaatttttttctttagattttttaactaatgtcctatatgttcccataaattttttcttttaattttttaactaattctctaagaacattagtcgatttttgcctaacttttaagcatgagtacccattatcatttttcattctcaccaatgtatatatcatatatacataaaaagcctctagaatcagactactggatgctcatatagtatacacaattttatcttcaagtatgaaaaattaaaaattaacataagatttaattatttatttgatttctatacacaattttgggttttagtctatatatttagaaattgcctgatttaggtctctaaacatatattcttccatctattttagtcattacacatacatattttaatcttaagacaagtagtaaattatttatgtacttcagtcaaagttattaaatcttaaaataaagaaatgatttttgatatatttgtttggtggtggtgttataaatgactatgattatgcagattgcggaggattgtgcaagacaaggtgcagtgcc

SEQ ID NO: 26642 - DNA, 734 bp, Glycine max
  Intron number 1 from transcript Glyma20g22680.2 (locus Gly ma20g22680) derived from phytozome v7.0 (chr-ID Gm20; pos 32606827 to 32607560)
atattctcattcttctgtctctgcttcttctccttgtaagttctctcgctcgctctctccgcctgtttcttctccttgtggactgtaagaggtgcttgccttcgctatgtactcattttcgcgtgtttgcttgctctagatctgattatcttttattcgagttctggttcgttgtttcgtccgtgcataatctgaattcaaatgctttcaatcttgttacgtgctacgctaccagatctgttcctagtaaatccgtttctcattttcaaatcgcgaatcgagcaattgatgtgtagtgtgttctgctgagtgaagaagtcaaatcattttattgtcgaaacagtttttgaaaattttctttcgtagtcgtgtcgagcagatctctctgttctttttcctctctgtttatttcctgttcggtttagatttttgctcgtaatgaattattttattgtattttgtttgatggattttaaaggtagttggtgaaataaattaacacttaacaatgcctctttaatttttttagaaaaaaacctggaatatcactttcgtgtagtattttttttaattcagtctgagtttcaaaaattaggttgtgttcgttgcatctggataagatgacaatgcttctcttatacatttgattcttgaaatatgagatttgattgcaactatgtgatttggctgacatgttccttctcatgaatttcgtcatccagctgaactaagag

SEQ ID NO: 26643 - DNA, 746 bp, Glycine max
  Intron number 2 from transcript Glyma18g05320.1 (locus Gly ma18g05320) derived from phytozome v7.0 (chr-ID Gm18; pos 4058646 to 4059391 reverse strand)
tgactagagtaagtgctgcaacataccccctcctcatgaattaggaaagtggaaggtgcattttcaatttcatagctataagtggctcacacatgtgtattcattatttagtttctaatttttcttaaatcatactatgtactgtgctttgactttgacccccattcatatagctccatcaattattaaatgaacagtagcttttacaaacttatattgacctgacattcatacatagatggacaagattgatttttgttcaattttaatcatgggcatccatgtataattatatgattaagattaaaacaaagttaatttattatgaaaaacaaagttaatttattatgaaaagaaagtacagtgtacagacaatcaaatgaaaaaagggaaacgagggtgagagagggattagcccgaatgaagttcttcattttttagattcaaagtaataattctacatttttacatagatacttacagagagatgatccaccatcaatcacccggcgcctattgatcgggaaaactgatttgtccatgatcttttatcaattgtatttatagaataatggcagatgcttacttggaatctatttgttgaactgatacttgatatttgagttgaatttctgggtttgtattgaaactttgacagaactatgccattaaatattcattgtcgttatgtgaatgattatcaattgacaattattcatgtatggtgaaaaatatgcagcttgatt

SEQ ID NO: 26644 - DNA, 759 bp, Glycine max
  Intron number 1 from transcript Glyma20g38500.1 (locus Gly ma20g38500) derived from phytozome v7.0 (chr-ID Gm20; pos 46092265 to 46093023)
caatatttccttttaactaaactatttttttaacggtaatacccatgttaataactttatatgtatttgttaattagtccctctattagtgctttatggttacttaattctctgtaaccaattgaatgttgaaaactctttatgtggcttgggtattatttatacccttttattgatgatataacctttttggctgataaaaaaaattgcctataatggaggggtcaaaaaatgctatgttatagcgatgtggcgacgatataacagttatttaacaactttaactattgaactaaaaattaaaggataagaaaacaaaattcttactttctttgcttatataatgaaatatgtagttttggaattcaaaatagggaagtgagatttaaaatgtggagatatatgatttagtaagtgcttaggtgaagaaaaagatggaccatatactaagtaattttgggaaatgtttaccaagttaaatgctatttgatctgtacctgatacaatcttgtctgaacagagcagatatcatggtagagtgtgctaaatgacataatttgtttgtttatttgctgccagtagcaattgttttactaaacttcattaaaagagaatcccaggggtttatgaaatatagttgaaatttgtttcaggcatccttttgatgtttttttaataatggcattccaactctcaaatattcaaaattttgaaatgaagtgctcttatttctgtctagctttctctctggaagccgaa

SEQ ID NO: 26645 - DNA, 877 bp, Glycine max
  Intron number 1 from transcript Glyma19g30400.1 (locus Gly ma19g30400) derived from phytozome v7.0 (chr-ID Gm19; pos 38000866 to 38001742)
actctccaagtttctaactcccgttctcaacgcaggtgcttgtttttcttcattcataggcactctcttttggtttctcccaaacataaaaaagaagttattaaaacagaaaaatcattcttgtctttgtgatattttgttttattcacaaattccatgctaagattatttgcctatttagtatgacgtttagaaatcatagcagataacttttaatgttctagagtcaagctgaatgatttttttttattatcggtaaatgttagttttttagttttgttagaaatgagttgtgggattcgagtgcgcgacctttccccctctcttctcccttcaccctttcccaatgggccaatcttatatctccccattgtatcgattatagcttgatatctgagaacataaattttcttcaatcaacgacagccagcttatccatatgtttgttgagcatttagaaatccattgcatgtctatgctatgcatgagtaaattgaaaaatagagcattaatatcatggacaaaatgcaaaggtgagagattcaatatataagtcctaaattgcagtatagtaattagtcactagttctggtttcctttgtgttttgcctttgcatctctctccttcatcgccagagaatattttgttttcttaggagttgttagaattatgaaagtgccatgtaagttttgattattctacttttgttttaatttgctcgctcttatgtttatttatgatactgaagtttgatgattacagcatggtgtttctacaacgcttcaatatattaattttctgaatgtgattattttttttttttactcccccctctctccaggtaactgctgtcagcaatctagcaaagctttaaac

SEQ ID NO: 26646 - DNA, 713 bp, Glycine max
  Intron number 2 from transcript Glyma20g29950.1 (locus Gly ma20g29950) derived from phytozome v7.0 (chr-ID Gm20; pos 38738911 to 38739623)
cttggtttaggagacgtatgacattcttactctctaagatctcttactgtatgagaacatgtccttaactgtttccaagttttagattgtcttttcatttggttactttcatatgaagtagtatggtgtgttggatttactgtgtgaaatcattggaactatggaaggctgcatttacttgatttaaattgattttgcctgtgaaatgctgtgcatttctttctttcgttttcctgctggatcatgccttgctatgttttatgtaggttaagtgggttgacatttattatgattatgattttgaatacctcgtgtaaattttatgcaagagcaataaaaaattaaataagaaagagatagtccttgttcactgcactctagttgtcgctggaacctccctcccctccccttttcttccatttcccctgcatcaatttatatttgattgaattttgaaagggttcttgtgctgcatggtgatttgatttgaatgaaagttatgttgtgtctccggtgcatcatgttgtatacattgtatcaattactgcatttataatatcattacatttgctatataaaataaaatatcattacatttctgtgtcaacctaagcttgccaagattttaataaatttttaaaattctaattcttcaaaatttatgtgtttgttgttttataatttttgctcatcttttgtaggctatcccaggc

SEQ ID NO: 26647 - DNA, 591 bp, Glycine max
  Intron number 3 from transcript Glyma20g24290.1 (locus Gly ma20g24290) derived from phytozome v7.0 (chr-ID Gm20; pos 33961747 to 33962337)
aggggtgacttgggcagacaaggtaccgaaccttctttactgcaaaagcacatgaacaaggagagagcatatattaatctttagtcccctgatgatgatatatgatcatggctcctcaatgcctcctccttctgcttatagtaatcctatttgtctgtcatatatacgcgggaatttaatttagaccatgctttgtgcattgaatgctgattgttgtttcttctcttggtacatattaaacttcaaaaacaaagcctatgaactctcacttatgcacaagtttgggaaatctgcgactgagtggcacatttattagtcttttttcatgccaaaatagtgtagcaagaataataagccaatgcccttttaaatcttcctctaatggcattttgatgaaatccacaactttttttttttttttttttgtattctccctccattccatacacaactaaggtcgttactggcttgtgttcaaaacaccacgcattaattaattgtttcataaaaaaaaatataatctcattttttttttatttcacaatgtgcatgtcaggtaggacatcctcccaacataggaaccaatctttt

SEQ ID NO: 26648 - DNA, 210 bp, Glycine max
  Intron number 1 from transcript Glyma18g49680.1 (locus Gly ma18g49680) derived from phytozome v7.0 (chr-ID Gm18; pos 59052537 to 59052746 reverse strand)
tggggttcagaaatcttggtagcaatgggatctcaacttcattttccatgaatcatgatataaatgatgcaaaaactggtaagccagacaatgttctttgttctgtcttcgtttctccatttcagtagacgaagaaatatgatcattattaaggaaattcttttgatttatacaaatgagcatacaacatgaaaattctaagcaattttt

SEQ ID NO: 26649 - DNA, 695 bp, Glycine max
  Intron number 2 from transcript Glyma20g23390.1 (locus Gly ma20g23390) derived from phytozome v7.0 (chr-ID Gm20; pos 33271847 to 33272541)
aggcagcattgcaggtattacattctgtttatcattgtgcttgtagatttaactccttaaattctttaagttgtatgcagaagatatttcctctgttaagtttgagtggaaatcatttaatgaaagttatttccttaagtaagaagctttgtttgggatttatatgtgatgtgttgccaaaattgattcctttgggagatttgttttggttgttgagattttgaatttaagatgcagtgctcctggatataaaagtggtgaagctggttctctccctcttttatcattttcttcatttttggtgttcagtgtcaattttctttcttaaaagttgtttaatcctttacatgcttgtcaggttgttagaattgtttttgatttgagggtattaaaattattattcttctatcatggtggtatagtaggagttaattctccggaaatacactatttaatattgagttacaattagtcctaaagtaaaacgattaaacctaatgttgagtatcacatgctttggtgtttaatgttatgctttatgctttatcaatgtttgtcctgtattaatgtggtttgtggaaggtgctttgaagattatatttttagtgcttgtgtgtgtgttatagtcatagagactcaatattgtcaattgtgaatttggttatcgcaggatatcagtcaacctaaaacagaat

SEQ ID NO: 26650 - DNA, 908 bp, Glycine max
  Intron number 2 from transcript Glyma17g30230.2 (locus Gly ma17g30230) derived from phytozome v7.0 (chr-ID Gm17; pos 33202930 to 33203837 reverse strand)
ctcagccaacttgaggtatagtttttaatttattagttttggcggtttaaatttgtttattcttccagttgattaagtgacaattttttctgtcttcatatatttaagtgtagttaaatattagcttctttctattcatgctgtgtaaatgttgaatcaggtgatttgctatcacatttgactgtaaattttgggtaaatgtgtaataaaatgttgatgaaatagtaaattgattcccctttctgcttccattcccttctttcctgaagattgtctctacagatgacattggatagaggaaagcatttccgtcttatcattgttgaaccaaaagtgatctgagattgccacgccaagtttgatttttattttaaattccacttttctttcctgtaaactgtgtttgatatttttttttcttcatattccgtgttcccagttttttgttttgacaattggtttgcttttctgttttcttccagaatgtataaataattgtatttgtaggtgcttcatactttgtgatttgatttcattccccccctccccttttacctgttctgtttttttttttccagagcacaaatgttgaaatattacacatcaccgattggaaactggtttaaaggaaataaagctatattctgttctctgttatatttgcagatataaatcttatcagattgtctaaaacctcctgcgccattaatgttagtttatcatttaatggatataatgaaattgatagaattatcatagtttaattatgtcaattgccaaacattgcttagcattaggaggaaatactttgagttatcatgtcaagtgttaatggatcacttctggaacacattaattgcaagtcaaaatttgaggattttttgttttgatcttacagttagagggag

SEQ ID NO: 26651 - DNA, 582 bp, Glycine max
  Intron number 2 from transcript Glyma18g45330.1 (locus Gly ma18g45330) derived from phytozome v7.0 (chr-ID Gm18; pos 55102729 to 55103310 reverse strand)
gttgaaaataagggaacatcctgtttaccttgaggtatttcacattttatctttgcttgatatattattggtactgaggtttgaagctattcaaactatccaaattgcatgtggtagtgctgtatttacccctttgattttgttagttttaaatgtgaagacccacgccaagatgcaagtttgaggtttatgtatttaccacaaagtagtgaacttaataaactaaaataaaataagaaattaaatttacatgcatgatggaaattgatatgttgtccatttcatggctctttgattggtaattggaaggggaatgcagttttttcctctaaccatctaaacctcctggtctgtcgagtaagtttgtgaagcaagggagtgatttacttgtgttgaaaagataggaagaaaatttaagcaacatgatatttatccaactgtttttcatggtaggtgatcattttcttaccggattccatgcaccttaatttgtttgtgttatgagtgaaacattttatttcctttatgccttacagtctaaaattaatctgcggacttatacacatttttaggttgcaaaac

SEQ ID NO: 26652 - DNA, 337 bp, Glycine max
  Intron number 1 from transcript Glyma18g01300.1 (locus Gly ma18g01300) derived from phytozome v7.0 (chr-ID Gm18; pos 680925 to 681261 reverse strand)
ggctggtacatggattctttaatatcacctatcttctgagaaattattatatagtttgaaatcatatagttaaaggtcccaatcaatctctaagtgacatgtttttcgaaactagtcatatctctccatcaatctctctgacattttttcttaaatagaaaaaaaaattataattatatgtcacgtaaagatttattaggaaggatcatatgctttggatcatgaaataattcctctttaaccttccatttgattttatttgaacatacttgtgtttctaatcattattatcatttaaaaataataggggccccggtgctaccgtgcttatcttgtc

SEQ ID NO: 26653 - DNA, 327 bp, Glycine max
  Intron number 3 from transcript Glyma19g35780.1 (locus Gly ma19g35780) derived from phytozome v7.0 (chr-ID Gm19; pos 43260084 to 43260410 reverse strand)
ggaggcataggtatggtgaatgatcgttctttctaaaaaaaattctgttctgttttttgattgccctttccagttgcttcacaccatcttatacttttgtcttgttggttgtcagttgtgatagtcttttggggctatttttaatacgtattagatactattgaaaatgaagatgataaattgatgatgatttttctttttactatggtttatgtgccacctcgattattatcattatataataccggacttcatgaaatttaatctaacaatgtatttttgtactttgcagttttaccattcatactggtgctggtctgattattc

SEQ ID NO: 26654 - DNA, 354 bp, Glycine max
  Intron number 2 from transcript Glyma19g35780.1 (locus Gly ma19g35780) derived from phytozome v7.0 (chr-ID Gm19; pos 43260472 to 43260825 reverse strand)
gtagtgagcctgaggtagttcttcttacgaactgttattcctgcatgcttttgattgattggacttgggccctgtttggataaatctctctataagtagttacaagaaaagaaattaagaaggcaaaaatgatttgagctttttaaacttttatagaaactttctggtctagctttgtacacgacatgaactgattctaaattatgggagaagtttcatttattttaacatcttagtttcttctcttataagtgttttatggagaattgtaaccactgaggaacttagttttttgttttttaatcattcacaagcttgctattgtttcttggattgacacttttttcttcatag

SEQ ID NO: 26655 - DNA, 841 bp, Glycine max
  Intron number 3 from transcript Glyma20g31750.1 (locus Gly ma20g31750) derived from phytozome v7.0 (chr-ID Gm20; pos 40351448 to 40352288 reverse strand)
tgatcttgaaagtgttgaaccctcgatcagagcaggttctctatgaacatataatatcactttcatcatctatcatgactatcaatgatttcatatccttactttggattttatgtactgtttgattacattataccttgatgtgaaagcaagttctttcatcttcttttgacttggggacttggaagggttgtaaactgtgattgtgttacattctttcagctgagaatgcattgttagtgtgtttgttttatgctaatcctgttttcgaaggcacatcaaacgtcaaatcctcaatcccatgctcacggattaattcctggtccattttaagtggttgacatctctcaacagatattcttccatatacataggtttagggatcgaacttctaacctcatgcttaagtcacatggttatttgtcaactataccagaccacattggtacacagccattcactgagaaatgccagtgatattgctgccttttacaatataacaaatcaatactttgccactttggcaaatgagcggtattatccatttctagtcattgctttcttatacttcaacttggtcatgccagtttgtccaaattgtttgggttggttgtctttcctctatactttttcatgaacaactataagggaaccatacaatatctatgttcaagtgattttcagttaatgtgtctttgtacaaaatttttatgcacatgagttgttttacacttttacatgactggcagaaagcatcatttgctcattgatttggcttcatatttttatttgcttattctttctgtgttatctgtagagactgaaaacaatttgcgtggta

SEQ ID NO: 26656 - DNA, 404 bp, Glycine max
  Intron number 2 from transcript Glyma17g09630.1 (locus Gly ma17g09630) derived from phytozome v7.0 (chr-ID Gm17; pos 7133479 to 7133882)
ttccttggagaggttagaacttagaaccttatatgttactgcaaccaggcattatttttttttgtagcctaagtttttgttcctgttgtttcttttcaacgaattttatgatccgtttattaccgtttattatatagggactgctgtcatcatgacatggctttgttctcttcgtatttgcttatctttgttcctttgtaaatttcttttgcaaagtttttcattaatgaataaggtatgttaagggggtccagcttagtttgattctttcggataaaaaaagaagtaatgaatgaggtattgcagagcaaaaaaaaaaaaacctgtatcatataatggttatataatgttgtttccaaccttaatccattttttactttaattttcttacaggcgcctactgc

SEQ ID NO: 26657 - DNA, 395 bp, Glycine max
  Intron number 3 from transcript Glyma19g36140.3 (locus Gly ma19g36140) derived from phytozome v7.0 (chr-ID Gm19; pos 43501011 to 43501405 reverse strand)
gaggttctcgcacgtaatttttttttctccattttcttttctttttgctagtaatgtggatccatccttaaaagtcacacatgcagtgcttgtgctaattacattttgacatatatgctaaatttgttcacgttttcaattttttttaaaaattgagtcaatattgtcttttttgtctaattcacaactcaaatttgaaaattaaaggagcaaattaaattttttataataaagaaactaaattgaacaaattaaataaaaaaggaaccaaaaggataatttagcattagagcagcttcctaatgattgacattgttgtgacttttgtgatagttaaaattcattaattttctactccaggtttccagatatcaatcagggaacttgttcagccg

SEQ ID NO: 26658 - DNA, 548 bp, Glycine max
  Intron number 1 from transcript Glyma17g13240.1 (locus Gly ma17g13240) derived from phytozome v7.0 (chr-ID Gm17; pos 10122945 to 10123492)
gattctgctactcagcaagaagtttattccacctcgtgagttcctcacaagtcacaaatcttgatttttgaattgttcatggtcattgttttgttgttagaacttcttttgcagcgtaatatagaacctgaattgcataagttcattttcacctattgaaaatgttgggttcatctcactttcatataggtcttattgaataaacttctccgtcaacacttctaagaaaataaaatataaaccaaaaaattaaataaacttcttcacaaactaaatttagctagtttgaaatcagtttttgaagatactaatacaagaagcttccacaaattagcttataaataagctaattttagcttttagagaaatttatttcattttcttttcctataacagaaccttaatttcttatccaataagtgtttagggagaagtttatctaacaagttgacaagggtgtttatgcaatttcatgcttaataataatattcatcattgagtttgatttttcaggacttcagagcttgtggaagcggttttgcaaggga

SEQ ID NO: 26659 - DNA, 868 bp, Glycine max
  Intron number 1 from transcript Glyma18g49700.1 (locus Gly ma18g49700) derived from phytozome v7.0 (chr-ID Gm18; pos 59068616 to 59069483)
tccccattcctgattctcacaagatcactgtgagggtatgctattgctcatcatggttcaatccttttggatcacaccctttcagtttcaattttccaaattgggattttttttttcctaccattatcttgtagtacacttgaatatgttttaaaatgagtgatcattttagtcatgctgaaaaattatcttccactttcatttctaaaagaaattatgaaatcattatcttttgtgcttattatgcctaacctcttaacttaaggtctcaggttgttcggattatcccagtacattaaatttagaggaagaactttattatttatttatgatgattatattttgttcaagcatgattatcttcaaagaagatacaagtgatttagaaaaaaagagaggttaattgattgtctcaagtagtaattatcactggatgtggtaccatataattagtaacctgaaacctttaaatttttctagattatgaaataggttttatttatcaaggttaagatggtttaaggatgatggtgaaaatcaaagaaaaatattttatagacaaaaattaaaatccgctcattttattagaccacacatacttaagccttctgttattatgaaataaccttaaaatggttttttttaagtctgttaaggtagaaaatgtatgagaattgagaacaagctagaacaattgaatctccaatgggttagttggtatctacttcttataaggtttcttaattgttttatatatattttgtttttattttggctttgtctttgagttttctgaatttcaaatgtctcactttttggcatatattggctttgtataacggggttagttgccaggtgcgttcacctt

SEQ ID NO: 26660 - DNA, 940 bp, Glycine max
  Intron number 1 from transcript Glyma20g01460.1 (locus Gly ma20g01460) derived from phytozome v7.0 (chr-ID Gm20; pos 992616 to 993555)
ccacgcattctccttcgaatccctcccggtcgccagtcatcggtcccacacaaagtcttctagtcgtggcatccttccctttgacatccacttctccctttctgttgtgtgtgctgccacgatcagggacacaaatctcaaccaccccttcctcctcctcatcttcgtcattcttgtcgctgccaaagggctctgtctccacaatcatcttcaggcactaattcttacacccattttcatttgggatccaggttctgttttctacacccaacaccttgaggacaaggtgtttttgatgggctaggaaatgttaggaagaagatgctctgccatgaaaatctatcataggggtagttatcattctagtagaggttattgtagtgggggtgcggttattgtagtggttattatagcggttattgtagcggttattgtagtgggaatgtagacatgcaattgtgtataaaagctctaagaatcaatgaataaggcagagaaagagaagaatttagaaaatttgtttgtaaggaggtcttggtcctcgaaaccaagtagtgtagttttctccccctccctctgctcctaacactcacctttccttcatgtctcatttctcaattttatgcttgactcagccactaatggtgtaatgggctaataaaaaaggttgacgtaaaactctgttgggatgtagaagaaattaatgcatgctaattctttgaaaacaatgtgtgctacttttcctctcgtttttttttcttcgctttacttttccatctcacattgaatatggtaagatagttttggtttctcttaatgcttgtacaagacaagatatgaaattcaggtaaatgagtgaccatttgaattctgagtcatcttataatgtatttctctcattataggtcttggttgtgacacgtctaaagttatcaaaatc

SEQ ID NO: 26661 - DNA, 645 bp, Glycine max
  Intron number 2 from transcript Glyma20g28990.1 (locus Gly ma20g28990) derived from phytozome v7.0 (chr-ID Gm20; pos 37946907 to 37947551 reverse strand)
tgttcagtgccttgccaatcctacctacatccactgtatgattttcactttgatttgatagtttcagcttcattgaacaaaatacctgcatctgttgattgttgcaagtaattagttttctttgacacaacagcttatttaggacaaacattaggcatatggcacttggtcggtttaaggggattaaggctttaaattgcagtcgtgtttgcaatttcattacaatccttgaaattgtaatgaagttgcagatgatgatgtggccacaattgcggttgcagagaccacaaaaccgttggcattgcggcctcaaatagctgttgcagaccttttttaaaatctgacagaaatgtttagggatttgatagcttgccccattgatgtttcctttttttttttttatcgttttttctttgttgttttgtgttttgcctttgagctcgaggaagattacttatcctcaaaactttttaaattttatttgtcttgacgaaattccttctttataattttttaaaatgagccatgctttgtcatttcaatgtgtatctgagttacttttatagttttgtttgttttttttttaccttattcttatattgttacacttttgaacagatttggctcagaatcgatactttgagg

SEQ ID NO: 26662 - DNA, 660 bp, Glycine max
  Intron number 2 from transcript Glyma20g21960.1 (locus Gly ma20g21960) derived from phytozome v7.0 (chr-ID Gm20; pos 31784727 to 31785386 reverse strand)
tttaaaattaaactcgaaataattttagcttaaaagttcctttgattaacggacactcacactaagctcatgtctcaccactacatatgactcacacccttgagctaggatcaccagatagaagaaggggatgacaatatcattcaactgtttatgtttttatggtttttaaaacatgttttggataaaaaatcaaaactcaatagattttcgacgagaaattgattttgatcgagtagcatggaattactttaaagaacagattttaaagccaaaaagcaaaaaggaaatcaaataggcccttagtctttacatcaagatcaacctacaagggtgtataggatgaatggtgggcaatgggaacaaccttgccattgctcacttgattagctaaagcaggtttcctgtactgattaagttttgtgtaacagaattgtaaagattcattataaacaagtcattttctgttgcaaattgaatatatgagggatgtaatttgttggcaatataaattactgacaggtaagtgtgcatgaaagaaaaatggtaaaatacacacaaacacaaccttatggctaatataacattcgtatatgcatgaactgatgcaattgctatttcccttctgcctctatgacactggatgatgctgaagaagca

SEQ ID NO: 26663 - DNA, 357 bp, Glycine max
  Intron number 2 from transcript Glyma19g40430.1 (locus Gly ma19g40430) derived from phytozome v7.0 (chr-ID Gm19; pos 46843868 to 46844224 reverse strand)
actttacggaggctgaagatctaattttgcggtaaattgaaatagatatgttgtaaatgcatgtagaatttttatttgtttatgaagaaaatgaaattacaactaaaggcatagatcttgatagcaattttgattttagccatatataaatccttaatgcacatttttttgttgagatcgaagttttattggacttccaatggttttccttaagaaataaaacctttgccatcatcacacaagatgtttaaatttaatacctaatttaaactcactgggcatcaattttcttctttattaaaatgtttgaagctttccaattctaaaattgcaatcctaactcttgaatatattagg

SEQ ID NO: 26664 - DNA, 651 bp, Glycine max
  Intron number 3 from transcript Glyma18g10460.1 (locus Gly ma18g10460) derived from phytozome v7.0 (chr-ID Gm18; pos 9335753 to 9336403)
gaggtgttaagcaaaactgggtatttttttttttattttgtttagtttacaaatatttttctttggatgacgtggtagtagcagtggtagttctatgattgtggtatgatatatctgctggattaaagtagtagtatattgaagaagggtaacacaggataaaacatggtgttgttttcaaatcatacaatactggtgttgattttcatactcttttgtttgattaaaatttgcaatgtgcagtagaaatgggttggaccaagactctgttatgtattggggtttactacatctactgacatctactaattactaaattactaaataagatggggttaaatttttgggatgattaagctggaagggattggtggctgttttagcttttgatataatgtataaaataaactcattttgtgcgtctgaggtgccttttgaattgtgtaatgtcttgttgtctctttagctgattttatctgttcatatttttaattttaactaggcattgtcatgcatacatttgaagttcttttgggataatttttagttttgatctttgaatggttgcactctgaattttagtgagtcaaatgttttattttgtttattgtttcagtatcaagtttcaagtgatatcatactttttgcaga

SEQ ID NO: 26665 - DNA, 781 bp, Glycine max
  Intron number 1 from transcript Glyma18g45770.1 (locus Gly ma18g45770) derived from phytozome v7.0 (chr-ID Gm18; pos 55473329 to 55474109)
ctagacttggaggctcagcagctttcattggcaaggtgaaattctcgagaatattacattagcaatgtgctcaatatacattttggcacagttttttttcccattattattgttgttattgttatttttatcgtttgcaagaattctttatgcaaaatcatattgttggtacttactggtgactttgcatcgaatgtcagaattaggccttgtttagacaaacttctctataagtattttcaaaaactttttgcacaatttaagatcaactatgtacttaacttttatggatgctattttcatttaacttttttaaaatctggtgcataggttaatttgagcttatagagaagatcaaaacatttaccaccttattttattctcctataagttcttatagagaaatttatccatatagagcataataatattcaacacaatttgaacctgtctgtacacagcgatgtgttttcttgataatgcctagcttctcaacttaaacattttgtcgtttcatagtttttgatcccctgataattcaagagaaaagaaatttggaatacattacaatattctatctaatttttatgtttcatgtctgtcatataaaattgtggtgctaattctttggattctgtatgttatgaactcatttttattttaagtttaacaaagttccatgttctagtaaaatctttatatgcgaatctttctttctttttaatctacatgtgtccattagtctgaccagtgtctctaatatttacaaggaaggtgggaa

SEQ ID NO: 26666 - DNA, 740 bp, Glycine max
  Intron number 1 from transcript Glyma18g50960.1 (locus Gly ma18g50960) derived from phytozome v7.0 (chr-ID Gm18; pos 59953970 to 59954709)
aacgagccaattacaggttttggctttttcctcaatttgccctaaattttgaacaatttgtgttaatgtggttggtaattttcattctggttgcttgaagtggaattttcatatttgttgtttattaggtaagagaagatgaatgaaacatgttaacataaaagtagaaactgatttgtttagggaaaaatgatgaatgttggagttataggtagaaggaagtgagagatagagagaaaaaataaaggaagtaagagaaatttgataaatgtgataaacatgtgatgaaaaatgaagggagaggtaggaaaaaacgtagggtggaaatgtgatgggttgagaaagtaatgatataataacgaatgaccctttgttttgtgttgcaaaagtttaagagtgtcgataaacatacaccccaaaggaagagagagataaaaaaagaaaatgaagagagaaaaatgacagatttgatgagtgatgtggtagaaaaggaaacgagataggaagaaaataaggtgaaaatgggatggaagaggtagtgagtgcatgtttatagtttttttaatttaatttaatatcataatgtaggcatgatgttgttgcttgctagtataatgtgttttgagattattatctcattttatgtgcttttgtctctaccaataatttgtttgagagaggggaaaagaaatgatgtgtttatattagttctttacccattttgcaggcataagcaagtg

SEQ ID NO: 26667 - DNA, 660 bp, Glycine max
  Intron number 2 from transcript Glyma19g29050.1 (locus Gly ma19g29050) derived from phytozome v7.0 (chr-ID Gm19; pos 36614106 to 36614765 reverse strand)
atttttcctcacaatattggccttggagctaccaggtatattgataatttgatatcagtaatgtttgtctcataagggtgtgagacgcgatgggtgaaaaggaagagtgataggaagagaagaaaaatgttaagagagaaagagtgagaaatgataaataaaaaataaaaaatggaagagatggtaagagagaagggatgcacaatgaatattaaagaaagtgagtgaacaaataaaagtccattgactttagcagcattccatatgtcttagccttttgtttttaaaaattatattctgtagacctatacttgattctaatatttgaagtttgaaccatgatcaattgatcatgaaccaattcaggcattaattacaacagattctaaagcaactcagacatgcataggataggtttgtgtcagacttgcacattctagtctggaaactgaatttaattattttatctggtttgtatccaataaatgctttactctggtatgttattgtcctaaacttaatatatgttttgcctggtttcctttcgcacaaattatctattgttattctaaatacacttactgttacaaaaggtaatattggatattttcattttgctggttagggaccctgaactagttaagagaattggagctgcaa

SEQ ID NO: 26668 - DNA, 707 bp, Glycine max
  Intron number 2 from transcript Glyma19g22450.1 (locus Gly ma19g22450) derived from phytozome v7.0 (chr-ID Gm19; pos 27215177 to 27215883)
cagcccggagcagattcgcttagcgcctgataaatgtatgagaatttgagatatgagatttgaatattctgtgttgcttaaatcattgcttatagaccaaggcttttgaattgtggtcactttcatgctcgaattgtgggatgttgctgcctaaattgcggtcatggacagctttttaaaatctggttgcttatagatgagttaaataaataataaattgtgtattgaaattattttgattggttgtgagatatttattgtttggttaattattgttatataagaaaaggagagatgctattgttggttgacaaagagggaaatttttttagtgagttgtgatggttcaattggagggagaagaaagggacggttgaaggctgaggagatttcaatttggcgttgatgcttcttggttttggtttgtttgatgcttcttgattttcgtttgtttaatgcttcttggttttggtttgtttgatgcttcttgattttcgtttgtttaatgcttcttggttttcgttggtttaattttttttttctggaattttgtagttttgtctgtgtgtaggaggttgaaggatcaaagggagaagggattttaatttggtgtggatgtttctcagtttttgattgagtaactatgtttttattttttttggaattttgtagttttatctgtctgtaagaggttaaaggatcaagtg

SEQ ID NO: 26669 - DNA, 714 bp, Glycine max
  Intron number 2 from transcript Glyma18g05700.1 (locus Gly ma18g05700) derived from phytozome v7.0 (chr-ID Gm18; pos 4343073 to 4343786 reverse strand)
gtttgtttcatactttcactttaaatattcaacaaacttcaaatgtttaatatcttaattgttagtttttctcactagtgctccaatccaccacatttttctgttttctatctaccaatcttatatttcattcatgtttaatgtctcatcggagaaaagtcaaaggaaatcactttataaaaatggtttggttaatcaatccaattaaattctttaggataatcaatctatagacggataaaaaaatggataacccaattgaatctaaaaatccaaattgtttcagaaaaattgaaccggttcactttataaaaacggttcagttaatccaaccgattttataagatggatcggaaatggatccattcggatctttaaaaaatctccaaattttgcacagccttatcttcaacgttgagagaaattacaaacaaatacagctcatgtgtttgcacttgtggccgcgataacttcaaaattcttaatgttcaaaacactaaaatcaaatttttatcatatttctaaaacttaatttaacttaacaattgctagcaatctaaaattaacattcttaaactcaagcatgtaacagcttttaatacgaagtttgtaaagtttgaatatggttgaatttagtagtaatggccattgagttgatacttgtctttcaattttcaggggatttacaaagttcagtcgaagtgagtatttgaa

SEQ ID NO: 26670 - DNA, 817 bp, Glycine max
  Intron number 1 from transcript Glyma19g34300.1 (locus Gly ma19g34300) derived from phytozome v7.0 (chr-ID Gm19; pos 41921301 to 41922117 reverse strand)
ggcctgtctctcgttcatcccgtgctgggatccaggtaatccatcttcccttttttttctcagattttgtgttcttcgttgtgaattgccctagttttcaaccgaaagcatcgtgaattgaacgaaatttgactaggtttcatgccccttgttatgaactgaatgtaatttgtgttcctgtaatggtattagaagtatggttactgatgtctggttctaatctaaccataaagcaataaacttttgatgttttcattatgaattatctaccggtgatggtaaattgctcgtaattgtacctgaagatgtaaattactgtttttttttttgtcaatttcgtgaagaaaattaaaagaaataattttttaccgaggtctgttagtttaagtgacaggagagtctcaaacctgagtcttgtgaatgacaaaataggatttgaaagaattttgccctatacatgcctgacttgactcgaatgatattaagctttttggaacaatcaagatgtttttgtactgttggtgtataaggctgagatcttaggtaagggtgtgcttggtttacagttccatcgagcataactcactttttcccaattcactgagtgttgttgcttctccattttgctctttggaaaaaagtgcaaatgaacgtttgttgcctttgaaatggtaatccaaacacacgttaaactgtttaaaccttttcactactatgccaactctagtacttttgttgaaattctttgatgcatagatttgcttttgttttgttggatgtagtttcctgtgggtcgtatccataggcagttgaagca

SEQ ID NO: 26671 - DNA, 441 bp, Glycine max
  Intron number 1 from transcript Glyma17g21530.1 (locus Gly ma17g21530) derived from phytozome v7.0 (chr-ID Gm17; pos 20909457 to 20909897)
attttcctcttgtgtaagaggaggtaacatttctggtacgcgttcaactttcttgttgaatttgaacttcttatgcattcttttcttacgtagtttctttacaacatagatatttcattttgttgattgttgctattgattattgaaataaaaataataggtactaaaatgaaatgtcaattttgacttatcatgacactgagtttaagttttttccatttaacattttggttgacattggtacatcttatgtatttaaagtttattccttaaatttaagaactttagtatttcaattttcaccatcaaatcaatatacgcattgttgttttagaaatctctcagtacttcaattcaatttcatcatagattaagttgaaattgcaattcattcataatgtaaaaatgacattccaaaattaacagcgtgttagggacaag

SEQ ID NO: 26672 - DNA, 861 bp, Glycine max
  Intron number 3 from transcript Glyma19g31920.1 (locus Gly ma19g31920) derived from phytozome v7.0 (chr-ID Gm19; pos 39695089 to 39695949)
tacctggtgttactcaagacattgctggattcaaggtctggttaacagacgttaatgtgaaatatagaattaaactaagatactatgtaatttaaggtcattatttttatatggactggtgagaagaggggaagataaacaactttgtgatataatgtttaatttgttttaacttttggttaaaaaaattaaagacaatgtattatgtgtcctgttttgttatgtcatcacaataggaagtgtcccaagactagatgcactaatgatttcaatcagtttgaaaacacaattaattaatttctgtcatataacacccgcatgaacgttaaaaaagcttgcctttttaacttatagttgaaaattcttttaaaatactagtgtaaataattgaagcaattttaagatcatacattattagtataatttctttttgagcaaaatacaatcatgtatgagtgaggtatatctatcaaaatatcaaaatgcacatcaaacccaaatacctactaactgtacccccatgtactgcatacttggcatttgtaccacatatggcttactgtgttttggaaatggtttttatttttgtttcattagaatatatttcagagattatattctagtccggtcctaatcctgaaagtttgtagtaatggcttgaatatttattatttggcacttgaatgaaaaaattatttgcaaaaaataaggtagaaagaaaacagtgcatattctatccatctcctgcatcttgttttattattattgatctgttatttgtttctattttgagtgggtggtttccatagctacactatgactttgacctgacgtttcagatagcacataaaccaagcatat

SEQ ID NO: 26673 - DNA, 481 bp, Glycine max
  Intron number 1 from transcript Glyma20g30000.1 (locus Gly ma20g30000) derived from phytozome v7.0 (chr-ID Gm20; pos 38771012 to 38771492 reverse strand)
cattgctaaaggagagttcctatttgaatattcaggtattaccgaaataattttaattagcatttttttactggctatactctctttttttatgatgctagatgttagtttgttagtagaagatttgaatccacaacttctttctcattcttccttcaccaccaagctaactttatacatctttgaatggtactttcttttgatgagaattgaaatatatagaatgtatgatagtgaagttgaatgtgtgtgagttaaagaattgtatgaagaagattggtagaaactactttccactgtttgctaagttgaatgtgtgtcaatgatacttcctttattctttgattggtagattgatagtgaagttgttttttcttgtgcatggttgtttttaatccctatgcatgtgtatggaattaaatgatgccctttctgtataataaaaggtgaactcttgacaaccaaggaggcacaaaagaga

SEQ ID NO: 26674 - DNA, 855 bp, Glycine max
  Intron number 4 from transcript Glyma18g07050.1 (locus Gly ma18g07050) derived from phytozome v7.0 (chr-ID Gm18; pos 5745326 to 5746180 reverse strand)
cttcagagatttcaagaggaggtgggtttttctttcatcagaatccttttccgggtgttgggatttggatttcatttgcaaccccatgatatgtgtatcatgtgcttctcagcatccttgttcgttatgttctattattattgccttcatatgtttcatctgttgggtctagccatctagctgccaggttgtgttccttcattttcaaagtgtgttctttggttgatattgttttttgcctaagctgtgtataatattgagaagaggatctgataattagcaggtattattcatttgtgcatactaattatttgtgggtagctaatgtgggtaaacacaattgatgttaagatgaaaattctacttgttaagactactgatttccaacacttgatgctttattgctagttgatgcactcccattttagtgtttgtttgtcctcaccaacaattgtcaactatgcttcaatagttggcatgagttgaattattaatgaacttggcatgctgctcccattagacttttttcaaggacaatcttgaactaggcagataatttcttatttcattattagatgcactgattagattttgatgtgcttgaatgataatatatattttgaagtttcttgctaagggttaacgggaacactgactgagtcgagattttatattctgatctggtcagcactgattattctcctaaaggaaaagtaatcttttgactcatgattcaaattgcatgatgtatcatgtgatgaatcatagacgactcttaatcttgcaatatatggatgatgatcttattgcctcctgcagaacccaggttttgatttttcacaagctcaattttct

SEQ ID NO: 26675 - DNA, 437 bp, Glycine max
  Intron number 3 from transcript Glyma18g07050.1 (locus Gly ma18g07050) derived from phytozome v7.0 (chr-ID Gm18; pos 5746300 to 5746736 reverse strand)
ccggtgaagacagattcttctttttggaccttaggtaaaggtttaagcgatttccctaattgttttttcttttttttttggctcaaatttataattatatacttttttttaattaagcatttatgcccttatggtgtaaaagtttttagttgttttatattgtgatccaatcagaaactgccaatctatgtattataagtttgttaatttttataataattaccttaaaagttgttgcagtaatgatttccaatttggtggcagtgtaaaactttgacacatgtcaattaaacttatatttttagtggtattgttttggctttggaatcaattgaggaagacttttgttttcagaatcaaagatggaataaatgtgatttatttggtgaagtttgatggtgatggtgatggtgattttggaatttgacctgcagagg

SEQ ID NO: 26676 - DNA, 403 bp, Glycine max
  Intron number 1 from transcript Glyma19g08510.1 (locus Gly ma19g08510) derived from phytozome v7.0 (chr-ID Gm19; pos 9971679 to 9972081)
gtccaaactgttcttatcatattgataacagtgatgtatgttacaatttgacattatattcattctatgttcataacagcttactcaaattcacacatgcactaaaaatgcagtaatgttagaagcaatttctgctcttacagtagagcttttcatgttactatagagactgtttatgctcctattcctttatcctttgttttttttttttttttttcttgtggtacacagaattaattctattgtttaatgtgcttgcgggaaagtttgcatactttacttctgtagcaggattcatttcttgaaaaagtttagcatgagtttgaatgatagaagatgtttcattagaaatatttctttgcatgtaggtttctactgagtggcctggctttcctcttggtgt

SEQ ID NO: 26677 - DNA, 599 bp, Glycine max
  Intron number 2 from transcript Glyma19g08510.1 (locus Gly ma19g08510) derived from phytozome v7.0 (chr-ID Gm19; pos 9972199 to 9972797)
aggaatttgctacacacatccggaaaatcttccaggtgagatttctctgacctttttgctttcaattcaaatatgtaaacttttaccactctttttattatacttgattgatcaatgaacctgtaaaatgaagtcattaatcaaaccacacaaacatctggaaggaagactgatcaatgtaagtgactagagatgtcccttgtggaactggttatggaaaagtgccatgaatgacacatcaatgtaatttgactgccttttgcaccttagaattcaatgcatgtttttaaattgatgtttgaaaaaataaaacaggacacaatataatctaaaaacacattgaaagtttaagttcattgaatctcaatttccctgttagatagacctgaacctaatcaagattctaatcatgctgatagttatgtttaatgcttcactgatgggggttgagggaaggaagaatattttattgccagaaaaacttagtggcttctaattatgattatcttataattaaatctacatgtttaggctattggcccttttctggaactgtgtaaccaaattatgtctattttgtttttcaggtgctaagaaag

SEQ ID NO: 26678 - DNA, 676 bp, Glycine max
  Intron number 2 from transcript Glyma17g34890.1 (locus Gly ma17g34890) derived from phytozome v7.0 (chr-ID Gm17; pos 38864899 to 38865574 reverse strand)
ttgtatctaacattgcagatttaatctgagctttgatgttcctggctgatgaaccagttccattatttaattgttttgaaggttgatatctatttcttctctttatcttgctctcctaaatggagcagctgacaaagtcagagccaaaattggatctctctagatatgcataacattattttactgagggctatctaaatttcatatggcaggatctttatttcataacattgtagttgtatcattctttagtttcttctatatagccgaatagctcaagggaaaattggtgaattaaagataatatgttggttttgaacatgctaggtatcatcaagcattttccttatgaccaggagggccacaatataactcatagcaactctccgggatctctgcatttgtttctactgttttcattttgatttaatgaatgagattgtttgctgcttatactctttatgaatcgcagtggatgatgtacattatttctgtattatttataaatgagatattgctgacttgaatctcataatgaatggacttgttttatatttttaattgttttcggtattcttttcctatctgtcccatttgatacacatgtcataaacttgaataatcaagtgtgaaagtcacaggtggaggctatacaggcttgtggaggccagaagac

SEQ ID NO: 26679 - DNA, 549 bp, Glycine max
  Intron number 1 from transcript Glyma19g43520.4 (locus Gly ma19g43520) derived from phytozome v7.0 (chr-ID Gm19; pos 49155445 to 49155993 reverse strand)
ggaacgcaaccgccaccgagatcgttttgtttgtggtgcttttctttcttcctcactttttctcatacctctgcaatgtgcctctcttattttcctatttcggagatctgttttgttcttatttcaatgcttatgtcatgttttaatgttcctgtttttgttaattaaacgaagccaagccaaaccatggactcttttttggttatttctatttccatttaaatagattttgtgtatatttttcgtccttgggccacgttggaattgcctttccccgacctcgtcgttaaaatttgcatgcgtgtttccgaatgattctgctgttattcccggaataataccttcaaatgcctctcttaccgcttttctccggttacaagtcaaaacacattcaaaaccgttgttgttgttgtggtttttttttttttgtttcaaaaaataaataaacaaaaaggtttctgagtagttattagaatttctgctagagaaacattttttttttcttttcaaacagggtgtcgtgcgcgagattaattcattggcgtcagc

SEQ ID NO: 26680 - DNA, 705 bp, Glycine max
  Intron number 1 from transcript Glyma18g03180.1 (locus Gly ma18g03180) derived from phytozome v7.0 (chr-ID Gm18; pos 2098489 to 2099193 reverse strand)
ccgtggcgccgccaccgccgccaacattgctttcggtactgtcgatctaactcaacttcccttgttctccaagtatatgtgaatgttcaatcttccttttatttcctctttccttctcaattctctattctatttatcgcctcatggaaacgattactattgaagcgtgattagtggttaagataattgaacttttttgaaaattgatgtggaatgtatatactttaggtaaaaatgtttcaatagttaaatttatgtatgattcttttctgaattattgagtatgattgagtaaaccaccgatttagttttagtttgtgaaagtgtacactgtacggtgctgtcacatactacctatgaaacttctaaataagttcttcgaagtaaaatccgtcaatcacatgagtccaaaatgaaaaaaaaaaaatgtttgatttaagttatagtactgacatatgtttaagaaccaaaatgacagtaagtggttaaatttaggatttagatgaaacaattggaacttttagaacttatttagtatttccttagtttcagcaactaatgtgacaaggtgatatactttcagggaccaaaatggttgtgtactgaatcatgatttgtgtgtaggctagcaaacatattgttaactgtttaattatgtgacttggatcagtagagctgattctgattatgtgttgttggtagatt

SEQ ID NO: 26681 - DNA, 934 bp, Glycine max
  Intron number 1 from transcript Glyma18g34910.1 (locus Gly ma18g34910) derived from phytozome v7.0 (chr-ID Gm18; pos 40891677 to 40892610)
gaggtacttttttttaataacccagctctgcatgtatatatttatattgcaatcgtttttatttagtgttcactctcatgactaatacatgataacttaacgaaaggtaagggtaatttctagtgaatttagcttttaaatcttataggctggtttagtctttatcttttgactttaacatgtgttaaaaggaatagagagagatgaatttcatgataatttatggaaatgaatggaagatagtagttatttcacacttaaattatagggatgctgattgtaatgaagcatttaatttttcttgatgtcaagaatcacaaaccagaaggtcaggaagtgagtgcagcaggagtaaacattgataatcacatgaatgaaggcagtggctggattaactcagcctaacaatgcaaagcctattgctgattccaatttttccaaggctaaaccagaagattctttggactcacaattcaaaccgccagaagcttcacaacttgtttttgtcttcactattttattcatgtttggttgctcaaattaaatgtattgatctaattttttaacattgctatttttctttgtaggggaaaacacacccaactcaactttttttgcttttgatgtccaccccaacccaattatgtgtgtttaagctgtattagcagtgttatttgttatattttgtgaaaactgggaatttcattttgtaattgtttgtttgtgtactgggcttgttttattgcagaagcaaaggagacactctcttgttttgtaactgccttttctctcactttggtgtcttaaagatgaaaatgtatgtttctaccatttttgtttgtttttaaaattaatacactaatttcaattgaactttctcttttatattgggatatgattgatgtttaatagctttgtcacagcttagagggca

SEQ ID NO: 26682 - DNA, 734 bp, Glycine max
  Intron number 2 from transcript Glyma18g07520.1 (locus Gly ma18g07520) derived from phytozome v7.0 (chr-ID Gm18; pos 6231560 to 6232293 reverse strand)
aagatctcaacagcgtggacaaacaccaccatacggtattcagttcaatcctacttgcatgcattcttctcaaaatatttgatgtgtctcgcaaatacatatctgcattaatttatatactcgtttcattgaatttgattgcaaaatattgaaaccatgtgtccttgtaatgaagactttatattcaacaggttacctaggcttgtgtttagcatttacaaattagatttggctctttctccttatttattagcatgacaatgtcatgtgttaaataaacaagatagaaaagcaaaagtaatagacatttataatagataatttttatattagtaatatgatagcatctaaatccttttacaaaaaatcataggcgttacatgaatgaaaattgtttctgagagaatattgtatggtttttaaccatgagaaaatgatagagaaaggccaaaaaggatggagaaagaaattgttgcggggaatataatagtaaataaacatttttgagaatttgttctttcactgagttcattgagattttgtgatacatgtaatcgaccccgtacaataaaataagatttttgttgttaaaataagacttttgttgttatagatacagaagaaaaaaataaatgaaaaaaataattatataatgcaatatcaattatttatgttaagcaattcatgaatgtgtcatccacagactggaacaggatttatcaaagtagagaaaa

SEQ ID NO: 26683 - DNA, 530 bp, Glycine max
  Intron number 1 from transcript Glyma18g07520.1 (locus Gly ma18g07520) derived from phytozome v7.0 (chr-ID Gm18; pos 6232339 to 6232868 reverse strand)
atccccaagagaaggttggttcctaatatcatctctaattttttcttcttcataatttcacttttatagaataataacaaaagaagtaataaaaaatgaaaattgcgtcccgtcctaaccgttggactacaaacgcttgtcatgttacttagcattactttttgaacttaatataaaaataatcttgaataagtacccagattattagttatctgattcacttctgattttgagactttgagttatacaaattatgtttttcttttaaataaccttcgtatgggctagatctgttatttatttaacaaaagggttgacgtagtggtaagatctcattgtgttcagatgtggaataactcatttaacagcagaatttttcttagactaacaacagttacacaccgtgttctgacccaaaaaaaaaaaaagatctgttatttatttataagctaagatattatgtatagactttaattttgatttcattgaatccttttactcctgtaattgtattcagaaattggtgtaca

SEQ ID NO: 26684 - DNA, 549 bp, Glycine max
  Intron number 1 from transcript Glyma19g41560.1 (locus Gly ma19g41560) derived from phytozome v7.0 (chr-ID Gm19; pos 47795896 to 47796444 reverse strand)
attcagatattattttcgtccctgaccgggtaagcttttggtgtaatatcttttatttatttattttggttatctcacgatagatttctacttttttgtgtgaaataattcaaaaaaaaaaaaacaaacaaacaaacataaagccattgataactgaatagccaattagttcgaaaaataaattaataacccgaagcaacatcaaaatgcagaagtatacagataaaaatttgttctgcatgcagacttcttcaatctactaattagaccatatttaagactctgcatggaattcctgccaaagatccattccaaataacatgaacagaagtggaataagatgaaaaagtatacacctgaaagtaatagggggattggaaaatcagctatttagacttttaattttttaaattattttttccaagtcactatttttaaagctctagtagataatatagtgaagatcatgaactatctcgttttcttgagcatatattggcattttaatgacacaactcagcttgaatatgcagagttacaggaaatcag

SEQ ID NO: 26685 - DNA, 758 bp, Glycine max
  Intron number 6 from transcript Glyma18g16280.1 (locus Gly ma18g16280) derived from phytozome v7.0 (chr-ID Gm18; pos 16709857 to 16710614)
aaacttttagagagagtcgtactgctgcagctgctgtaagtaccattgcttatttggtcttttatttcaatgtggaacagagctttaaaaagaccctgctattttaggaggatcgtatgatctcttgatttctttattttaactatacaactcttctttccttaaatgataatggagactagcaagcaatatcaatccagagagaagaaaaatacagatatcactagagaaactgaaattgaaagaaactactgaaaaaggacaatgcagctcttaaagggtttactagcatcccacactttctcctcaccttccctgtttccacttctaataatttcctctagcaggtcacgccttcctcaattccctttcttgtgataattctgttattggtggatccgaactatccacgttggcattttatgaccattggttgttctacatgcctgacaagttcacttttgatgctaccaaattatacaaccaagagagaacttaatacacattatttctgaatgctttctaccaattgtcactgtatatcacatggttaatttaatagtaccattgtaaatggcagcttgtcaagggatcaagggactacttatattgttaaacttgggcttgggggaaactcaaagacaactgaatccatgagtaaataacaagaattatatgtttttgttagttaacataaatcttggccttatttcatccatgcaggagttgaaacgtcaggcacaaagcgcactgccaaa

SEQ ID NO: 26686 - DNA, 534 bp, Glycine max
  Intron number 2 from transcript Glyma19g29360.1 (locus Gly ma19g29360) derived from phytozome v7.0 (chr-ID Gm19; pos 36909989 to 36910522)
taccaaactgtatgtctctctcttccatttccctcttctgtttccattgctcaattctaactttcaagttattgttgttttggtgaaatttggagaaaaaattggacttttttccttcttcttttcaaatgttttttttttatcagctcttcttttcaaatgtggttcataactgaagaaacaatgagataacaaaaaattccctcccctttaagattaagatatggtaatgggtgagatagcaggttcttgactctccttaagtttgagttgcagctaatttgaccatcttgctctttattgacactttcctccttataaatttttgtcatttgtttttaatttggtaatgtatgtatttttttttttaaatataaagaaatgaacttaactgtgtgggagtcaccatcttagacctatgcttgtatttattatttactggtggatagtgtttttccattcatgtacgaaaatgaatatgaaaacgggctgctcaatgttttccacaggttgggcatcaaattattgtcagat

SEQ ID NO: 26687 - DNA, 319 bp, Glycine max
  Intron number 3 from transcript Glyma19g09850.1 (locus Gly ma19g09850) derived from phytozome v7.0 (chr-ID Gm19; pos 11623758 to 11624076)
gcagagagaatctcctattgcttactgtgcacaatgtaagtttgatttgatcacttttctttttctttttgtttataaactcttctatctttactaacattgtttttctccatgttcttcctctgaccttcaactcctattctcaaaataaaatgaaaatgcgtaattcccttaggctgttggcactcccctaatcccttcattaagttttattaaattctatgttttgcttaatagtgcatgatttctttatttttttctctttagtagctggctttggaaagttgtcagtttgattattgcttacaagattggcttg

SEQ ID NO: 26688 - DNA, 503 bp, Glycine max
  Intron number 1 from transcript Glyma20g24180.1 (locus Gly ma20g24180) derived from phytozome v7.0 (chr-ID Gm20; pos 33886260 to 33886762)
ggtgtctctttctgctgtacgtggattacccttctttctgtttcatttgcctgctcacgttttttgtgttttttttttctgtcaaaaaaatgtgttttttgatgagaaatatacatgctttaaaataaaatatcctctgaaaacatgtatgagtggatgattaaggtggttcacttctgattattgttttttttttgttccttgttgtgcagaaaatcgtgtctcttattgttcttcttttttccttttcttttggaacttggaaagggatgggtttgattggatagatattacttttttgtttgtttgtttgtttaacctataaatataagtgattttttttttttacataaaaaatataatttgttttgctcaaatttgagtgagaatttttattcactttttctttttttcccctatatgtaaggatttgatgttcaattcgagtttgttgacttgatgcaacagtcacagttgggtgggttggtaccaaaggtgaggca

SEQ ID NO: 26689 - DNA, 909 bp, Glycine max
  Intron number 1 from transcript Glyma17g12100.2 (locus Gly ma17g12100) derived from phytozome v7.0 (chr-ID Gm17; pos 9135225 to 9136133)
cctgtctcttcctcaccttctgcaacttctctaaggtacttcttcttcttcttcgctttctattcccatttttcaccttcagaatttgcattcggtgtgaagcaaaatgccttcttcacaattccgagaggtgaatttattatttttttctctttttttttctgaaactctttggttttccatttaatagagattctggggagggtgaatgattcctttctcttttctttcttttttttttgtttggggggaagggcggaatcgattaaaatgattccttttggattctttgtgtttggttttagaaacagcttgattccaagtttccgaatccgttcttttatgatttatataatccgggtttaggaacggattattattaattgctattaattttaaagttaaagccatcctttgtaaaggaatgtcattatacgaggaaacaataaaagttggaaatatttgtgttaggttaaatgatattcctttaaagagttatgctacaagctagattaattcatcatttattatcattgacgatataagtggacgacttagatcacatgtttcagttatggccgtttagttatgttatgatagttctcttgccgaacgtcctgttcatatgcggagatttattttttatatatatattatgataaatgtctacagttttcttactaagaaagcatactgaagtatcctttgttcatattttctttattgactcttggaaattttggtatatcctgctaacaactacaatatctagtttcaaaactcccttgtttagtaaagggttttcttttcatcttttttatgggcattttcatggacctttcatagaatatgttcacattttattagtattgtttttaatcccttttgttcaaactgctgcaggtgaac

SEQ ID NO: 26690 - DNA, 902 bp, Glycine max
  Intron number 1 from transcript Glyma17g14020.1 (locus Gly ma17g14020) derived from phytozome v7.0 (chr-ID Gm17; pos 10786476 to 10787377)
gcttgacagaagcagtagcgctgcaaaaattagaggtatttttccccctttttttcctaattataaaaagtacttgataggttttattgggatcgaaagaagaagaaaaagtaacggaatttgaattttcaatactgttaatcgatcaaagttagggtttttatgcattgttggctgcagttatcttttaattatttattaatgtttattgctgtaaattttgcaaaagatggtcgatttgtgtgtacccatgttctttctcttggtgaattttgcagtcacagttaattgattttctttttctttttcaaatatgtggatagattgtccaatacttttttggaggggttgtatttagttctagagtgttggttttactagaggtacaatttaagtgctgataaggtgaagactttattctaggaatatagaaattacagagattgatcttaccattgcaattttcttcttttttttttttaacatgctatggggttaaaaatgggagtgcagacaggcatcagccataagttaatatgttatattatattatctttaatgctggtaatgttagaaatctgcgttggagtaaataacattaatgtgttttgaaagttttgccatttgtctgatctcaaatgatgattgatcagatgcttgcaaatgagctcttggaatcttattgcttattgagataagattctttataagtgatcattactgttatgcgaatttctgcttctaaggtctacacagattttctgattgttatatgaaactagtatctggtgactggtttatttgtacagaaaaagttgtgcttagcttatgtaattaagagttgatacattttcagttatatatctcctcttcatttgtaaatattgtttcttgtcaggagc

SEQ ID NO: 26691 - DNA, 538 bp, Glycine max
  Intron number 3 from transcript Glyma17g10090.1 (locus Gly ma17g10090) derived from phytozome v7.0 (chr-ID Gm17; pos 7548887 to 7549424)
cctcaaacattcaaattgtaagaggaagagcagaggtagcatacactcctgttcttttaacaagcatttccgtctaaaacgaagactgggacaaggggtttacaataacccatgtaccatgttcaaccaaccgagttttttgttaaagtctagaatctaggtgcattttcttatgcaaatttgaattgttttcctcagtgtgttgcatgataattttcatatttgatgtcgttaaaaacgaaaaaaaaaaaaaaagatagaacaacttaacatgattttacattgcatgttatgtatgaaaacaaacactggagattattaacctgaaacacagttttcctgaaataacatgggagcgcgtatcttaaactgaaacactttcgatttccaaaggcattcgccttgctgttatgttttattttacttttagcatcaccaacttctgccaatccccgtataccttctactgcctgaaaatatgtcttgtcctgtgcatagggcagagtttagggcaggatccttgcttcagagagcaatt

SEQ ID NO: 26692 - DNA, 915 bp, Glycine max
  Intron number 1 from transcript Glyma18g37740.1 (locus Gly ma18g37740) derived from phytozome v7.0 (chr-ID Gm18; pos 45028008 to 45028922 reverse strand)
tcgggccagattacaagtctcaagtctgttcaaaggtttcattcctcttataagctctataaaacatagaaatagttgttaattcttataagctctatagatagagcatctatacaatcttagtcttcttgtatcttttctcattttaatcaatccaatggggtatttctatagaagtcctattctattctattctattatgatctataatgtttggcctcatcaacttggaataaattgcatctcatctcaaatttctgatatagaataaaatacctaaaatttgcaacttgttgtatgtggagtggacttgggtggataatagactatgggagttttgttagacatgttaaactagaggaggcacatgcaaaagagagttcaacattttgaagtttattagaatatgtattgattatcattcaataaaacgagttaatggaaaatatagggaaaaatgtgctaaatgtttctgtcagacaataaaagttgataaaacttcattggttgatgtcagttgaaactaacgtgtcatgggttttagttttatgaaattccctttgttatttgttggtaactcttgactagcacatttttatgcatttaaaaatgaattccgaaaattggaatacctcttctttattagtatggatagaaaatcatagttcttttcaaagaaaccaggatttcatttctttgcatggtttgttgcctttaataagattctaaatacatagcacatgatggttctgctagttcatgctgttttagttatatgtaatgttgattggctgggagtatcagtttctcaataattcaataagcagcgatccttgttgcttttcatgcttgctatcatgaatttggcagtctgacctttcaatatttattttttgttcagaaagtattccagaa

SEQ ID NO: 26693 - DNA, 562 bp, Glycine max
  Intron number 1 from transcript Glyma18g33760.1 (locus Gly ma18g33760) derived from phytozome v7.0 (chr-ID Gm18; pos 39846942 to 39847503)
ctgaggtaaatgaatttgtcatagaagttgtttcttttctatttgtgtgctttttctcttttaactgctcaatgttattgctttagaggtgttaaataaatggaatattatggtctatgttgttcatatcctgttaaatgttgatttatctgccagaagtgcagtttctattttaccttaattgaggaatattaatcatgcaaagtgcatctaaaacattgtctggagtggcattttgtagcttcttcctcaataatttacatgatttttctttctttgaagtattctatatcttttcaatagagatcccgatatttgattattattgatgttcattacagagattcagtaaatgcgctattaaaggattgttcgtctaaattgccattctttgatgtttgaaacctttttttcctacaacttctggcgaaaattaaaatatgtatttttctagacatgttgttgtacaaaagaaatatttttagacttgcagtatattaaaggctggtgatgttttcatgctgcaggtttctgaaagccagaaagttcgacattgataaaa

SEQ ID NO: 26694 - DNA, 800 bp, Glycine max
  Intron number 1 from transcript Glyma19g07410.1 (locus Gly ma19g07410) derived from phytozome v7.0 (chr-ID Gm19; pos 8758490 to 8759289 reverse strand)
tgcctccaataccctcaggcttagctccttccacggtaattctctttctctgagttctgtgattgagattctttattcttgaagacgaagtgttaatgaatgcatcaagtgaccaaattagtttcaagaattttatgaacatgggttaatttagtccctgaattaacaaaaaaaaaatgtaattttactcctttaaattaggtaactagtgatggtcattttagttcctgatgttattaaatgacagttattttagtcttgaaatagtaaaattaaaaaaaggattaattgtaattttagtctccgggtgttgtaattgtgcgattttggtctcttttgttccaattgcgccaattgggttcctcaagatttcttccatctacagtattggatagaatccggatggagggacgtgattggaaatggagaaaaacttaaggatcctattggcccaattagaacatgtgggaatcaaaatggtactattgcgatgcaattgcacaaaaaaaggactaatgacttatatttgataatttcaaaaattaagatgacattttttacaatttaatagattagattgactgatactcagtaatttcatggactaataaaatgcattactcgattttggactagtgcattgtgtaaagtgatgttttaaattgatgctttaagctcaaatatatctggtggattaaggcttttattgttgttgtttctgtatggtcagacataactttccttagtaaataaacaatctttcctttagaatcttaaatttccaattttgattaattcag

SEQ ID NO: 26695 - DNA, 825 bp, Glycine max
  Intron number 1 from transcript Glyma20g31850.1 (locus Gly ma20g31850) derived from phytozome v7.0 (chr-ID Gm20; pos 40457227 to 40458051)
gcaatttggatcaaattttatcatctttagtttgggtgattcgccccctactttttttcccctctttgtattttttaaaatattttttctttttttttgaaggtacggttgtcggaaattttttatttttttcatcgtttttgaataaataggcgaatttatgagatgggtttgggtttttatgcttaatttttcgattttgtgcaaacttttaaaatgggttgtggtggagaggtcgaatccagaatttttcattgggttttgccttgagttgactttttggggatgcagaagataactgataaatctgatgataggaccactgggggttgtgaatcaatgcaagttgggaagtgggaatgctcaagttgcataaatatgtagtcatgaattgatatttgatatttagtgtagcctttttttttattgaatcacaaagggcgagggataattcggatccaaggtgcaaatcttgataaatttagagttattttctgtttctggactgcaaaaatcatgaaaaaaaaattatttgatgttgatccatccatgatatcatatcgattcagtgttgtattaggttttgaatactgatatgaacttcttgggtttgtgtgcatatttttggtttgatctattagataaatttagtctgattttaaaggtttttgaccctttagtcttaaggttttgtttaattttgtttgtcagaattctgagaattgaacttactgaatcctccacagtttgtctcttaacccaaaattccataaagtattcttatgtatcccttccctccatttgcaggttttttgaagcagaaga

SEQ ID NO: 26696 - DNA, 318 bp, Glycine max
  Intron number 3 from transcript Glyma20g31850.1 (locus Gly ma20g31850) derived from phytozome v7.0 (chr-ID Gm20; pos 40458830 to 40459147)
aatccaaatcatcaaaaaataatccttcttcgcaggtatacattacattcaatctgctgttcaagtcactattaccaagacattttctataagaaaattttcttgtgaaagtttgagttatgaattacacatttgggcctcctaatttgttttttcattttctttttttcgaaagtggggtggggagggttaagaaaccctgtagttgaagacaatcacagatatttatttctaaacatttaaagaatagtacacatttgaatcttgatttagattgctttatcaatgtccctgatttgcattaaactgatgttcagg

SEQ ID NO: 26697 - DNA, 686 bp, Glycine max
  Intron number 1 from transcript Glyma18g06250.1 (locus Gly ma18g06250) derived from phytozome v7.0 (chr-ID Gm18; pos 4826734 to 4827419 reverse strand)
attgctttgttatacgttctttcttctctaactcttccttcatctgtttcactctgactcatgcatgaagtgcacgcatgcatattcacacacgtatgacttaggtacaaaatatgtagaataaaaataattaaccaacttatattctcacatgatatatttgtttttaattgtaagttattgtttcctttttcctttttccttttgtgtgtcgttaatactatgatattagatgcattcttaatttttgtcatacatatataggaagaaattattaaatatggtcttagaacacatgattcatcattcacacatgacatataatcaaatgattattagagttcaaataattatataattacattgtaaaacagttttatattattatttaattataatttagcattaatataattatttttaagataattattataaaagtaaataatattattatacattataatctgtaatattagatgatattgttaaactgtattatatcattagtacataattttttttctcatatcatcaatttttgaatcgtaaattgaaaagcttaaatacttatcatgtaaaaattggacttggtcaaggaatagaatgtagccagctagctggtataagtttccatgcattacacattgtgtcttcactgattgattgttatgaacctcgtaggg

SEQ ID NO: 26698 - DNA, 1010 bp, Glycine max
  Intron number 4 from transcript Glyma19g03090.1 (locus Gly ma19g03090) derived from phytozome v7.0 (chr-ID Gm19; pos 3206198 to 3207207 reverse strand)
acggtatgattcatttattttaatgtcctcttttggtattggtaatttggtattcagagatgattaatttttctgtgaaactataacaaggaaacaatttgatcatcctttttcttctctgctatttactttttttattaaaattaataggttaggtgatggcttattgttgctgatattgtttttcctggtcaagcaagccacacccctccctcattactatttctttagccattgcaaacataagttgatttgtagttcacatcggaactgttaacattaatgatcaattaagagtcttctttgaagctatttgaatgggagggacagggataaaattaagatcaaagtatgtggactaaaatagtattggattctcattgatcaataagtaatttgttgttgccatgttttgtgatataagtaccttttctgtaaggtacacttgattctctcattagtcctgtattggcttaggatggcctgtccattttcacatataatatagccaagtgttagtttgtttcctaagcaatgcaaaagtaactttatactatttttaagaattgtaatgatttatattttttttataaattatatttaactaatttagaccaagtaaaatcattgatgagatacagatctaagttattataaaattaggataagcactaaaggtttaatttgattattaatggataaatagatttttagtatgtttaactttttctactagtagatgctttgatatcaaataaatttttggcgaactggttgatgaggcctcctagatttatatatatgttagattataaatttgcttggctacattcaggccaattgtgccaaatggcatttctattgtctgatatccatatataaagaatgaatctaagcttagattcaatcttcatttctgatctcccaatttcttggaatggcaataccaaagctgacaccaatttctaatgtgaattcattaggcatctgcagatcagagaacaagatta

SEQ ID NO: 26699 - DNA, 338 bp, Glycine max
  Intron number 2 from transcript Glyma19g03090.1 (locus Gly ma19g03090) derived from phytozome v7.0 (chr-ID Gm19; pos 3207505 to 3207842 reverse strand)
gaggtactagaagattctaacttgatcttacttttttttttattaacaagttttcttctgtagatggtttaatctgtatttgattgtataatgaatagtttcagttaatttgtaaagttcttttggttattctgtatataggtattttttctgtcgctgaatatagtctaaaagtttgagttcagttacattgctcgaatttggatagtggcattattgagatggattagacattgaatcttatgatttattttgaagtaatgtatattccataattttttatcattttctgtttgtctgcagagcaaaagaaacagaaagtttctgaagtaaaggct

SEQ ID NO: 26700 - DNA, 612 bp, Glycine max
  Intron number 1 from transcript Glyma18g48710.1 (locus Gly ma18g48710) derived from phytozome v7.0 (chr-ID Gm18; pos 58155684 to 58156295)
ttctctcaatttctcgccctccctaaccttctacaggttcttctttcctcatcctctctctacgcttcttctgaaatgtaaggatttaacatctcaggaattttcctctaatgaagtgaccatggatcaaacatataagtgaacttgatactccacttataaaaaaaataaaaataaatttaaggccatgtttatggatcttatctatggggctctacactttaaaggcttttcttgatttcttactcaaatcatgatcgtcttttattattattattgttattattattattattattattattattattagtgcagtatttagtttcggcgatttctgttgccgatttttttgaggtaatatgaaaaattgtgagtgagcatgctgtttttgccaaatcaattttgtgaatagttcctcaattggtcatgtattcatgttttatggcgagcatttttattataatacgaaagtttatgcatgacatgagaattgagaacgctgtttttgctgattcaattttgtgaatcagttcctgcatgtctgctgtaattttttgagtcgtgattttttgcagcttgaagcaactgagaattctacttatcttgata

SEQ ID NO: 26701 - DNA, 1003 bp, Glycine max
  Intron number 2 from transcript Glyma18g48710.1 (locus Gly ma18g48710) derived from phytozome v7.0 (chr-ID Gm18; pos 58156324 to 58157326)
gagtgattacaagagtaagcctacagattcaccttttatgttttgttttttttttccttcatacatttatatccagtaggtgttttcctgccttcattgattgtttttcttttccagtagaatttggttgatgtactggatgagtatttgtagcaaccatctgttactatgagatgacatattcatggtgaattatgacttttgaatttattattcttaatgcaactgctggatgttagcaacatgagatggaaagttgtaagttttaatttctgtaaggaggttgattgggtgattgaaaaatgaggagaacctatagggtaagtgggtaaccattttattgttttggcttttttagttgtttttatttgtttgcctatagtgactattggttttagatttttattatttgattgtttaagaatttctgtgtcttttctttatataaataatgtattgattttttaatttgtgctactttcgttgagtttatattttttattcttgatattaattggtaattttttttcattaaaaatctgcaggacattgtagtttatatattacagttttttaacatcactgccatgtttctgcacttggctgcagcaccatccaccatcaaatatggtgtatttttagctcgttgccttgaactactattcattattgacatcactagttttataatgcttctcgtagctattgtaatattacgggtttacttaatttaaagtatgcatgctggaatagaagattattttcattttgtgatttctcatagcccactattattgtgccctataatacaagaagcctttagacacctcacattattttctactttgcagtttgcaacaatataataaggaaaattcgtacatttatattcatttaattatttttgtatttttttcttgtatctttgtttctttacaactttgtacataaataaataaaaaaaataactgtgttatttaaaagtttaagttgcttgtaggta

SEQ ID NO: 26702 - DNA, 479 bp, Glycine max
  Intron number 1 from transcript Glyma18g13700.1 (locus Gly ma18g13700) derived from phytozome v7.0 (chr-ID Gm18; pos 13280986 to 13281464)
ccaagacattttatcttggtactctctctctgtcctgttttggtcctttttgtttttcttaatcattttcccttgttccaatgagtttttgtgcatttttttaaagttcattataatatcagtttcatattaagaaaattcagtcattgactaactgttgtgaagaagtaacccccttcatggttcaaattttaagcttctctcatccttcttggttgattctagaggaatattcacttaagagagggatctctataattcacttttgccaattgtactatgccttcactttgttgcaaaatgtttactataattgaaatggtttatttattcccaaggcagcgtggatcaacagtccattcaatgatttcaaattttggtcactattctttgttggtctatttaatgtttcttagtatatgttgttgttgtcaatttgattggttaattgtgaactgcaaatctcaggcacacaattg

SEQ ID NO: 26703 - DNA, 774 bp, Glycine max
  Intron number 1 from transcript Glyma18g40530.1 (locus Gly ma18g40530) derived from phytozome v7.0 (chr-ID Gm18; pos 49159299 to 49160072 reverse strand)
gagatcgaggcccactacgagctggggcgcggctagtttaggataacctacctctgtacggacaaggagacgggggaggagctggcatgcaagtcgatctcgaagaagaagcttcgaacggcgatagacattgacgacatcaggagggaggtgaagatcatgcatcacttgccacagcatctgaacatcatgactttgaaggatacctacgaggacaacaatgtcgtgcatctcgtcatggagctctgcgagggcgaggagctctttgaccacatcgtggcccgaggccactacaccaaacatgccgccgcccccgccgtcaccaagaccatcgttgaagtcgttcaggtttgatttgctgccttgatctgtggttttttcagtttgttggatttgaatttgtgtgaaaaaactgaaaatcgaaatcagttttctatttattgattttttaagccgtggacttaaggaacttgttaacagaatcttagtctctttcttttttatattatttgtttcaatgtgatatattctctttgttcaagcattatttatcttatacttggtttaattcaaatgtttgttctgggattttgttgcttttccctttaactgaacatgttctcactggcacttgtagaggttcatctaatgtgaatccaaatatgctatactaacttatatgtgatgatattgtttctttgaagataagtattgccatttttttctgtgatgatacatgttgattatagtgctccacaggctgagcatagagta

SEQ ID NO: 26704 - DNA, 755 bp, Glycine max
  Intron number 2 from transcript Glyma20g26250.1 (locus Gly ma20g26250) derived from phytozome v7.0 (chr-ID Gm20; pos 35753885 to 35754639)
gcagaaagtgaagaaactccttcagagaattgaaggtcctccctttcttttcacctctcttcttttcccatatcctgtcttgtccttactattcactcactatgctcattcttgtctacattatcatctctagcttccttagtttttcttgtacggaacataaaaaagctgtgttagtttttcttagatagaaatcgtaatcttagcatagtatgtggtgcattatattttatgatataagaatcatactcaaattgactagtgtagtagcattgctaactcacatcaaagggtttcctttcatgagctactatgtgagttaaataaaaacagaaaaccagaaacggttaagcctattcagtactgatttgctcctttatgtagacatggcatgggtgttttgtttttaaatcatcaatgggaagtttcaggcttttagttttgatttttggaacttgtagcagcttgaccttggtgtatgtacggtatggataatgttaagaacttaataaaatgtataggagagtttgtcagataaagagtacaacaacaaaaaaaaagctccaagtaatttgccatatgggagaaaatattggactgctatttaaagtgagaagcttattataatctttttattgtttgtcctatgtaagattgtggggtttatcttttaatcttttttaatttattgttgtgcttggaattgaaattttggtcccttggttgattaacaggtgtttaccaagttcaaatag

SEQ ID NO: 26705 - DNA, 505 bp, Glycine max
  Intron number 2 from transcript Glyma17g29280.1 (locus Gly ma17g29280) derived from phytozome v7.0 (chr-ID Gm17; pos 31714742 to 31715246 reverse strand)
ggtgaggttcagagagaatggctgaggaacaaatgaaagtgcctgagacaatggctgaggggcgcgccacgggtttagcctaattttaatatatgtaatactatgacggtcatagctcgaaacccgtcgttgtcttcactgtacttaattacaataatgtcacctgcagacattctaagacggttatttataaccaccttagaatgtacgacgtagaaactaaattttttctccctaattacaaaattgtcactgtgccttcttctacatcgtttatgcagaaccgtcgtagatatcgcgacttaaaaattacttttgtagtagtgcaaccactagtcatctaagcatttatccaaagtggatagagaaatttttatcaaatttgtcgctcaatcaataccaacttattgtataagtgtgtttttgcttccttcaaccctttgaggatgaaattcaaaagatgatgaatagcttttggtgaggatcaaattatcaggggaaaggt

SEQ ID NO: 26706 - DNA, 615 bp, Glycine max
  Intron number 2 from transcript Glyma17g12510.1 (locus Gly ma17g12510) derived from phytozome v7.0 (chr-ID Gm17; pos 9453571 to 9454185 reverse strand)
ccttaatccaacctgtgcatttagacaccctgtgagttcttcagtttttttttttatttacttgcatatgtggggtggaatgcctctctgattctctttttgcttggatagtgttgtcacgtgtggttgaatggttgtttctgtagtgaaattattttaagattagggttgctgaaacctgttgactatttctcagagtcaaatatatgccgaatttagtatttgctactgttgttaccttgtagttgactttatgatttcctgtcttaggaaaattgattttacttgctagaatagatttgatgattaaaaatatcaaacgaatggcagacacattgaattcactgcattattaatatactgcgaaaatctgttgttactgttatctcctccatactgccccctccctctgtatctgatatccattttgttttattttctcttgtttaacactaatctgtgtgtctgctcagttgttaccttttgtcgccttcagctaattcttatcattttctcagccattggatgggcatactggagcgccagtgccatctgaacctactcaaacttcattacctgcaaacaagacactggttccctgttattttttcttca

SEQ ID NO: 26707 - DNA, 670 bp, Glycine max
  Intron number 1 from transcript Glyma18g01970.1 (locus Gly ma18g01970) derived from phytozome v7.0 (chr-ID Gm18; pos 1163524 to 1164193 reverse strand)
tcttgccaacttgttttctcaaagatttcattcatgtaagtagatgtttggtttttagttgcaaaattaagatttggattaaaatgaagttcgcaaaatattagaatccttttttcaaaagaaaattaaatttgtgaataattagatttattttaaaattcgtgcacgtaatttaaactgaaatctaaacatacattaatgtgtatggtttgcagatacaaaattatgtttaagaaaaaaataattttatcagcagatcaaacatttttatatccgttggagttgtcaaggagcactataacatttccaacggcaaagatgtagttggtgtttgttatatatagtaaaaggaataaaacagatttatatttattttcaagctgaaattggttactacttgctatatgtagctatcaagtgtgtgtttgtattatctagggaaaataattttgaataaaactgactttagttaaaattgattgttaaaatgaatcaatttatatttgaatgtttttattctaaaaaaattgatagaaaaaaaattatgtaactttttatttagcatagaagttataaaaattattttaatttaaaattaattttagaaatagaattaatttattacttacttacctgataattatgaagatatgttgtttacatgcaggtg

SEQ ID NO: 26708 - DNA, 747 bp, Glycine max
  Intron number 2 from transcript Glyma18g49080.1 (locus Gly ma18g49080) derived from phytozome v7.0 (chr-ID Gm18; pos 58470568 to 58471314 reverse strand)
cacaaatacagtatggaaacatgtttccaaatgtttttggttgaatattaaattagaaaataaaaaataaagcctttgagggaaatcaaaggcagttggggcatggggtgataagagttttcgtacatgtacgaatacgtaaagattagcattttcatatattattggttaattaattaatcgattatgttcaaccaaataaagtaatataagaaaatcatgttaagtgacgccagaaccctttaatttttttaagagaaatgatatttgaatatagaccgtatcatttcaaatatcttaatacttatcattattgctttctatttttttgtataacattatatcatctatcatatttactcttttcatctctaggcgttaaataaatttgaagtgtctgcaaatcattttttgaaactttaactgtcgctatatgtttctatgtgaagtttcctttctctccctcttcagatggatgctctttgaatatttattcctttgaaacacaattttgttattaagttatatgctatagtgctttagtgctttaacaacacataagttaaattaaactaacacctgtgtcaccatagcatgtctattgtgcatcaaaatagtatacggtacaaaatttaggtacaaatatctccataagactgtcacagaaatgaaaatggtctgatttctattttcttgaattgtctgttaaaaggagaaacagacacagctcgtgaagtacaatcaaaa

SEQ ID NO: 26709 - DNA, 379 bp, Glycine max
  Intron number 1 from transcript Glyma18g35300.2 (locus Gly ma18g35300) derived from phytozome v7.0 (chr-ID Gm18; pos 41433088 to 41433466 reverse strand)
actcatatcctttgatccgttgaaattttactgcttttgttcacgaattctcgtcaattaagggaccgggttgactttctgttagaaaactcgaggaaaaaataaagctcatttcaccctcccctacccccttttgttgtagatcttataggttttgctgcaattaatatttcccttcagtttggatccacgtaaaggaacataattttcataattttacctttttttattatttttcttttcaatttttgtttcctttgcaacaatacaaccggggtattcgtggtttggtttgtgaagccgttttgtttgttattgtttacaaattaactctaaagcgcacgcggtaaccagagggatcgtgatcgcgaaagggctc

SEQ ID NO: 26710 - DNA, 734 bp, Glycine max
  Intron number 1 from transcript Glyma19g06280.1 (locus Gly ma19g06280) derived from phytozome v7.0 (chr-ID Gm19; pos 7147547 to 7148280 reverse strand)
cctcatcaacgctggtcctgaaagccttcgtcctggttcgtgttttttttttccttcaattttttttattttattttctcggttgcatgtttaagtttttgcgaacaaaacttgagtctaattctttaggaatttttggttttttttttcttcttctgagaattcgagttttacttttctgatttgcatgacaattttttaaatttaatttgttgaagtgaattaaaattcgattttaattgaaaaacgagcatgcaatttgtcttggactatagcactatctcttagaataaaagagtaaaagaatttttttatcaagctaaaattcacttgtttttttttatattttaatttggttttataattaaaaaaatgatcttttaaagtgttactaatacaatgtaatatctctcattaatattgtcgtgttttgatatacagtaataaactgataaagaccatttattttaacaaaaataatttaagagattaagctttaaaataattaagaaaaaagctgaaattaacaaaaaaaggaagataatttttctaatttttaaaaaaagtgctaaataaacaatatcttgactcaaaattaacttacatgcagttcttggactatatatagcatgatcttttagaaaattagcaaattttcactaaagaaacgtttaattgattatgctttggacattttattttgcagccatttttcgatccttgttatacgaagc

SEQ ID NO: 26711 - DNA, 543 bp, Glycine max
  Intron number 1 from transcript Glyma20g27550.1 (locus Gly ma20g27550) derived from phytozome v7.0 (chr-ID Gm20; pos 36693314 to 36693856)
accaacaacacttcttcttcacaaggtatttgtcacctttttctcaaactgcttacaccttaataattacaatagagccacccaacagaaccccaaagttaactttatttgaacgttttcctctttgtcaagtgttcttttgcctattcatttgttgaaaggaaagcaaggtgcttgtgaacttagcttttatggaggctctttcattttaatttattttacgttttataaaaaaatcttctataaatgcttacagactagtttattcaaacaaacccatttatttaactgttggaaaaatttcaaggttaaagtacttcactttgatctctatagttgtttccatttttaagttttagcccgaagatgagaacaaagttaggttttggccagaagattagtttttatataaagactggaatttaaaatggagacaactatagagagaaagtgaatagttaaaccttattaatcttaatctgtggacttagaattctgatttgtgcagggaagggcaacacatcacgaattatcattgccata

SEQ ID NO: 26712 - DNA, 512 bp, Glycine max
  Intron number 1 from transcript Glyma17g14420.2 (locus Gly ma17g14420) derived from phytozome v7.0 (chr-ID Gm17; pos 11160264 to 11160775 reverse strand)
tctttcacgtcaactttcgtttttctccctctcaggtactctcgtctctttaaacctctcgttttcattctagggctttgaattttaattgtgttgatctcttttagtgttatgcttgctcgtttttcaatcgtgtgtgttctttgcttcgtttcaccaatctttgtgttcaattcagctcattatgatgctgtttggtggattgattctgtatttgaaattcggtgtatgcagattagcctttttgttcttcttttctgcggcgtttctagggattatgacgaattcgctagtatttgcattggaaaaataatgattaatgttattatatcctctggcaacgtacgtttgcatcaagaattgaataaaaatataggatcattaggcttcctaaggaggatttattgttaaaaaaaattgtattgaattattgattgttagttgaatggtttattgcgatttaattaccttcatcctgtattaacagtgaaaattgcatctaaagagacaga

SEQ ID NO: 26713 - DNA, 727 bp, Glycine max
  Intron number 2 from transcript Glyma17g26240.1 (locus Gly ma17g26240) derived from phytozome v7.0 (chr-ID Gm17; pos 27300881 to 27301607 reverse strand)
ggtaattttgaaaaacctgtctcaaaatcttacactattttataatacatttgttcttttgagcttaggacacaacaaaaactagtaggatttgtctagatgagggagtttggaggggaaggagaaaactttcattttgaattgagactattttaattgagagactaatgactattatgcagcctttcaaccattccttttgagagattattttgattgaaattattttgtaatgttttaggattctctcgataagaaataaaataaattatatttcccctccaattatacccttggcaataaaaattagagtgagaggttattattgatgctccttttgtgtctctatcgctataaggcaatttttgtcaatgattggtgcttttcaaccttttaactgttgacatgtttatctttagagagttatattccttctaaagggatgttttgtgggtaagatttatcaaaatgttattttctagattcaaaattactacattatttatcgactggggtttgaaattgaaatactttcaaaattctagtttaccttcatgccttttttatactgttctttctgttgaattgaaaatgttcagttaagttggtaaaaacactaggttatttcttctttgagacactaatggtgaggttaagtgagtttttgccaaccataaaatatctatttgtaggaggactactggccctacaaggcgttctacaaaag

SEQ ID NO: 26714 - DNA, 612 bp, Glycine max
  Intron number 1 from transcript Glyma19g22440.1 (locus Gly ma19g22440) derived from phytozome v7.0 (chr-ID Gm19; pos 27158743 to 27159354 reverse strand)
gacctcgacgacgatcgcttcctccaagaatataggttctggtttttgcccccccccccccccccccctttttttacctgttctgtcacccacaaagaatgatggggtgtttcgtggatttgaagggtttctattaagtgggtcggttttgtttttgcccaagggggtggaggatggataaagtttgaatcttttcgtggatttgttggtggggctctttgtgttgttttgtagagaatatttgtctgagatttgtatttggttgtttattttgtatgttgttgaatgcaaattgattgagaattgttgtgggtttgagattttataggaaaattcatgcgtaggactgtaggggtgtatttgtttaaccttttgttcattcttttcgatgttattgaatacactttggttgggaattgctgtggatttaatgttttatagcgaattaatgcttaagagtgtattttccctcttgttgatgagcggttcattctgaatttacttgaaaagtggacgttatgaggaagcaaaattcggtgtgtgtgtgcgtgttaattctacttgttcttaattgaatcatttttctgtgataggaagaagaggctggctgag

SEQ ID NO: 26715 - DNA, 570 bp, Glycine max
  Intron number 1 from transcript Glyma20g27570.1 (locus Gly ma20g27570) derived from phytozome v7.0 (chr-ID Gm20; pos 36715344 to 36715913 reverse strand)
tggtttttgacacaatcacgttcaaggtcagattggtaagtgggctaagccgatggcccaagaagcaattgcccaggcgagcaatttaagctcgccgacagagaaacacaagtatttgcaaaaaacactttacaagtaaaattgattttaattttgaaagtacactttactaaaaaaattgtattaatttgaatgtttgtattaaattttctcttaatattacgcttaaaataatttttttaaaagataaatcatttcaaattaaagttacttttaactaaaatataattagatacatgtaacttaaactgaaaaagtataaccaacaaagtgaatccaatttgtaacgagtgagttcacattccaaaaagatgtaagtatattcttagaggcttgaggactcttcaagctccgatgaacccttgggaactaagggtgtttaaaatcaaaccgatccatggataagattaataaaatatccgacgcagaaaaggtcgccacgccaaacataaacccaatttttgaacaccctaaggcagataactgccgtcgctggctggagaagtagtc

SEQ ID NO: 26716 - DNA, 1046 bp, Glycine max
  Intron number 1 from transcript Glyma18g28350.1 (locus Gly ma18g28350) derived from phytozome v7.0 (chr-ID Gm18; pos 32251209 to 32252254)
tagcatctggccaggtggccctggctctggtaaagtattgtttttcttctttctctctctctctctctctctattttgctgctagtaatgttgatgatgtgttcttccatgatgtgcccagacatcaatttctggggttcatgggttgctgttgtctgaaaaaatttcatccttactgctgtttccactagcatctatcgttacagttttttttcttccttttatttcacaaatgctgaaggttttttaattgatgattggattcacggggagtaggaaattaaatgaatgttcattacttacgttgtgtttatttgtgtttttgctttctaacttttaaaatcatttcatgctaccgttttcaaaaactaatttttagatagtaggagagggggaagaaaatgaaatgtaaggataaacaggagtatcaaaaaactgaaagtagaaaaccaatgttttgatattttttattgtaaaaactgaaagaaacgtattacttttgaaaacagctttcaaaaactacttttttattgaatggttttttttgttttcttatttttaaaatatagaacagaatttgaaaatccggaaacagacagaacctttctaacaatctgtctaacacactctttctaacactcactctgttattgattgaaattcactgaaaactactaaattaggaaagaataattaaatgagtcgtgaatcctaccaaaatttgggatttctaataaatttcagccaattgtagtagagagtgtggttaaaatagtgtgtcagatggtgtgttgctagcatttctccttttctaatagtaatgtttcacttagtaaattgggttaatgataatccattcttaaggatttactttttcaatttgtagtttatgttatttaccagtgaacaagtagttttcaggttataaattagtccacttaaagttctctattttaaaggtgattttattatattttctttttcaagtaaataagtagctgaatcttgcaggtgatagtgatagcagcaacagaagtgtcctggat

SEQ ID NO: 26717 - DNA, 775 bp, Glycine max
  Intron number 1 from transcript Glyma20g33730.1 (locus Gly ma20g33730) derived from phytozome v7.0 (chr-ID Gm20; pos 42253047 to 42253821)
gccgaggtaatttcgaatctaatcgtggaatccacgatgcccaatgggtaggtacgttgtgatttggtcgttgataaaaatccttactctagcgttcaagagaaagatttgaacttttgtaagcaattgaatgttattataagttgaatcctttgaaggattaaacccaaagttttattagagcatagaagaattttgtatctcatttagttcaagttcttcctcactaatgtggacgaggatacataattttccccagcaatgctcatttgcttagttcatagatctcaattgaaaaagaatttacaggttcgtagttcttgctagtcctcattcgtctataagcatcaacataactaatggggagttggctctagtaaaaggtgctagttttccacaatgtgatgaaccaaattctactaggagagatatttacatttaatgtcagactatatctcgaatagaattacttccgaaagaggatacatatgttaaacaaaaaaacataactatttttatatgctatagcacaacaacgtggattttgttggcgattgggtttttgatagatgtaacacttctcaatgtgtaggaatcattgcagccaaaagatatcacttgggacaggtttccttgattgtctttgaagaacaaccttgtgtatatcttttggtggtgagttaggtctttattgaatgtaccaatgaaatcaggctatcaacatggtggagttgatactattcacactaaggtctttctaacatcactgtcagct

SEQ ID NO: 26718 - DNA, 947 bp, Glycine max
  Intron number 1 from transcript Glyma19g36090.1 (locus Gly ma19g36090) derived from phytozome v7.0 (chr-ID Gm19; pos 43463223 to 43464169 reverse strand)
ggatagtctcgttggtcagatcaaagccaccacaggttaaaaaaaaagaaatctttttttgtttttggtataggaaaaaagagagacattaatggaattatgatagcgaaaccctgttcgggacaattatgctttcccttaattaaggtactttggggggggggggggggtatgctattttgtttcttgcacaaatctatctcttgctttatacggagtttcttgcaaaaataaatttgagtggggtttatgtatttagtacacccgattggtgatgtgtgtgactgcaagcttttttatattatagaaaaaattgattttgggaaggggacgggataggcatatgtatgatctaataatctgctattttcagttatatatcctaagaaaaaactttagtgctagtctgatgtggtgttggattcgtagaatttgtgagttgccattttgctctttctgttgagtcgttttagattgtcatttactactatctttggatacattccctcgataggtgtactactagcattcaggctatgctccatacaatctatagtattttaagtacctgaaattatcttgttagttttcttaatattaccgagacttcttctcatattgttttctttcaagtttcagcttgttgatttcctcagttataaagtactatataccaagcttatatttgtactagtgatggtaagtttgaaatgatgcagaatctgattgtgattcatgtttgcataatctttagttatttctttttagggcttggaaaatgaaacctgccaggtagtgttttcacgattgcaagagattgcattagcatgtgttggtcttagaagacaaatcttgccctgctgtagcttgtgcgtctcccccttaaatattatgcttgtcaattgagtgcaggaaagttgaaaaggaattcatccacaaaatccaaa

SEQ ID NO: 26719 - DNA, 502 bp, Glycine max
  Intron number 3 from transcript Glyma19g30560.1 (locus Gly ma19g30560) derived from phytozome v7.0 (chr-ID Gm19; pos 38177769 to 38178270 reverse strand)
agcgacagaagaagaaaaagaggaagaaaaagtcagtttaatttttatcactaatgtatttttttacctctgtttgtggttgaagttgatgaacttatatgtttagagaagaaagcacaatgattggtaatatataatttttttttttattaatttagatatatttgtatgtgtgtatgtgtatttatttgataatcactcttgcatcaagtagctgataggttttttccttaaaactattcacatgttgtttgaatgacataattacatataaatctgtcttttattttttttaaaagttcaacaatgcgcatggctggcttctgcccttccttttttctctggtaccccttggttcattctgtgtccctttggagggagatcgacattggattgaatttttttgattatttgcttttgtctatacttggttgaaattttaaacatcaacgatgttaacattcatatttgacaaattaatctcactattttagggaggagt

SEQ ID NO: 26720 - DNA, 380 bp, Glycine max
  Intron number 2 from transcript Glyma19g30560.1 (locus Gly ma19g30560) derived from phytozome v7.0 (chr-ID Gm19; pos 38178361 to 38178740 reverse strand)
tagacaacgaagaagaggacgaagaagagggtatgggctttgattggttcgaaatttctgaactacgcgcttcgtgaatgttattttttgttttattttattttccagttttttttattcgcatgctaatttcttcagtggcggtgttgggtttgttagaacattagggtttcaaccttgagagtttagcattttgttctttttttgtttttgatgtttttcattttgtttttgcttatatgaatgtgatatttaagatggtttcttattttctgtagccaataataatgtccataggattatcccttcatgggctttatgccatcttattattgttgctgatcctctttttctgttcctcctcacttcagaagggcagg

SEQ ID NO: 26721 - DNA, 758 bp, Glycine max
  Intron number 1 from transcript Glyma20g31850.3 (locus Gly ma20g31850) derived from phytozome v7.0 (chr-ID Gm20; pos 40457294 to 40458051)
gtattttttaaaatattttttctttttttttgaaggtacggttgtcggaaattttttatttttttcatcgtttttgaataaataggcgaatttatgagatgggtttgggtttttatgcttaatttttcgattttgtgcaaacttttaaaatgggttgtggtggagaggtcgaatccagaatttttcattgggttttgccttgagttgactttttggggatgcagaagataactgataaatctgatgataggaccactgggggttgtgaatcaatgcaagttgggaagtgggaatgctcaagttgcataaatatgtagtcatgaattgatatttgatatttagtgtagcctttttttttattgaatcacaaagggcgagggataattcggatccaaggtgcaaatcttgataaatttagagttattttctgtttctggactgcaaaaatcatgaaaaaaaaattatttgatgttgatccatccatgatatcatatcgattcagtgttgtattaggttttgaatactgatatgaacttcttgggtttgtgtgcatatttttggtttgatctattagataaatttagtctgattttaaaggtttttgaccctttagtcttaaggttttgtttaattttgtttgtcagaattctgagaattgaacttactgaatcctccacagtttgtctcttaacccaaaattccataaagtattcttatgtatcccttccctccatttgcaggttttttgaagcagaaga

SEQ ID NO: 26722 - DNA, 622 bp, Glycine max
  Intron number 2 from transcript Glyma18g28630.1 (locus Gly ma18g28630) derived from phytozome v7.0 (chr-ID Gm18; pos 32653710 to 32654331)
tcaaggtagttgttgtgctcccaattttaactctaaatgataattagttgcaaaataaaattttgattgggttgcaaccatgcatacatggataatattgaaattaaatagagcattgttgtcaatcaatgataatctaaatgacatcatatatattaataatgcattcttacaactagtctcttagttaactattgacacacccaagatattagattcccactcatgcaagcaagaaagggtaaccaaccaatttatagaatgaaggttgtattgataaaaaaagattaatgtaatactttggtatcatggatccatcgttgaagagtaataacatgctggttaataatccagacataaaacagaagaatcaagattattgttgaaaacacaccgacaaaaatagtggaagaaacggattatgtcgagttaaaagttaggaaacaatgaaaaatttcaaactaggacaaggaaaattgtttcagcggtaacaagcttgacttcaggttcaattcttgggaaaaataccacataactttggtcttgaattaatgtagcaagtatcagtgatcatttatctcttgtagtagtggattggctctacctctactactattttaca

SEQ ID NO: 26723 - DNA, 320 bp, Glycine max
  Intron number 1 from transcript Glyma18g43320.1 (locus Gly ma18g43320) derived from phytozome v7.0 (chr-ID Gm18; pos 52756364 to 52756683 reverse strand)
aagagtcttgaggctcaagaacatcttgctgaaggcatgcaatacaacccctctctcttcctctttcaagaacacacatgtttcttttattattcttcttaagaatcaaatataagtactaaaaagtttataataactcatctatcttgctcaattaactgacttagacccttgcatcaagaaaacacatgttaattgtcaatttttttcattgaagtaatgcattttttgtgttcactttttaaaaaaatgagtttttatgatgtgaatgcattaatgtgtaggaaggagccgtggagggcagacgaggaagcagcagc

SEQ ID NO: 26724 - DNA, 423 bp, Glycine max
  Intron number 1 from transcript Glyma17g11600.2 (locus Gly ma17g11600) derived from phytozome v7.0 (chr-ID Gm17; pos 8720149 to 8720571 reverse strand)
ccgctgctcagtacatcattgaggttctttgatcggtttgttgaattgcgtttgctttgcttacttgagcttgtcccttatgcatcccttgttttgccactcactgaatcgttactatttgtttactccaagaaaacaaaaatgtaagaacgagttacttattgctgtttaaggagggaatgatatatatgtacaagagaagagaattttattgttattatgatgatgctttttttttgaatttgttacagtagcttagcttagctcagctcagctctgcttgttggccatgcttgtgttattgaaatggaaattgaatgtggtgttttttttttttacaattgaatgtattaaaaattggcttggcaataagtgtggagttagacatgtactaaattaattggttgatttgtggttggcagc

SEQ ID NO: 26725 - DNA, 860 bp, Glycine max
  Intron number 4 from transcript Glyma17g11590.2 (locus Gly ma17g11590) derived from phytozome v7.0 (chr-ID Gm17; pos 8705729 to 8706588 reverse strand)
ggcttaagcacattagtggtacagttactattcttatggttaattttttctcaccagaatgcgtctattattttacaaacataggaagatcatacaaatgattcaaattagattggtggggctttgtgctgaggttaatgtataaaaactatgagtcttgtattgctgtttttatctttctctttttcttaaacaactactctattgtgctttcagaaagattttggtgtttcttacacaagaaaaatggagaaattcattcatgtttgaatagaattcaccttaattatcaaatgattctgattgattttttcatgatctattcaaaagtaattgagacttatacctgttatacttttcagcctcatttaaactgctaccttgtgctcgcctacaaaagtatatctgattgcattgctgaatattaagttatttgacacaggcacagctagggtgtgtcttcaagatattaacgttaaatgtcttgttctagtgaaactttttcaaaggctgattttagttatgtaaattttctctgtccttttttttgtcattgcttgtggcagtgtgtagcattctgtgcagaattattcatagggatcaattatttttatttttccatataattgttgtaaaatgaatggaaataaggaaattcagttttgacatgaacctaattgaacattgtgtaaaattggaattatgcgcaatcaatacaataataacattatttgttctgagacatcaaacgtagtaggtttaacttgctaaaggttaaagagtcctgtttgattaacataaacaatcaatgccaattatgtgtaggtctttcaaacttgacttccttgagcatcaggaag

SEQ ID NO: 26726 - DNA, 928 bp, Glycine max
  Intron number 1 from transcript Glyma17g15850.1 (locus Gly ma17g15850) derived from phytozome v7.0 (chr-ID Gm17; pos 12580184 to 12581111 reverse strand)
ccaaccctcacaattgcggatctaagtttggtgaggtgagaatgttacttcaagatatatggtttgttaattgtgtcaattaattactatacacaactaatattgacaagaagatttacagtcacacacaagtttcttgcttctgggagtgtggtgaaatgaaaatgtttatagttgctgagttccggatacgtaactgtaattttatatagtacttcttttttgtgctcaagagtttgacttctgaaaaatagatattaatgtccaaaaaattgtgctgtctagtgtttgagatgtagactatgtaatcagtaatcctgagggcatgcactcacatcacgttactgttaaaagaagacttgaaccaaaagaagtttttttttcaaaatacacttatgagagagcttcgaaagattgataaaatgatcaaccaactaaaattttaaaagtgcagctttaattttaaacccaaaactagagacagtaatagatcgacatcgaaatttataagataagggttagatagagctttcgcaacagcttttatactagttcaggcttgcatgttgatgattatcaaagttattatcatcacatatagacgaagttagaaaacttggctaacgcctatcacgtctcttacgttacactctcaacttgaacagtgtaaattttctaagtaaaatgcttttgccttgttagtgtctgccagaatatgtaaattgaaacaactaataagattatagaatattgttgattaaacttgattattatgcaggaaagacttcattttcagtctggactattgttctagttttttcttttcttttgtttttgaaagcataaaattaacctgagctttgaagtcactgtattaaacttaattatttcagtgctggctgaagaaacaaaaggacagtttagcccc

SEQ ID NO: 26727 - DNA, 883 bp, Glycine max
  Intron number 1 from transcript Glyma19g41320.2 (locus Gly ma19g41320) derived from phytozome v7.0 (chr-ID Gm19; pos 47625628 to 47626510 reverse strand)
ccaccagcttctgcagtagctttaagctacgaaaggtttgttttttttttttttattattattattattatcatttgttttgatcattttagtgtgttcaacccacttgattcctatctctaacatctcgtttctgtttaattttcaatcttttgatcttcaaacatgatgagtttaacccagttgacttctagtaactacttcccccttcatattacacccattgattctctttctattcttgactttgaagaatctgttcgtgtaatttggcatttaggtattacggatctgtacaaaattttatttatagcatcattaaagcgaactgattctgtttattattatattttttttttcatgcctttgtgtttatgtgttaaacggatgtagaatcatagcttgggtagaggacaaaaagataaatcaactgtaaataacgttggttataattactgataagtttaggatgaaaatcttagcaagagcttttcctttctgcatcgttgaccaaacatggaaagatatatgttagctcaatgtttttttttgtgtgttttttttttttaaaattacttgttagatgaccccatattctagattgtttgggaaggtaaagatttttttgtttaggcttggcaagaatatgatggtaggagtaattactggccgaacagtgaaatatttgtggaaaagaggatatatttttctgattatatatttatctgagattggctgtgtggagaatatactacaaggacttaagtgtctcaactgtttatttcctttcttgttccattgtttttgcattctgtgtaaaactaggactgtattcagctcaacttacctttggatttccttgtaaggcagattttccttgacc

SEQ ID NO: 26728 - DNA, 1023 bp, Glycine max
  Intron number 1 from transcript Glyma19g01500.2 (locus Gly ma19g01500) derived from phytozome v7.0 (chr-ID Gm19; pos 1116158 to 1117180 reverse strand)
ttcgggaaatcttctcgtttgtgctcggcaacaacgtagactcctgacctacggtttttttttattactctatagttgctaatttctatttttcacctgcaaattgagattaatctgtttatgggtcactcatgtctattttgtttggtgtttatcagccactaggaggaaacataggcacttgctattagtatgttacaatgagaagttatgggatagtatggtaatgacttgggtgtctgttagtgtggtctatacatgttttattgctgatttaatttcttctaattttcatagactgcgtaattggtattgaaattcctggaaaatattttaatagtaaatgtattttgtttctttaatgattttagacatgataactttctgcaaatccaaagttttcacccatgtgcaacatttgcattcttggctcatgcatcagctgacagatctgattatttgattctattttacaaaactgtcccaaccatctctctgcttattgatctgttctttgatttatgataactgttttcatttgctcttttttttttctttctttctaatatggtaggttttccttatcttcaattaattgaggtcattggattgttctctgtatgagctgtgaaataatcattcagttttcctggtggtctgtgtgacctctgttattgggttgcttatatcttcattaacatttggtagcacaagagtatcaaactttctggagttttctgttgtttaatttaaccttttgggaatatggaatgcaatcccccatttaaacaattaatacccttcatttacaagtagtggacagtaacagtgatttacattgcctcctttggcaacttggtgtaaaacttatttacaattatatgcatgctcatcatttatgattagaatatatagcttcaatttggtattgctgattacttcactctcatatatctagtaatttgtgaaaatatttttttttggacagagttgagataccagtctcaggagtgcttgccggtg

SEQ ID NO: 26729 - DNA, 845 bp, Glycine max
  Intron number 1 from transcript Glyma19g31760.1 (locus Gly ma19g31760) derived from phytozome v7.0 (chr-ID Gm19; pos 39556553 to 39557397)
ttcctgttgttgctggagttgtcattgcaagtggggtatgtcttgttctctttaatttaatctcactgctttcttttgatttgttgtatttgaatgttgtgaatgatcatggatgtgtttctttttgagattgggataggggggctcttgattgattcatattggtgtttgaagggtgtttgtgtgactatagagacatgtcaatgctgcatcatgttccttgtgccactccagatctggagtggtgttggacagattaggtgatggtggtttgtgtgatttagttgatcttgattgtttgaaaggtataaggaatctgtttttcatgaagtgaaacctgcttggaagttaatgagatctcaacttttcaagaactgcaaatctatgacaatcactgggaaaatgatgcttcttggcattattctttgttgtcttcttctttttggatctgcactgttctagtttattagcttttatatcagatagccaggtttttgggattttttaaaaaaataatcaactagcattgaagttacttaattatcattttattttatctaatcatgttatatatatgattatgatgcctcccctaaagcttttcatgaattaggctttttgtagttatctacttattaaatgccatggcattctgtgtattgcacaccacaatataatttgttatacgactggcaagtggcaacatcatagcagttcctttcgactggcatcatgcatattttcctttttgttttcccggcttattcattttgattctgtagagcttcatatttttcttggtgattgcagggcgagccagggtttcacttatttggattcattat

SEQ ID NO: 26730 - DNA, 359 bp, Glycine max
  Intron number 2 from transcript Glyma20g19210.1 (locus Gly ma20g19210) derived from phytozome v7.0 (chr-ID Gm20; pos 26878179 to 26878537 reverse strand)
caattccattccttttcagtccctcaaacttgactgtaataataataataatctcctccaacttttccttttttttataattatttttcccatcttgtgttgttttttctttccttcttgtctatcatttttgtgtatgagtgtgttttaaagatttgtagggtgtgtttgattgctgagaagtgtgaaattgttttagaaaaaaagttttaaaaccgacaagtgagaagtgaatcaatcagaccattattttttgttcagttacttttcttatttgatcattcttcttagagtttatctttccatttatttttaatttcaaagtgccagagttgcaaggagaacctgaagatatctcc

SEQ ID NO: 26731 - DNA, 1035 bp, Glycine max
  Intron number 2 from transcript Glyma18g44100.1 (locus Gly ma18g44100) derived from phytozome v7.0 (chr-ID Gm18; pos 53743132 to 53744166 reverse strand)
ctgagcgtgggatttccctcaattctgctagatcagttcttgatcacctgcaggcacacatttttcttttggaatttaatttattcaaatttaatattcctgtaccgttcattgtgaagacttttataccgttgactaattagaaatccctttataaaaaaaaaattaaagtaagagtgaatagtgtatgagtttaattgctatacgattgatttcatggtaggtgtgattttaaggtagtttgtataacactcaaacatgtgacattttgattaatggtgtagaaagtaattatgattggttcatattataagtgcatatcaattaaattcaagttttatgatgtcatttaattatagtctttcattaggctaaatttgttaaattttataataataattatcttgaaatttttattaattatgtttttggataatgtatagaaattaaacttagtgagtaattattatgaaattcaacaattttactgtatatagtaatttataatttgatgaacttttataatgagatcattttagctaaatttattttattatgttttggatgattaaaaatcaaactcttacaagctaattatgctgtttctttaatttacttctaagttataattttggtgtcagtattttgtgtttcaaagctgatgtaggaaacagtggtaactggtaagtgaatttgcagtactatattgcaattctgagagaaattgtcacttggtttactctgtcttcccatttctttcttcttgttttttgcttcttgagacaaaatgcgtgagctgttttttttttccttttctaatttttttcatccttaagaaacaaaaaagagctgcaagcagtttttgctataaataaagaaaaaaagaagagggtatggttatttaggtgtgtaaagagatggttcttgtgtgaatgtatgtgctaatttgggaaacagctgaagggtgttttctgttttctttatttctttcttatttaatagtctcattttattttccttttatctgacaggggg

SEQ ID NO: 26732 - DNA, 709 bp, Glycine max
  Intron number 2 from transcript Glyma19g00220.1 (locus Gly ma19g00220) derived from phytozome v7.0 (chr-ID Gm19; pos 30523 to 31231)
ttctggcattaaagaagatcaacatcttcgagaaggtattgtttcttacctttttattcttgttgcttttcactataaattcacttggttgaaaattttaatttgaatctcatgtggtgtaggactgtctttttatgttacttgtagttctttataagaatttaattagaatgcatgcactgtgtaaaggactaaaggttttttagactaatagtgtaaaagtttttttactctgtaatttaattatgcgttttcttgtatgataagattgatgcctttttgtaattattatgtgtaaaatttttagactgatatagaaattattccttaattatacatagtcttaaaaattatacattgtagttttttatgattactaagcatgtatagtagtacacaagagacaagttatttgactatctaaatgtgatattttgttgatgctgggtaatgcactcttgatatgttttgtttttgaagatttgaaaatactagacactttgttatggggcttattggtaatgtctacttctaaatggataaaagagcaacgtggcaataatgaatgagaccttacccccggccctcgtaaaaaaacattcacaaaaagttaaaaggtcaaattgtaaaaatcacctgtttgcctaatggttgtatttctttgtgccaattaggagaaaaggcagcagctccttactgagataaggac

SEQ ID NO: 26733 - DNA, 832 bp, Glycine max
  Intron number 1 from transcript Glyma17g32400.1 (locus Gly ma17g32400) derived from phytozome v7.0 (chr-ID Gm17; pos 35899858 to 35900689)
gctttcattttggaccgtgctgctcatcatcacaggtacaaatgtttgttaccaatgaatatttttattacgtgttcactgccattaatgacaattgatatatgctatacaaattgtgttcatgatgagtgaaccttagattcccgtttgagattggatgcaatgattcttgcggacagtttacattaatcattgtattcaatcttgaattgtcagtttggacagtttggggagactgatatttttatggtagattcatgtgttaaggttaaaattattttgtttaatttgatgaaatttcggtaatgcatttctagttgttctctgagtgcatacttgattatcgggaaattaatttcaccaatttcatgtcgtgtacttggagaccaatgcgaaatgctgccaaaattttgtcaaatttaacaaaatagaattaaccctgatgtatgaagctaccataaaagacggtcttcccgaatgggatagggccacacctataataaaaaagtgagattttcatgcatcgaataactttgagagtatgaccgagttattacttagatggatcgaagttggatgaatgaaaatcgcatcagcccagaatatgaggaaggcgtcgagcaattcttacaatttgctttagaaagaggtcaaccggatgaagatgaaaaatattattgtccttgcatcaattgtttgaacggaagacgacaaatactagatgacatacgagagcacctgttgtgtgatggaattaagaggaattatatgacgtggatatggcatggtgaaatgacaaacatgcagagtgggtagcaatccgaaccgtttg

SEQ ID NO: 26734 - DNA, 1021 bp, Glycine max
  Intron number 1 from transcript Glyma17g29690.1 (locus Gly ma17g29690) derived from phytozome v7.0 (chr-ID Gm17; pos 32473083 to 32474103)
gacgcttcgaacaaaaccatcgtcgttgaacactggttcgtctctcctctttttttctacttttttatgaaaagcaaaaataaaaaaataatatctatacgggaatacaattttatgtaattgtttttggtttttacatctttagatattttatccttattcttaataatattaaaatagtaatgataattaattctctttaattatatagattaattatatagattaaaactgacctaattaagtaactatccactaatcattctccatttttatttattggacaattttagttttaaatcatttcttaattttttttaatttacattaattgttcacaacttttatattattagttttttattttatattttttattaattatatttaatttctatttttttattatttaaaaactttagagaggtttcccctagttattacaatgtttctttttgtctgtgtactctctgaatgtgtgtgcttatttatttatttattattattttaatatttgaaataacttaatcaagattttatttaccgaatgtctttaaggaagaaaaaaatttaacaatgacctagacaccaccgaaaacttcgggttttgttttattttcacttaattagcggtctccagtttgaacccaatttatcccatttgaataaaattacctcctattaaaagtacttgctctctgttacaaaagaaatgaattttatgtacagtaatatttggggattaaatgaaaaaggagagaaaaaaactgggatgcaagaaaatgcttgttatgatatgtggttacttttattttttccaaattttattttatgtaatattgttgaacacttgtaagagaggtcaataagtatttgttgttgttacttggttcgtttgctaagcttaaaggatttgctctatttatgcgttggtgaaactattattattattctcattgttgatgttttctgtcatattatattttggatgtgttaattttgttttatgcctcagcaagca

SEQ ID NO: 26735 - DNA, 447 bp, Glycine max
  Intron number 1 from transcript Glyma20g00850.1 (locus Gly ma20g00850) derived from phytozome v7.0 (chr-ID Gm20; pos 585702 to 586148 reverse strand)
ccagaagaaaagaagaaaccaaccaggaacaccatgcaagtatcttaaactttttgtagaaaaaattctaatctttgattcatttctcatcaattaaatgaattgattttctctctttttttggtttcatgtctacaaacattttattcggccacccattattcttataatttttttccaatgatgtaattccctatctggggtgggggaaccctaattcctaatcctgactttgaaacataaatgtgaaatggaacatagaaattaattaaaagggtatgtcttggaaacctttggctttgtcttcaagctttcaaaaaaattaattgctttctttaataatttgtttaatcatgtgaattttctaataatttgttgtttggcattattttaaataattattttttctcttgcttggaatggaaacatgtgtgtatgcagatccag

SEQ ID NO: 26736 - DNA, 758 bp, Glycine max
  Intron number 1 from transcript Glyma18g01140.1 (locus Gly ma18g01140) derived from phytozome v7.0 (chr-ID Gm18; pos 574753 to 575510)
caacttctcttctcctgaatctgcatcttctttctgtaagttcctctttcttctttttttttcttttactgttctgtttccgtttctctattacggatctaccaacattttaatctgttccttaatacttgtttccgtttctcctgaatatgcacttgtaaaatttattagtctctggagtgtggtcaagtttcatttaataaatcaaattgattttccgtataacaaaggtttacaattctaaacagattgtaaagtttccccttacaaattctctcttgctgtatttcttttcaaacaatctgaattttgtcatcaacgtttggttgattccagatctggtggttatttttgtgcttctgataaattttatcatcatcattattttcttggttttcatcgttttcaatggatattaattgtgacttaatatttggttcactggaggcattttgtttttcaatcctttcttgttttatgttgagatctctagaaaacattggaagattatctttgttagttgtttatcctcaggttggatttttatatcaaggactatacgcctatactaatatctaatatgcattctgatccatgtgatgtttgcatttgaaagaactgagatttacatttttaatcctgctgttttttttttggttgttatcctgcagtttctctccctataaattggtataagcttaaatatctctaattcttatgttaacttttctttatcctgtttgatctatgcagcctat

SEQ ID NO: 26737 - DNA, 745 bp, Glycine max
  Intron number 1 from transcript Glyma17g15580.1 (locus Gly ma17g15580) derived from phytozome v7.0 (chr-ID Gm17; pos 12316253 to 12316997 reverse strand)
cttgtattggttgcccttttacttgactcagacaggtgaatcatcgattatagtgacatttttttagtgtttatagctctctaattatttaatgctctttgctattcttttttattttttctccttttagtttagataaaaatgctttctttgctgaaataatagtaatttgttcaaggaagtcttttgatggttggaccaccgaaggttttgatcagtgtttgtttgtttgttttgttgattcaatttttaaatgtgtaagcagtggaagcacattgctcagggaagataatcaaatgttcttgactcctacaaattgcaattaagttatggatattagtatttgttttttatgaaaaattcaatcttagtctgctgcatgttcacaatttgactgaaatgaaattatttgaccaagccttgggagataatagttttctataattattgttcacaagaactgttcatccttttagtagtgttataggaataggattcctctttgaagatcaaaatataaaaattgggtggactaaatgtgatcccaatttcatgttctgtttaggtctttggttaaaagcgtatcaaaatctctcttctggttgtttttgtttaaattacaaaagttttgcatttgatgatggggcacgaccaattccattgaaatgtaaattgcatgggtcataaacttttatatctacatgtagcagaaattggtgggaagtatatctctgttaagtctgct

SEQ ID NO: 26738 - DNA, 469 bp, Glycine max
  Intron number 1 from transcript Glyma17g33040.1 (locus Gly ma17g33040) derived from phytozome v7.0 (chr-ID Gm17; pos 36639587 to 36640055)
tctgcttcctctccaggttctaggaaaattcttactttttttcttttttttttggtttttcactttttttttcccgagacaatcatgttcgagatactgtgagatactaaatgtagatacttttctcaacaagaatgtgtgtgtctgtttcatttcctatgtgttcctgttccatttgctgtctatgtcacactatttgtttctttcttttcttatgatgaagttggtattcaacagtttcaaatttaaatttgaaaattcaataaaagcacttaatgcagataatatatagtaaccgatatttttttaattcatttctggtattggtctaatgtgttttattgtgtggatttggatcctacccttttgcttaaactctattaacttgtcataaatggtttgaaatttgaatgaataatacatattttgatgctcactgccatatactgcatattgatcaggaattgtg

SEQ ID NO: 26739 - DNA, 421 bp, Glycine max
  Intron number 2 from transcript Glyma17g33040.1 (locus Gly ma17g33040) derived from phytozome v7.0 (chr-ID Gm17; pos 36640184 to 36640604)
ttcaaaatccaaagggaaaaacgttcaaagatcaggtttttattttctcccttttgtcacaattccatttcttagaatcttctgaaatttgatttgagaaaacattttttattttacatgttcttttttcactttgtttcccattttcctgaagtttgtataggaaaaaatgaaaacagaaaaccataaagttgttttttgttttcattgtttccaatacagactttttaaaatcaggaaacaaagtatatagaaaagagatatttcaagacaatcaatcattagattcctgttttttgcttcacagatcacaattttgggatgtcaagaaagtttgacatttaatttgcttccttagtattgtctgagatttgtattttttttcttcttctttgccttcttttgtaatttgaatcccaag

SEQ ID NO: 26740 - DNA, 649 bp, Glycine max
  Intron number 4 from transcript Glyma19g43640.1 (locus Gly ma19g43640) derived from phytozome v7.0 (chr-ID Gm19; pos 49234046 to 49234694 reverse strand)
ccagtccgagctcttcattatcgggtccaatcagtgtaggctcaaactcagctgtatttagtttgcctaaataattacttgcagctttctgtttttcaacttctttttgtatgccctctactacaaggacatttgaaatttctgaaactaaggaatatactattttaagaattctcccacatgtctaggtaataggaatttaagaatcttggagggataataaactgtgtttagtccgatatatataattatgaactatacgctgctatcttttagaggtttaagaggttagttgaggagatttagaagaaggaattatacttattgcttaagtatatatatggttgtctgtgaataaaatgcatagctgtttttcatttgggatttaggagatcataaatagcacacaaggtgtgtgttcatacagactcgcatatgcgtaaaagtttgaaaattttccatgtcctggagtggattgcagatatagatggaaatacatgttattctatgtgcgatgataatgcatgtcatttgagtcattacacattgtataccctatgtgtaactttatctactgccatggtgcattgtagtttaccttatactttactaatggaaatttggatggcagacttggtcacgtcaattc

SEQ ID NO: 26741 - DNA, 416 bp, Glycine max
  Intron number 3 from transcript Glyma19g43640.1 (locus Gly ma19g43640) derived from phytozome v7.0 (chr-ID Gm19; pos 49234735 to 49235150 reverse strand)
gacccgactggaccatctcgattgttatctaccatgtaagaaggattgtcatgtttcattcttgttatgaattttagttttactttttagcgaatctgttaagaagaagctgtattgttattgttacattgtttttaatctaaacacaaaaagtagctgtaacattgtaagttattctgttttttatttttaaaatctctttatatgttttaataccgtcagtggttgaagaagtttaagtatttatttctgaaaaattgcacaaattgcctggtaaacttcatgctgcctttgttgtggcacttttattgcatattcggaattttctttgttatttctagtaatattggatttatcaattgagctatttgatgctgacagtgctgaacaagaagggataagagctaatcccattg

SEQ ID NO: 26742 - DNA, 634 bp, Glycine max
  Intron number 1 from transcript Glyma20g21200.3 (locus Gly ma20g21200) derived from phytozome v7.0 (chr-ID Gm20; pos 30313176 to 30313809)
tgtttttcattggcttaatttaatcacaagattaggtaaattccttgttaaagtatgcatcttggggattgtgtcaattgttttggttctggtgttttgcttttcctattgtcgtgtctttcgttgttcctaatttctatttcttctttactcgaatagacttgtatgatcattgagcttcggttttaactttgagtcactcacttgttcaggagcaaaaaaacaaaaataagaaactatttttaaaaattttatagtttttttcctttggcgcttgcaaatggagtttttggtagttgaggggaataatagaaacaaaggaggaataagaagtaagagaatctaaaatatattttttcccttgtatcaaaatttggaactattactgagttagccttttatttgattttattgtgcatgtgaatgatatgcatgccccaacttatatctgggttcaaaatgaatgaagctatttggatggtctgtgcactaccatgccctttgttgacttattcctgatttaggagggagcttggtcagttggtcatgtcttcaatgcactatagtgtgtaagtactatattggactatgtcatatctgtcttacgtaagtttcatgtttctttttatccaga

SEQ ID NO: 26743 - DNA, 801 bp, Glycine max
  Intron number 1 from transcript Glyma18g02580.1 (locus Gly ma18g02580) derived from phytozome v7.0 (chr-ID Gm18; pos 1637887 to 1638687 reverse strand)
cgttgggggtttaattctctaccttatcatcatcggtaacgtaacggaacttttccctttttttttaatttcctttctactgaattcgtaaaaaaggaaaaaaaaatgtagattttttcatgtttttggtttggtatgcttgttctgagttttgccgggttttcagtcagattcattttgattggtgaaattgttgctaataataagtgaaatttgttttttattttttttactataaatagaaaggttcattttttgaaaaaatatatgtagtaagtcgttttctttaatgtttgtgtatggtaattaatttaacaagataatggaaatgtaaggatcgggatttcctaccgctgggaattcactgttaaatacagattgtattactcataacttatctcaatgaatctaacttaggcctgtttcgatacaaactagaagtgtttttgagagttttctactaaaaatattaatctttttccattagaggagctcccaaaagttgtcaaatgcacttctaactttgtatccaaacatactcttaaaatatgtattccaaatataaccttcgatattcaatctaatagttctgattcatgaaaaaaaaagtgaatgtggggaatctgtttccgcaatgcacacctcaatttttggtctatgtaatgggtagaagaaagacaggaaaaaaaaaagtgaaatgacaggaaataaagagaaatataagaagaaaatgtagtagaaagaagatgaaagaaaaaaatagatgtattttaataattaccttttgttgaacaacaggag

SEQ ID NO: 26744 - DNA, 809 bp, Glycine max
  Intron number 3 from transcript Glyma18g50920.1 (locus Gly ma18g50920) derived from phytozome v7.0 (chr-ID Gm18; pos 59930956 to 59931764 reverse strand)
caaggttgttctggggggcattcaaacctaatactgtaagtatatatgtttgagcacttactcacgtatttgcatgtatattcatgacgacttaaacaaattatgtgtcatttatttgattgtattttttttttttattatttggcttatttagatgtaaatagacctaagtacatacctactgctatttgtccatgacaaggtgtagaggagtcaaaaagacaaaggaaaagtatacttagaatggactctttcgaagcttcatcttctcatttgccttttttctcgagagtcaaccatgccatcacatctgattgttgattggatttgcatactagatacttcttctcttgcatatttgttactcatgatttattgccatgcctaacaatgattttaagtttttatttttaaacattgtcttattatatagtttatatcttacttctaaactctgtaatatgctcagagtctttttttcactacgaacaaaatatattcctttggtcgatgcaattgctttagtgaatgtaattatttcataacatttccttttgcctaatttctttgtagccttgctgggaattatgatatatgagtgaatccattcttgtagagtttaatttcattttattaaatgcaaagtaaaatgattattttctcttccttttttaatagggatacaatttttaaatgatggaataggattcttttacaattttctgtctgtttttgcttacttcctatcttcccatcatttatatgattacacttgcagattattcgtgaagtgtcctgtggagctgtcc

SEQ ID NO: 26745 - DNA, 797 bp, Glycine max
  Intron number 1 from transcript Glyma19g33240.1 (locus Gly ma19g33240) derived from phytozome v7.0 (chr-ID Gm19; pos 40892984 to 40893780 reverse strand)
gaaataagttgctactctctccaacagctgaccaggtactatgatacacagttatcaatctcagatagcaacagtggtaagcacgaaacactatagcgggatagcaggaagcggaatgaacactattttaagtatgataacaaaaatctaaataatttataatgtgcttagaaataaatatgcaaaagggcccaaaattaaagaaattcatgataaataataggtcacagtttatacacaatcgtcatcaatttaggagcgataagaacatagggaaaaataacataacaaattagataaaaaaaacagtagattttgaattaggaagtttaacagaagaagaaagaatggaacaaaaggaaaaaatagtttggtaaagtgagaaagaacataggtcaaactagaggtaactttttgtggaatagtaaaaaaaaaagggtttcaaatcctattatgagttttgaagcatatatcatggtagcaccactatatagaaaatgaaaagcaatgattttggtcacaatgggtggctggctgctattggaaaccactccgctatttgaatcctgtagcagcctagggcttctccgctctgctactccaatataccatgctattgactactagattgtgatttgtgatatgcttcatatatgtactgtttgatgaatataatgtgttatatatccacctttttgaattgtttcaaaatgatgattcatttctcaatttttatacttccttgttcatcactttatcatattgtgtgcttgtgtttgtaacgtttaggttttttc

SEQ ID NO: 26746 - DNA, 747 bp, Glycine max
  Intron number 1 from transcript Glyma19g41440.1 (locus Gly ma19g41440) derived from phytozome v7.0 (chr-ID Gm19; pos 47710398 to 47711144 reverse strand)
tctcatctctaattattgtaagaccctctctctctctctctctcaatcaaacttccgttgcgttttctccttcaattttgttattttatgcctccttgatcatttgggtgcgtgatcatcatctttttcttaatttaatgttgatgggttcttgtgtttacggttctactagaattcagcaatgaacaaagtgctttgcttccaccgcaactgctatttatctgaaaagttaaaaactttggtctcatatacgattcttcttctttgcatcacacttttttttttgacaaacttctttgcatcacacttgaaacagatttttgtggtgttggtggttactcgtatcttagattagtgaattatgattatgtaaagacccgtttcttctgattctagcttccctttttttagccgttttttgttgaaatggttgcactgttttctttcactgcctcatgctttgaaaatttccgaagtgaacttcttttctgatactttatgcaattcatcaatgataatattaatatctgaactctatgttgattcaaagtttggttgatgtgtttctaaatgattgagggcttttaaatttttgaaaggtgattgattaaggactgtgatgtaatttctttggatatgatccaccatgtaggaaaatgtttcaatttttctgtcccataatatgctcaaaagttctcatctatcgatgcaggtatttggaaaatagttttgagttgaggatctaat

SEQ ID NO: 26747 - DNA, 465 bp, Glycine max
  Intron number 1 from transcript Glyma20g29890.1 (locus Gly ma20g29890) derived from phytozome v7.0 (chr-ID Gm20; pos 38689868 to 38690332)
tttcccctacttttccagctggcagaaatcacgtaataagtctcctattactcatattattgaacaaaacacaactcatttggtctcatggaagatatatatatatatatatatatatatatatatatatatatatatatatatatatatatatatatatatatatatatatatatatatgcatttttttctctcgacaatcatgtttgaaagactgtcaaatattaatcctaacggtaaaattctaacttagtttgtcatgtcgtgagagattagttttttctactatacatatccatgaatatgaaacataacataataacttaattggtaattattaatgaagaactgaagatatatatatatatatatataatatgcatggagctagttcatgttaaagatgcattttgattttttgtttatgtaggtaaggttttcgtatactggttggggacggagcca

SEQ ID NO: 26748 - DNA, 723 bp, Glycine max
  Intron number 1 from transcript Glyma19g03690.1 (locus Gly ma19g03690) derived from phytozome v7.0 (chr-ID Gm19; pos 3704708 to 3705430 reverse strand)
ctcgagttacaggtgattgcagaagtaaaactaaggtacatctatgcactatgctctaaaatcttagtgttattgtgaattcttagctacaacaactatgatttgcagaaatatatgttgctcattggcccatttattcaaaaaatgaattctcggtacaaagttcccaagtcctatgaaatgttatatgggttgaatgcttcaatttaagaggatatccaatgtagtagccttacaaacatgttaaactatatagtaggagtttaatttttataatctgttagtgtaaagatttatattatcaactatttgttttttttgttaccatgttattcgtatggagtatctacggactaattttttccagagaatctgacagaccacctttagtggaattctcttttcccaatcacgtttttcctatctacaagatttcaattcaaaatcctatttaaggagattgagttcagtatccttcagactaattattttttggtatattatcaactaattataaactaacttagatatgacttttaaaataattgttacaaaaataaataatcttattatatatcactatctatgattagctgaaagaaaatccatgcattctaattaaattcatatagtgaatccaagtacattatctgctttttgttgtaacaatgaacatgcatttgctatgataggtttttgcattgaggcggagaagaagggcaa

SEQ ID NO: 26749 - DNA, 732 bp, Glycine max
  Intron number 1 from transcript Glyma17g29500.2 (locus Gly ma17g29500) derived from phytozome v7.0 (chr-ID Gm17; pos 32153645 to 32154376 reverse strand)
atcgtactgttccgttatcaattctcgtgtttaaggtttggttcccttggaccctgtatttttcaatgtactttgatcacttttttctttcgaagtttttctctttttttgcttcttcttttttgggtctttgattgtttgctgggtccgcttcaatttatgtcttcttagctgtttgtgtgtgtttttttttgccagtttttccatccctttggaataccctttattttggattggtcaacttgctcatttttgtattaataatgaaaattgggttctctattttctttttctttgataaaaaaatttggatgttagatgaagggtttaattccttatatttggttggtggattttttttttcatttggaccacctgctttattatctggtaagttatgtgtctcaagatggggttcattttgtttttctttgatggtggcttttgtgctattttatgtgcagacaagttttctttggtttctttcccaaaatttcagatttgggtgagatattgattatggagtttaactggtgtgatctctcttagatgacactgtaatgtggcttttgggttgtgtctttatatcagtttgttggacaatcaactagtatcagtttattaagtacctttgctatatgattctaaactagattttttctgtctcttaccatttttggctggttccaaaattcaggacacaatttgcttgatacattttcaagttttcat

SEQ ID NO: 26750 - DNA, 644 bp, Glycine max
  Intron number 3 from transcript Glyma19g35120.1 (locus Gly ma19g35120) derived from phytozome v7.0 (chr-ID Gm19; pos 42681657 to 42682300 reverse strand)
agattccccttgcagtgattcctcctggtattcaactcactatgccttgttgagaagcttctttctttctgtccattttttgttgttgttgttgtggcatcttggtgttgacttttactttcatggtccacttttattgaattcaatgatgagtactgtattttgttggtagtataatgctgcggagtaggtgggttattcttcggaatatataggaaaagtctttaattccaacatacctcaaaagaagaaaagaatttaatgcacaattttggctgagctgagaaataattttagttgaatagaacctgattaattttccctccctggagaaaggatgacatttcaccagagcctaccatgtgcttccattttgcacacacaacaagtctgtaattgcatacagtagtaacagtataacttttgctttccctgaaaatatatgatcatctctgtttgctgttgcttctttatgtggaagatccctggttcctggaatcagagattcagaaatgcccttgtattttagacttgagccaaagaaatgttacttctgtgccattttattgtttttgttattctgtttctaaccccacattaaactccattgatgagttctattttgatttattttagactctcca

SEQ ID NO: 26751 - DNA, 684 bp, Glycine max
  Intron number 3 from transcript Glyma19g34120.1 (locus Gly ma19g34120) derived from phytozome v7.0 (chr-ID Gm19; pos 41735629 to 41736312 reverse strand)
gggcttatttggccgacgggtcagagtacaggtgaaatgaatcaaacgattaagatttagtatctagacttcgtttggataaacttctttataagcactagtataggaaaataatataaggtagtaaaacgaattgaacttctctcctatgctaaaatcaacttatgtacttaacttttgtggaagcgttagcatctaatttctctaaaagctaaagtgtttcagttgattttagtttattgagagaggttcagttcatttaatctttttatattcttttcttatataagttcttagggggaaatttatctaaactgagtcatagcattgtttgtgatttttgttttcttgtatctattatgtagcccatttattaacaaacaatcaaggtgatattcatgatcattataagttgtgtttcccaggtcgtgtatttagctttgtattggttattttggtacaaatctttcttgttcttaaagggaatggtatcagaaagttgtatgaaatgaacttctagttccatcttgtgcttacatatttgagcttttttctgcataggatcattgacatttttagaaaggttggggtttgataatgtttgcttctgttctcagcactgatagaaattatatattttttagtgtcacgtttcttgatattttgtttctaacagtggggatt

SEQ ID NO: 26752 - DNA, 889 bp, Glycine max
  Intron number 1 from transcript Glyma20g03120.1 (locus Gly ma20g03120) derived from phytozome v7.0 (chr-ID Gm20; pos 2858071 to 2858959 reverse strand)
aaggtgatgatcatcactctttttttattttctatgttgtttccctgccgaccccacctagtgggataaggcgttgttgttgttgttgtttcccctctaatcataaggcagatccgccaaacgtcttaaagaaagccactcaacattagttttctgtttgtcttttacattttcaacaacattttatttttcatgtttgtatttgatttttgcactaacatataaacattattactctattcaattatgttaatcttgattgtttgttttgcaacattttacattaactaacatgtcatggttatatatatatatattgcttaagttaaattgaaagatctataaatatgaattaagttaaacacgttccaaagcctccaaaatgacatgcatctcgaaagatacacttgagttcctttcatgaatggacattcacctgctaaccaacggattatcaaatatagctttaattaattttgtttgattaatcatgagaaatttttgagagattgattattattttattttgttgaaattagtttatttaattgattgcttgattaatgatgagaatcttatgagactgattatattttttgaaaagcaaaaatgaaatgagagattgattattaatttactatgttgaaattagttcctttaattgaagttgttagattaatgatgagattcttatgaaagattgattattaatttattaagttgttgatgcatactataatgcttgataagaatgattatgaattgttacgtgggggtgcaatcccatgctggaaaatgctaacatacaaaaattgcaaacaaaattaacgaatgaacatttttttattaatacgttgatcttgatatttgtgtgatctccgtatcagag

SEQ ID NO: 26753 - DNA, 918 bp, Glycine max
  Intron number 1 from transcript Glyma18g14510.1 (locus Gly ma18g14510) derived from phytozome v7.0 (chr-ID Gm18; pos 14341629 to 14342546)
gagtaacttaccttttctattttttcttttctttttaggggtggtatatgattttttttcttttgaaaatatcacaatttttagatttattctctatgaaaaaattattcatttttaatctttatatctaacagaatgatatatgatattagtccacagtaaaaacatatgtaataaataattaaggagtaaatagtgttagtactaaaagctttttccactttcatccaattacaaattgtcaagtatgataagttgtttgttgacttttgctataatgatcttaaaaggtcatatttactgtagtttcaaattggttgacagtgactgttttttacactgactttgcatagatattagactcaatttgatatttttaggataaaaagcataatttaatttttttttatcactctatcaatggtcaatgatgggggcggagagttgcacataccatgaaaatagctttcagtgttaaattgtctactgattttcaaacctatgtgattgttggattgtacaacaattcccatccattttggtggggtggggaagttgacagcaattggacgattgtgcgtatagcaagatattcctgttgtctgtctatattcttggtagtcatagtagtaatttctttaatgaatcttggaaactgattttgttacaaagcttctatttgtctgtgtttctattggaattttatttgatccttgttttaaatgtatatttctactcaaggtgtcattagaggctatgatatataaaagttgccgaattgagacaccatgaagtgtcctcttttctgtcagataaatatgtatggtgtttagagttgaatggattgaaatagtttctaaatggacattatgggattatgaatgtattaatgtttgctttgtgtatttgtagatagga

SEQ ID NO: 26754 - DNA, 677 bp, Glycine max
  Intron number 1 from transcript Glyma19g43430.1 (locus Gly ma19g43430) derived from phytozome v7.0 (chr-ID Gm19; pos 49085684 to 49086360)
gcagcatcggcaaaactgtcaagagcttccaacaggtaccatttcatgttaaagccttcttagttcttgctctcatattacatctcttttggcttttcatctttatgaaacggaatattgtgtctcattactactgctaactcatcactcgcttccccatccaattaagacgtttaaacttgttttggagatcgcacgatttttagtgatgtagttaaatcgagcaactcccacctctttaagttagtttttgggattgaattaggcttaaactcaaactctatcattaaagtttatgttagtaattgcaaattttacgcgtgagcgaatgtgttctagatcccatgtggacacaaccgagggataatcatcatctcattatccagtttttggatttgagtgagatccaaacccaaattgtaagaaccgagtgagggggaaaagtaaaaataaaatataaatgggaggaagaaaccagacatttcagtttcagtcaagaagaaaccgaatgggttttacaatgtaggaggccaaattatttgtggattttggcattgacttcatcgtgaatgagtctattactacgtttcaagtgttttgcacattattgctattaagctttttggtaaataaatggtgtaggctgcaaaggagtttgagtcggagcttaagaagga

SEQ ID NO: 26755 - DNA, 933 bp, Glycine max
  Intron number 2 from transcript Glyma18g20500.1 (locus Gly ma18g20500) derived from phytozome v7.0 (chr-ID Gm18; pos 22274870 to 22275802 reverse strand)
gtgagttgtatgtactctctgttttgggcaaggttttaaattaaggttacgatatcgtcataatacttgatattgcaggaaaaaggaaccgtaacaacacactctctaacacgttacacgctcctgttaacactaattcttctctcccttgattaaaatttattgaaaattatataatcatgaaacaaattcattaaataggagtcgatacttacaatattttgagatttttaatcaatttgaacaagagaaagtgttcttaaaagagtgtatcagaaattgtgtttctagtatttctcttgtgggaaattagaggaaaatgtgattgcaattaccacaattgcagttgagatgagataggatgagtccggaatccttgaagttgcgaaatcacagttgtggacccttttcaaaaacatggtttcgccacatggttcttgtttgattctctttatgatcttggattttaattaccctatatggattctcccatcctagtaattgtttatctgaatttgatgtggattgaaatgcatatttgatgccacttgtagacaatgcgaccaaggttttaaattgcaaggcagttgaggtttcattgcaattgttgatattgtgaaaaattacagacaaatgttgttgatgggttgcaattgtggtcgtggagatcccaaaaaccttgggtaacctttttgtaaaacctatatagactaagatataacgtatatgcagtattttaaatagatttgtattatttattttattttattaagtggttttcaaagaaaggtttttttttttctcagaaatttcaggtggatcttttacccttgatgtctgtatctgttatggaatttacttttcttgtttatttgaaattggcattactgtgaacaagtaaaatacttggaaagatcacctttctgataaaat

SEQ ID NO: 26756 - DNA, 587 bp, Glycine max
  Intron number 3 from transcript Glyma17g07440.1 (locus Gly ma17g07440) derived from phytozome v7.0 (chr-ID Gm17; pos 5434861 to 5435447 reverse strand)
aagattgcaattggctctgcggaaggtcttctgtaagcttccaccacactcattcaaccattatattggctagaattagtttttactagaagtatgatgtatcaataatatataatgatgaaatgatctattggtatgatgcatcatactattattagtataaattcaaaaggattaaatatatatttagtttgtgtaaattaataattaagagatattttatatttaaggcatgcttggtaggagtaagaatacatgagaatgaagataccgtctattcaaacatactttctattatgtgctctaaccttaattgtcacttttcaccgttgaatttttgaaatagtacattattgtaaaggatatgagcatatgacttattttccacgaatgactacaaaattgactttacatttgaaatcctacatctagtagcataaatagcttgtattttatggcaaattaagaatctgagtctagctatgcctctttaaaaaaaaaaaacaaaaagctttggctctttcaaattttaaaattggatgttgttgctaggtacttgcaccgtgaggtgacaccccacattatcc

SEQ ID NO: 26757 - DNA, 584 bp, Glycine max
  Intron number 1 from transcript Glyma20g35530.1 (locus Gly ma20g35530) derived from phytozome v7.0 (chr-ID Gm20; pos 43826180 to 43826763 reverse strand)
aggaactcgccaagtggtgtgagtcactctcccaactccaatggccatctgtttctacacattctcgttttcttttcttaacaataaatagggtgtttggattcatgttagattatccagaatcatgattttaagaaaatgctcgcatgtttagtttcacactgagaaattgattgtgtctagaatcaattttgagctgaaattactttagataacttcaagttagataaaaaaaaaaagtatactaagtttcattaaaccaaatcgcatcactttaaaatcaattttaatcaaaatcagaatcagtttcattcataataaattttgcaaatgcttatccaaacacagacaagttgatggtagataatgtccaaaggggtatcaacttaatagtccatgcctagtggcttaaataaagacagaaactgatgcagggtattatatatatgtcaagaggttcaattcttctgaaagtacgagcacggggtattatagtaggagggtttgaatttcataacttgttgaccttttgctttcaatttgtggcaggtcctgacagaaggatcttcttgcctgagggtctc

SEQ ID NO: 26758 - DNA, 773 bp, Glycine max
  Intron number 1 from transcript Glyma19g42890.2 (locus Gly ma19g42890) derived from phytozome v7.0 (chr-ID Gm19; pos 48706745 to 48707517)
tcttctttttctctaagtctaaggggtgccctgaggtatcatgctaagctcctcttctcctttcttcgattttcgccttttcaattcactctctgatgatcaccgattccgtttttcgttttcatttttcctcccaacattctatttctctttttttgcatttcattttcgatcatccgcagatcgcttgcgtttttgttctacgacgctgatcgtatctttattttttattttatttttttttccttctgttacttcggttttttttttagaaatatatatatttcttattcatttattttgttgaactcctgctattatgcatatggaatttggaagaatttgattcagtaatgagttttgcaagtctcgtttggtgttattagactgatctactgaatagccagctagtttgtgtatttggaattttacatgataatctgtgtttacttacggtcaactcaatcggtttcttctcttatttaggattaacatcagaaacttaatcaattgaacataattacacatgggtatcgaaagtttcatagagtttgtaagatctttttgtgtttggattgccttctaactcaattgactcggttaatattgactatttaaatatgatctaatggtccgtattcaccgttcttatttattataataatatccatgagttcttacctgatactatgtatgtcacgtcacgcgtgagtactccagtcttagatgttttgttttaaatggatgttttgttgttcagatcactttgagca

SEQ ID NO: 26759 - DNA, 385 bp, Glycine max
  Intron number 1 from transcript Glyma19g41770.1 (locus Gly ma19g41770) derived from phytozome v7.0 (chr-ID Gm19; pos 47950681 to 47951065)
cttcgtcacttcactctactgtaattgagaagaaggtcaattcctatcatctttcagtaactgttttctttcactatttttttttttaaataccttgtctaaattcaatttctaataataaaaatcttcatctcactgcgccaacttagacaactgattaggttataggacctatctggtttttgagtttatgttgaaaggattatagtcgttggtgacgaaatgtgtgataaatcatgttctctttatcttgctctgtacttgtgtactcacctataaagtttgattgttattatgttggatttgcgagaattggaaataggttaaagcttattgaaaccgtagtttattttctaccttgctgcagttggaacaccttccagcc

SEQ ID NO: 26760 - DNA, 739 bp, Glycine max
  Intron number 1 from transcript Glyma19g38720.1 (locus Gly ma19g38720) derived from phytozome v7.0 (chr-ID Gm19; pos 45588279 to 45589017 reverse strand)
acagtgaattcgtcgagaaattcaagtctagcttggtttgtgcttcttaccctttttagttatttacttggtttcaactgaattatagtgtttccgtgtgtgtgtttggctttataacaagaatttgggtagggtttttcattgtggcttaagtcattatttccttggaggaagagcttgcttggctgaaccattgtatttgtcaaagaaaattttctgtactgttggattattggggttacaataacaacttgggaggaagattcttccctggtaaaaaccacttttttgtgaaaaattactggtagagcttgggtgatactaactgttagtaggagtgaacttgcttgttgtatttggttgttcttgttgctggatgttttaataactattcatcgaaagaattttagaaaaaactttgacatgatttttgcaagagccccaaattttgggggtgggtgcaacagtagtgaggtcaagccatttgttggttggggtgtgtgaatatattacagttttattttgtttattttcagctaatcatatgttatgctcatgcatgtgatttaccaccattaagtgttctttgtttgatgcgtgttccagtttgtgtttttaactggcgttgtactgttgtaattggtgatatatgtttttttgtgcatttgagcataaatttgataagtgcttttgttctgagaatttacatgttcgtttcttgactttcttgcagaaatca

SEQ ID NO: 26761 - DNA, 935 bp, Glycine max
  Intron number 3 from transcript Glyma17g37680.1 (locus Gly ma17g37680) derived from phytozome v7.0 (chr-ID Gm17; pos 41421127 to 41422061 reverse strand)
gatctggcgctcgtaagtattttcctcttcatcatttttcatacttaaagcttggactctatagggaaattaaattttcaatgttgaccattattaaagcaggtcacaatttgtaattgtaattgtaattgtagtagaatgaggatgcgttcagctaaataactttaagtgttgtgttaataagtgttcttatcttataagagcttatgtcaaaattttgatcatgaaacttactaatgtggtctggtgatgggtgttagaattcaattgcaaggtgtgagacttgagtctcaaattggaagtatgaaattctagtgtggggtgtataaggctctacaactacaacaactagctttttgtggtgtggttcttgcaagattggtatgagagcatttcaacatgtctctcggtgtgtggacggtgatgcctgaaatagtgacattgaaagtatgagatttataataataataatgtcttggcctctccaaccataacaactagcttttgtggtatagttctcccaaggttcttattagtgggggatagggaaattggaatgaatagcatctgtgggaattgaacctccaaatccaaatacaacaaaataaaaggtcgtgatgcttatgaggatgccaaattgaaactatttaatttgtgccagacaatgaagtaagtctttttttgtgtgtgtgctatggcattaaaattaattctcacaggcactttgtcttccccatgaatggctgaaaattttcaatcaattataagaatggaaaagggaaacaattcaaccgcactgaattaataagaatgaagaagagaagaaaacaccgcagcaagccatggatctgctatttcatatatttacaaatttgaacttctttcctttgaaattgttacactttggccagagaaatgcagattttgcttgggaa

SEQ ID NO: 26762 - DNA, 563 bp, Glycine max
  Intron number 1 from transcript Glyma20g36140.1 (locus Gly ma20g36140) derived from phytozome v7.0 (chr-ID Gm20; pos 44361869 to 44362431)
caacaacctcaacctcatcgtccctaatcctcaaggttcttttttctctttcaaattaattaattaattcctcatcgctttaaaaagatttcacaatcttccaccatcatcactcgcccttgctactgctattctcctgtttccttattttgattatcatttccttttttgcaagtaagtgcggaaaataattaaaagtaacatttcgcgttctaatgctgtctgtgccttaggactaggtgatggtgtcaggtgttcaattctgataaatatcttttttcataatctaagctactatgactgaatcgattcaatttcaatcgagccttgttttttttttcttttttctcagagaagttatgaaaagtaaaataataattattttatcaaaaattaagcttttcctaacggcagttgcaccgacacttattatttttgtgattgaaggtttggaattttgtaggccaagtcagccaatgtgtacattgatgatgtgatttcagtttcacttattttatgctgttcacacttttatttgtgatgttatttcagattcactgtgg

SEQ ID NO: 26763 - DNA, 795 bp, Glycine max
  Intron number 2 from transcript Glyma20g36140.1 (locus Gly ma20g36140) derived from phytozome v7.0 (chr-ID Gm20; pos 44362548 to 44363342)
tcgatttaatcatcctcctaacaggaggctggtacaaattgcattgtattccatttgtataaattgagctatatgtgtaatgtgtttcaaattggatgttgatacataactctccttgttcttagcaagcgtttggtaacccgttggttgccttttggacgttgatctgccgaagcaatactaccttgcttctacgtctttttccagattttgacgtggaattgagtcttgaagtggatccgtgacacctaaacaaacatgcacttagatggatttattttgaatcattccaattaccatcataaaatattaaaatctccctaggtgatcgaagcgatgcacacttgaatctatttgatgttatcctcttacattttctgttcaacacatgtttttgcttgtttgttgactatgttcctattaaaaacacgtgcacttttattcattgtactggattatgacagcattttagcagagaaagatgcacataaacaccaggaagaattttactctgttgtaccttccttgatgacactcatagctagctttgggcatgttggacacaatatttaattttccctttttgcaggtgtatagcacatttttttatgcatgttcgcatgtcaatctgcacatacatgctcttttcacatgaatgaattttctgtagctgggactatataatgttgaatcttactgggccttgatgatttttatttcgattcttttacgtggagaatataaatacctgatatgttttatcgatgatcctatcaggctattgccactgcaagg

SEQ ID NO: 26764 - DNA, 609 bp, Glycine max
  Intron number 3 from transcript Glyma18g41420.1 (locus Gly ma18g41420) derived from phytozome v7.0 (chr-ID Gm18; pos 50304114 to 50304722 reverse strand)
gtcttgggaagcagaggtcttggaacaattcaaaggtgactgtttcttctgttctcttgcttttacttttctcgcagatgtcactgagtatttttttatttataaaaaaaaaactaattttatttatgtttgaaaaacaaaacaatgaaagacaagttacactgacattttttctgacacacttgattaaaatttattaaaaactataaaatcataaatgaggctgattacataaagaagaaactcataattttaggattttatcaaattttagctaacaataaagaattaaaaaatatattaacaagagtgaatttctaatattttcttcttgatactttcccttaaaaaagcagaagttttccccttaattttaatctagtctttattttttgtgatatggatctctttaatatttttctgtgtaattgtgcttaatagtcaaaaaactagtttattttatgtaaatatcagattgctctcagtaaatatccttttaatatatcattacttgttgggtgggagtgagggaactttttcttaatctatctgtctttgtttattatgatttgagtatcatgaagatggtgtttgtgttgaaaacacagg

SEQ ID NO: 26765 - DNA, 820 bp, Glycine max
  Intron number 1 from transcript Glyma20g26800.1 (locus Gly ma20g26800) derived from phytozome v7.0 (chr-ID Gm20; pos 36150485 to 36151304)
ccggggaaccctttcttaactcaatcccatttcaggtgaattctctctctctttctttctttttttctttcctgtggggttggatcaatgagttttaattgggtacaaatcttatgtttattatctgatgactcaaatgtggtcatatttacttggattaaggtattgatgatcctagagtaatgcttaatttggtatgatgtgaatctttcactcagatatggatacaaaattcatctttgaatttaactgatgcatggtatttcataattcatatttttttgttggataaaatttggtcattaatagttgatatttttgggttgtcattagtatcctttgtttgtcaattgtcctgcttcagtgatatcattaacaatttaacagtaactcattggttgttggaggaccgggatcacatatcatgcacttcttttggggaaggttgagtattttttatttattttttaaatctctaatgcaaataggaagatatgttcattgttgtccaacatgggatcttataagtttgcaaatgttaagagatattggctctgtggaatatgatttgcaattgctgggtacttggcgtgagcaagaaccaataaaagtagatacatttgattaattaactcatgtagcattggtttaaaaatggatagcatcgggttgaaatgaagactccaaataggaattgtagttttttagttagtacttaatagtactacataagtacatatgatttatccttcatttgtttcagtttgatcccgttctttttgcagattttaagttggagaccacgagcggtttactttcc

SEQ ID NO: 26766 - DNA, 435 bp, Glycine max
  Intron number 2 from transcript Glyma19g01430.1 (locus Gly ma19g01430) derived from phytozome v7.0 (chr-ID Gm19; pos 1057504 to 1057938)
atagggtaatggcattttgctttaaaccacacttgtcactcaagaacttcttgtacaagttttctagtcatgagtgttgcttttaattaattgtggtccaggaatcttctcagttttacaacgtgtttgatttttaatttcagaaagtgttattagttttcaaaatgtaactaaacaaggatttctctggtggtggtggaggtagtgcaaggcatagaggagagtgtggaattaaggaaaaagatgagaaaacatctctcaactatttctgttttttggtttttaaaacactggttttagaaataatttttgaaacttgatggattttggatgagaaattgattgttgatcagtattcggtagcacttctgaaactgtgtttcttgttttgcattttgatggccatgagttgcctgcagaacctcatctcagata

SEQ ID NO: 26767 - DNA, 542 bp, Glycine max
  Intron number 1 from transcript Glyma18g41520.1 (locus Gly ma18g41520) derived from phytozome v7.0 (chr-ID Gm18; pos 50439697 to 50440238)
agaaggaaagtggcatcgtgttcctttactggctggtaaagctgaattcaattcatctccctctctcttttttctttctttcttagagtttttaagttatattctgcaaaggagtgcgctataagttaaaaggggataatttattaatagtaaaatggtttgtttaagattagcaactgcagggtccgcccaaggataaaataacaaaaattcaagctttaggtccaccaataaaaaatattttctattaatttttatatgtgagatttatgtatcaatccaatgcaaaaatagagaagaattattatcctcaagaatagcaagatgtatagagtaggcactaaggaacaacacattaatgttttaaagttgaaggagtaattatttttgtttttttgttttgtttaacatagagacatgtttagtgaaatttccaaacacataatactcctatttacaattctttttcaactgataaaatcttctttgaatattggtttgttgaaggtttaaacaggtgccggaagagttgtaggctaaga

SEQ ID NO: 26768 - DNA, 834 bp, Glycine max
  Intron number 1 from transcript Glyma20g24150.2 (locus Gly ma20g24150) derived from phytozome v7.0 (chr-ID Gm20; pos 33851924 to 33852757)
gtctgatacccaaacctcttcttctttttcccaaggtacgcttcaaatctcgctcgcgtttcatcaactatggattttcttttccctttcaatttttcgctaatatcggtctttcttttgccatgttaatatttttgttttctgaaatgattaacctcgcgcggcgccgatgcaaccttaaaatctagctcattcgtttgttccttgttacgttttcctcttcttttttcgttttcgatcaatttatccgcgtgccttttgttgttattcgtatgaacgtttgagctactttagggtatattaatctgcgtttagccattgatttcgatttcgatttcggataatgttaattacgatgttgtctgattcagctgaaatggttttattgatgatgccgtgtgcgtgcgtgcgaatttgaattcgcaaactggattgcgattggcagcagaaccgtgtttttgtttgattccccggtgtgatttcagatccagaatgggattcccttttgtttgttgacgtgttgatgaaagtaggtggtttatttttctccttttggtggcgtcatgtacatttttgtttcttagcaccaaaagttttctgttaaccattttgttcaaatgcgttttaaatatttacatttactatatttttatttagttaaaggatagattttgccccatgtctgctgagtatataaaaaagttatggaagaggtggaactattgtttttggatagaacttgcctttgataagtttgtttattggttcttttgctgaattcaggtgaataacaagattagaatatctattgacattgatatgttatgattttag

SEQ ID NO: 26769 - DNA, 256 bp, Glycine max
  Intron number 3 from transcript Glyma19g42110.1 (locus Gly ma19g42110) derived from phytozome v7.0 (chr-ID Gm19; pos 48175855 to 48176110 reverse strand)
ccacttttctgaagttggcaggtccacagctggtcaaggcatgactcttccatttttactttcttattatgactaaattcattgtatcttattttgaattgttggtaattttaattttctgttttttaatgggcagatactttactcatcaatctttttcagctaataattttcttgtgatttttgttgatgaaactcattgactgtatggggattagttattcttatattatgtcttcatattaaggatataaat

SEQ ID NO: 26770 - DNA, 932 bp, Glycine max
  Intron number 2 from transcript Glyma17g10370.1 (locus Gly ma17g10370) derived from phytozome v7.0 (chr-ID Gm17; pos 7764100 to 7765031 reverse strand)
agtaagtcgtgctttactttgtactggaaggcagtgaagtccgatatcatctatttcgcttatcattattattattatggcaaaatgtttattgagtgatgaactgtttatagactatttgatcgagcatctggtagttgttgtggtttgaatgaatatcttattctgtgtaattgtgagaatcaatttgcagagagcagtatcaaattttgaaatttttgttagtcataaatatattgtgatgatgaaagagaaccagttgatttgtacaaattttttcatcagcatactagtaaaaaaatcaatttaaagttggtgaactctcaaatgaacatggaaaatcaaaccatggcattacagtgtttagggaagttccctttgaattctgtccagttattttttgtccttgaaggatacctttttgtctccatggaacatggacaaaggactatgtctccatgtggattggataaataagaaattatgtcatatgcaattatttatatagatgctgtggtatgaaatataaacatttatatatttgcttctaccagatagttgcaatgggaaataatgttactacatatacatggactcatgtggtgtgctacttactgctttatatggttttttggtgttgtgcccagacacatggagtttttatctgcagtatagcttctttttgttttcttttccttggggggggggggggggggatgttctaggttgtcttgtttattcttttttttttgttcatactctctaatttccacttttgtttataaactgtctggctggatatattgatctattacttgactatagttgttttctgggatgtaattttataatggtaaattaagtatgatgtctttttgggatgcttttacttattcaaattcgctgtgcattgttgattgtggcagaggctg

SEQ ID NO: 26771 - DNA, 892 bp, Glycine max; identical to SEQ ID NO: 20016
  Intron number 4 from transcript Glyma18g16160.2 (locus Gly ma18g16160) derived from phytozome v7.0 (chr-ID Gm18; pos 16493715 to 16494606 reverse strand)

SEQ ID NO: 26772 - DNA, 620 bp, Glycine max
  Intron number 3 from transcript Glyma18g16160.2 (locus Gly ma18g16160) derived from phytozome v7.0 (chr-ID Gm18; pos 16494649 to 16495268 reverse strand)
gaggtacaattatatctatcttctaccttatagataactgagactttgtatcttatttcaatgtttccaaatgttatgatagtatttgagtttctagtattctttaactacgtggagataacatctgtcccattaagcactttatgaattatgatccacatggatatgtagaggatcaagatcaactgatttttgttcaaaagtaaatttttatagagataaaagttgaggtggtgaactgcacatccatttgtctattatgtatatgtatatttgttatgctgtaatattaataagctttttcttatcgatttaaaagtgttttcttgtgttcaaatttattctagaaagtaggacaattcaaggtgtctattggaagtgtctaatatggtgttattcttatttgattgatacaaacatgagttcaccttgtgggtgtgtcacacaaggtttagtatttgatgtattttaggtgcttaaaggtaaaggtttaaattcacccgtttgatggtaatttagttgtgcctaggtacagtgttttctaatttatgaatttttatatgaacaatatccttgtcttttcaggtacgtttaagttgacacttcagtttacagaggat

SEQ ID NO: 26773 - DNA, 688 bp, Glycine max
  Intron number 1 from transcript Glyma18g16160.2 (locus Gly ma18g16160) derived from phytozome v7.0 (chr-ID Gm18; pos 16495546 to 16496233 reverse strand)
tctgcacctcccctcacacccttcctcattcgcaggtcagaaccctctctctttctctttctctcttccgatttcgcttaaaaatccgctttttattttctgtgcatggctttttctgaaattaacttatacgcagatgaataattgatttggaatttgtttttaagaatcccttgttttgtgggtggcttcctactttgtggtggaattggagaaatcgatctggggtatctgctaaaaatcccaactttgtgattgtgtgaagaatgttttaatgggtgtttggaaactcttgatcttctgttttcttgttctgggcttttaaaaagcttgaattagcatgtccccactttgttgttttagtttgtggatgaaatgaatccttttttaactcactgatgcttataaggttgttcagttttgattttatggaaaattctggagttttctcatatagtggcgtgataattgttaagctttgagaatgcaaatttagctctattgtctctttgtttgcattcgctgaacctttgatgtattatctgatatgttatcgaagattttcttgtttactaacttactctccctttatatctcaattttttatgtgtgcacgtgagctgatgagcatgccaatgactgattactattgtttgaattttacttgattgagatataggaggtgaag

SEQ ID NO: 26774 - DNA, 423 bp, Glycine max
  Intron number 5 from transcript Glyma20g24090.1 (locus Gly ma20g24090) derived from phytozome v7.0 (chr-ID Gm20; pos 33789431 to 33789853 reverse strand)
attctggtaaggaggtaaccagaatgctggaagccaatagaatcccccttcattctagtttggatgaaataaaaggtgggtccctattttcttcaagttgtaatcttggaaagtttttgagctaattattattttgcaaatatcaaattcatgtttgtagttgagtttcttgaattattaactggtggaaataataattcctatgtgatgtaattggttcatgaaatcttgtacattgttgtgttgtgttggttctgcctcatattattagcctcaacattcggcatgtgcaacgtatgattatcatgtctccgttaacttgtttctgtttccattatggactgtccttttctcagtcctactttggatattttcgtatatacttctatcttagtctgttggacatcttagttcatcttttaa

SEQ ID NO: 26775 - DNA, 488 bp, Glycine max
  Intron number 2 from transcript Glyma17g10610.1 (locus Gly ma17g10610) derived from phytozome v7.0 (chr-ID Gm17; pos 7968013 to 7968500 reverse strand)
atcaggctctagggctgctgaagttttgaacctgggtatgccccaaaacctttgatgtttttgttctttgcagaaggggcattagtactcttatgaatttcatagtactttggataaatttggtgattgaagattgaaaagggtttccatcataaaatgtacttaaatctttttctgtctctactttccatgattctgtctgcaaggtgtcaaacctacttttcaagtatttatcaaatccagaagcagtttgttaaatattatgttcataaagaaattgaaatgtgatgaaaaagaagaaaggattcctgaacatatttcccactattttgtttccttctatacatcagaatctgaatggtactgagtgttattgtaaatttctgcaccacatatttatcaataaattaatttttaatcaaacttattgtgctctgatttgatggctatcactctgaatgtatgttttcactttcagtgcaaggtaa

SEQ ID NO: 26776 - DNA, 862 bp, Glycine max
  Intron number 1 from transcript Glyma17g10610.1 (locus Gly ma17g10610) derived from phytozome v7.0 (chr-ID Gm17; pos 7968544 to 7969405 reverse strand)
cctttgcttctttcgctttctctaggtatcttcttttatcttctctcgtctagttagttgaatttagtaagtttaatcgttaatcaattcgatacccagcttgttctgtgatttagatgaaaaatagcctccagttatctgcgaaacagttgaaattgtgttcattggaactttaattcgttccacgatcaacttcgggttatctaataaaaaatattatatgtatttaggtttatgattaggtccgtgttctgcttacaaacactgatgtttctgagagtactgtttgttacagaacattttaagatgttagttctatatataaaaaaaatgatttgagtaactaaggatttgtaaaaaacaatttagctaatgattacctgagctgagtactgtttagaatattagcaaggctataactctaaaccagaatatatattgaccgatttatttgcatcataataatgctttattggctgcaatttgctgtcgtattggaggcccaattgatttgctattttttgtcttactacatttacgcaaactgatttggttagataattttttcagaattgaagtcaagagcagctggagcattattgtattatttttttatttcttaggttaaatgactcacagggatgctagataagtcattttgtaatttcctccaattcacgttttatacaaaaaaaattcaaagataaagtattagatttaactactaaccagtatttttttttatttggtcatgtttgttgtacatatttctaaaatagtttactattactcgatttcatttctatagcttgtgatacaagtcttattgtgtattttgagtgctgaattcatttttgtaggt

SEQ ID NO: 26777 - DNA, 583 bp, Glycine max
  Intron number 2 from transcript Glyma20g31660.1 (locus Gly ma20g31660) derived from phytozome v7.0 (chr-ID Gm20; pos 40262426 to 40263008 reverse strand)
atcgtctcagctgggctcctcttacccaattggatgtttttgtgccccaacaacataaaaaatatgatcaacaagaaaacataatcaagatacctttcttcttcttttttttgggttaaaactaaaatattcacttgtatgtataataattgtcttcgttataagttttaaatcttgtacaagaaagctgtgatttgtccctaaacatgtataaaagtttacttttggtccttgtgctaatattattagtgaaaactttttggcagtataaaactgctagaaaaccaaaacttaacttttgcaaatacaattttctagtagagactaaaatgtttatagaatgcacatcaggtgttgatgaagttatttttttcttttttgttcgtttggaattttgggatttttttaggatggttaattttttagaattgagacatttaaagggatgtagatgtgtggttaattgatgtctacaagcttgaggagtagtttggtttatttattcagggcatttgtttgttatttgttaaataatgtttgaagttatctttgatttttctctctttccatttgggcgtgcagg

SEQ ID NO: 26778 - DNA, 851 bp, Glycine max
  Intron number 1 from transcript Glyma20g31780.1 (locus Gly ma20g31780) derived from phytozome v7.0 (chr-ID Gm20; pos 40389320 to 40390170)
tctttggagccagcaacatcatcaagttcttgcaggtagcatagcatgcattctaaccgattattattattattattattattgctttgtgtgtgaccagttcacacttcatggcatgccatttttctttaaaggcaacaaaaagaatgggttgaattgtctctgatcattttagagaaacaaaatcacgggttttggtcaaaagtgggaggaaaagctagcaaggggcatacctaattgatgatggccatgatgggttgttgttttctaacttactaacacatcaaagctatgcataattctctcttctttcaactctagcaaccactactttctttttcatcttttagggaaaagaatggccaagtcaaaaaaaaaaaaaaaacattttgcgtaccacttatgtatctcttcttttctatcttcctttggtgcttcccattgtgaccaccaaggttttacaaaactttgcaactataatttcggtcacaacatcaaggttcttttttttttttctctataatcgtaattgcaattacatctgttcataatttctcgcaatctcaaaagttgtgaatttgaccaaactataatcgcaactgcaacagtaatttaaaacctgggttttaccactatataggatatggtcaaaagttaggtgcccacatttggaaactatctactatgtttactaattttggccaaattggtgctatgctaccccttgtgaccagcatagtatagcagcaattttcttaatttctccaattctaataaccaagagcttaatttatgttaacagcaatgaaattgcattgattttcaggaactgccagaatcccagagagcag

SEQ ID NO: 26779 - DNA, 930 bp, Glycine max
  Intron number 4 from transcript Glyma18g49500.1 (locus Gly ma18g49500) derived from phytozome v7.0 (chr-ID Gm18; pos 58905046 to 58905975 reverse strand)
caaaacaagctcacgctgctttagttagtcatggatatggccaatgttatcaaactaagagtttatgtaaattcgtgagagtttcataaactcgactcgtaaacttaattcgtaaactcgtgagagtttcattaactcgactcgtaaacttaattcgtaaattcgtaagagtctacttcatataaaaataacaataaaatatttataaataacatactaattaaacatttcaataatatttaattcgtaccccattgcccggaggctcttcgttatgcgaaggtatgggggagggatgttgtacgcagccttacccttgcatatgcaaagaggctgtttccggattcaaacccatgaccaacaagtcaccaaggcacaactttaccgctgcaccagggctcgccctcaaacatttcaataatataataaagtaaaataataaatcataaatttcattatacttaaataaccaagtctaataatacatcactactagataataactcgcaaatgttatagtaatggtagatcaagggttaggtactattagagaacaaaagtttgacgttattaaagaataagtttgatgttattaaatgtgaaaatttttttattcgagaataataaactaaatgaatgtatgttaaacactaaacagacaaaaaacagtccaaaatgacttacattttggtataatttttttaacttgctgactcgttgacttggtggtaaatttgagagtctatcaaatttacttagagtttatagaatctactaaaaagagagtttacatgcgagtcaactcgcatagggtaaatgaattcagtaaactcaaagagttagctagttaactgagagtttgataacatggatatggcatgaatatagtggcaaacagccaaacacaacacttgttgacttctatagcaa

SEQ ID NO: 26780 - DNA, 549 bp, Glycine max
  Intron number 5 from transcript Glyma18g53810.1 (locus Gly ma18g53810) derived from phytozome v7.0 (chr-ID Gm18; pos 62070347 to 62070895 reverse strand)
tttggaattcctcaagccaggcgtgagtataagctaaccctttttattgtatctgctgtgtgttttataggccttgtgttttaaaatgagagctattataattgattttgtgtttataggctttttataaatgtttatattgaagtgaggtgactccttttttagcttcattttcttccacatgtatacataactgaattaactaaaagtttggagaaaaagaagttggagttggtttcttgtattacatgcttcgtggtgttatcttttggttttcttttccttaatttggttttcatatgagctaaatttgatttcctttttttttttatgtaatgactactttagtaaatattaaatttaactttaacctattaataatgtatacggtgtgtatttttcctttgatgttgtattttatgccttctactacagtacttcaggccgtgagactgttttacttctctttttccttcctttctacaatgactaatttgttccttgtttttctttgaaaatctgttgttgcttgtcttttgaatgtgtagt

SEQ ID NO: 26781 - DNA, 598 bp, Glycine max
  Intron number 1 from transcript Glyma20g22600.3 (locus Gly ma20g22600) derived from phytozome v7.0 (chr-ID Gm20; pos 32546350 to 32546947)
ggtatgtatgtcatcatcatcgatccatcgatctaactctctctttctcttccttctaaccgctgtttccgcatctcgcttccttcccaaactgtagattcgtttttttctctctctatttcttccttttatttttatgccttctctctcttcagttttgtttctccaatgtgactggtgttgttttgtgtttttcgtgtgcgtcgttcgttaattttgttttgtgtattcggatcgagatttttcgcgttcggttgcggggatcttcggtttaggtttgtttagggattttgttttctgtttctgttgctgatgagtttttcgttggatttgtggtgttctgtgagattggcggactttttatttttatttttatattccttcaattttttcttttttggaaaaaatgaatatttatttatggacggaatggatttgcttttttctgtctcttaaattcttgtttaaacggtggtgcgactttcctatttagttctgtttttatgaagcctgttcactgcaattttgcttctgaaaaaaaaggatatatatatatatatatattaattatggtggaattgttcattctggcaggtaa

SEQ ID NO: 26782 - DNA, 957 bp, Glycine max
  Intron number 2 from transcript Glyma20g35100.1 (locus Gly ma20g35100) derived from phytozome v7.0 (chr-ID Gm20; pos 43385524 to 43386480 reverse strand)
tgcaaagtggggaggaagtggctgtgaagctggtgagtgcaattattgagttacattgggtgtttgggattgttaaatgcttgaaagtctttataatgtttttgtttttcatagtgcatagatgtatttttttgttgtggaagagaagtgattggcatgggttttcttaatggttgcttggtcttcaactaggacctaggggaatatttgcagatattgtgcctgcttcttttaccatgtgttactgagaagaaagggctttttaggataactgttgagttggaaatgttgctggtgaaaaacttaaaaggggattggcagattcctttgtgacatctgacagcagtgaaaatcccatagagagatagtaataaattggaaggtcatatgctttttagtaggtgactaggtgtgataactgatcagagactatttcaataattatatattatatataatgtaccaatcgcccctgcctaaaatatgccttagatgcccataggattatcagactgtatttgtgggtatattggcaaatgaggaaaagataaattattgtagtctaagatttgatctgcatacatgatttgacatgctgtttcatgcttcaatataaatgcacacttatttgaccagaatctttttattttattttattagcttgatcttttcaaaaactgttgctgtgatgttgtctcaactcaatatttggttgctttaaaacattagtgcaagtctaggctttgtactttgtgacttatatttttctagattattttctgtagagcatcttatattacagatatttggatctgttgtattttacaatttacagcctgagtagtgacaatttgtaagatagttttttcaactttcaaagtttaactattaccttttctccccaattgtctttgttaatcaggaatctgtgaagaccaagcacccacagcttcacta

SEQ ID NO: 26783 - DNA, 607 bp, Glycine max
  Intron number 1 from transcript Glyma18g41350.1 (locus Gly ma18g41350) derived from phytozome v7.0 (chr-ID Gm18; pos 50206075 to 50206681)
acaaggtaactctcagttagatcccttctttttcactcttttctttttgctaatcaactttgtttaaagtgaatcatggatcagattgatttaagaactaccttgaattattgttatgatttgtaatttttatgtaattgtataggatttcgttctaatttttaacttggtgtaagaaatattttgtgctatatctacttgtgactaatccgattctaaatttctaaacagaaatactatagaaatatttcttgcactttaatgcagaaaattaagcagaaaggggatcctataaacagattttatttacttctacatagctcaatcatatatagttctgattgatgaacaagtggttggtttgaataattatggactcaggtttttgaatcttgactcttatgtgtaaaagaaacttggttggaagaaaatatccccccattgggtgtctttagatcactcgaaggagattagtctctatgaatgattagagatattccttgcaactatatgcgtatccaagaaaaataatagttctatttatgccaactagtattttactaacatatacgtaatttaatttgtgaaatcagtgtgtggttccagc

SEQ ID NO: 26784 - DNA, 804 bp, Glycine max
  Intron number 1 from transcript Glyma17g19920.1 (locus Gly ma17g19920) derived from phytozome v7.0 (chr-ID Gm17; pos 18356662 to 18357465)
aggtgtattcagcatcgtccttaattttctcggaggttagttcttcttctttctgtgtcaatgtatatctttgatgtatgatatgccttttttttatttcgtaggaatcaaacataaatattaaaaattttataagaacttatatatatatatatatatatatacatatatatatatatatatatatatatatcgttcaattaatcgaatttgatcactttagtatatgtatgacttgatttgtgtttagaaacaaattcctctaatacctagtttgaccacattgattactgagaaatttccctttaatttgaagacatacaaaggttgactacttcttaaatcttgcttagtatttaaaacatttatttattttcactgtttttttatctataaatatttaaaaataaaaaataaactaatattttaattatttttcaaataaataaataaatagattcataataagactaagcctagtagaagtggttaatgatgataaaccaagattcaaatcagtacacgcactatgtttaattagttagtaagaaaaatgaaagaaaagaaattataaggaaattaagaaagagaaaggaataatgatagttaatgagataaacaggtaaattggtcttttgtagctatcggaattatgataatattattatgcatatgacactaatatgaaatgtatgattattcatttgaaaagattcaggtatttaattttctcttttttatctaatataatatgtttttatataaataggtaaattggtcttgcccaatcctgaatcagaaaat

SEQ ID NO: 26785 - DNA, 445 bp, Glycine max
  Intron number 1 from transcript Glyma19g01790.1 (locus Gly ma19g01790) derived from phytozome v7.0 (chr-ID Gm19; pos 1366046 to 1366490)
ccgataccatcatcaaatccactgtactggtatgtagtaagctatgattttgaaaaattaaagattaaagccaagaaaacgtgactaatacgtataattttatgattagaatggtatatatatatatatatatatatatatagtaaaagaggttagttttttgttggagtatagtagatgagtaaaaatctaatttattaattgatttgagatccgttggaaatgtattttgatcagagggatatcttttaaatttatgtaccagagatcgaaaagaagtgaaactacaataaaaaaaaacaaaaatctttagcatgtaaatatcatgtccatttgctttgtgttttatttaattaaactcctcacttatgggacattcttcattttcattacatatgtttgatttgcaggcagtaattttaggagcaactgacacaaccagtac

SEQ ID NO: 26786 - DNA, 976 bp, Glycine max
  Intron number 3 from transcript Glyma18g52210.1 (locus Gly ma18g52210) derived from phytozome v7.0 (chr-ID Gm18; pos 60878851 to 60879826 reverse strand)
gcaccattacaggtttcttttcttcttcttgtagagccgtttacaaacatcatgttagtgttggattcagttgggttattagttttgaacttgatcgtgaggcatttaattatttgcaagggttttctttactctttaggtgattattgatcgtgaggcatttaattttagagcattttattggtctggtatgggtaaacatataaaagaccatctcattgggtgggggatttcttctagcctgaaagtggagagggattggggatttagcttccaaaattgattttctctggcggctgaataactgcaaatctttcctttacagagtagttcattgtgggggtaatttggagtataattagactgtgctctgtaggatgataatttaaagatactgcaatttcttgtagttcttatagtggtttgagacaagctgcctctgtgggctttggatgatggttgattcttgtattaagtttttgggggataatttgtggggaaatgatcctttcctggaagatctcaggaacttaatgtcttctaagcttatcacttgaccgatttctcttctcatggctcagtattttcttgaaatttcaactttcagaggaacttgcatgatagtgaaactactgaactagacttcctgaccaccttacgcttttacagtgttacttgattctagtaatatcttcccagttcaaatagaacaatgtggatttcccacccacactctaagacgtatctttaccattgtctgattaaaattattgcaacatcttccatgaaatttcctattggacatccatctgatttgagtttgatccagccatttgggtgtgtagataataaatctttgatttagtgagtcctcttactatattgctgcttcctagttgaactacaccaacaactttaagacaggaagtcttagcttactgattctgggatttttgccacaggtgttgatatcagt

SEQ ID NO: 26787 - DNA, 1003 bp, Glycine max
  Intron number 1 from transcript Glyma20g27390.3 (locus Gly ma20g27390) derived from phytozome v7.0 (chr-ID Gm20; pos 36565442 to 36566444)
gaaggttgcaccacaccaggccgtcgcgttgtaaggttccaagtcagtgtctttcttctttatcaattttattacgacttgtttccaaataggcatcaactgagtgcaacctgcacttaactctacaatggctgggaaattgacatgtgtttttgaacttttgaagtattggaatttgaattaattagtgagttcggaagtattgtattttgtaagagtgagtgttcgacattgcattctgtgactttttattactgtttttgcttgaagtttctggtattgggaatgaaattgaaatgagaaggtgttcaacacttttgtaattagtgatgctgattgaggttcaatcctttaagcttttcttacttgttaccgattgtcactttttggacggaaggatggactgatacaatttcagattgatataggaatgggtaacagattgctggatctaaatacgagaaatgccatggcaagtgttgtaggataaaagatgtaatgggaattgttacatgggttgggggaagttactgttattattttaaagtctgtattttttagaaacaggcactggttgcttacttgatttttaattgctaaaacattgtatgtaagcaagtgaactgtcttttgtatcaaaatagggtaccacttttacctaatgctgtttttacttgaagtttctgtcattgtagattctaaatttgttctgctgaaactttttttttgtgcatattaatttgtgatatgtttgtctttttttggcctttttattaattcaaggtataaagttttcaatttttttaatatagaccaagtcatgtgggtcaataagtgacccactagtttgaccactgacccaatgccttgaccggttcgatcactttttggtttttaaaactatgcttcgtagttcctaggccaatgtttgcattcacttccttatatgctctttggaaccatcacaggctttttagacagctgacaagagacaacaagatat

SEQ ID NO: 26788 - DNA, 746 bp, Glycine max
  Intron number 3 from transcript Glyma20g29650.1 (locus Gly ma20g29650) derived from phytozome v7.0 (chr-ID Gm20; pos 38503343 to 38504088 reverse strand)
aggaaggtaatgttaggttgtcatttggtgtttctaacaataatcattacctttttttcattttttactgcaatcattatttcttatatcttcttgcacttgagagaattttggtgttgatgatcaatttttcctaccaataatttaagtcttttgagggatttcatgctaaataacatttcttgaaactttagtttttaactgagtcaaatgacattgtatgtataatccatgtaaccaatctcacccagggagataaggctttgttgttaatttatcatattatttccttacttggtataaattaagtgtgacatggaaggataaggtggagataagtcaacctgtttaattttgacatgatatttaatgagatttcagtgtaaaaaaggggagttaatttaaatttgctgtgcaagacagctacaaggaatgcttgtatagtacagtgaatttagtaaatattagacaaaagtttatcgttctgtgagtaagttaggacagatcaggtatctttgaccctcaccgagaaactctgggcaattttttttcattctccattatgggggaaatcattcaaggatctggagtaattttttgtattgatagattacttattctattctggcctagattattttccttggtaactgtcataactgcccctaactcagtttccatcactgggaatattgtttgattgttaaacagatagaagtttgagttttaaagagcacagaaaggcc

SEQ ID NO: 26789 - DNA, 673 bp, Glycine max
  Intron number 1 from transcript Glyma20g29730.1 (locus Gly ma20g29730) derived from phytozome v7.0 (chr-ID Gm20; pos 38566979 to 38567651)
caggtgcattttcttattattcctttatttctctcactttcttcttctctgcttttgcatttcttgcaaggtaggagtacttttatgtttgccttttttttctaatattttttggaaaatttttaagattaggaagaatggggcttcttttcttatctctctgaagttttcatttttcttcaaggttttaggtattagttagtgaaaactttgagcttgctcttgaatcaacttcaatctcaatgtgacttgttttcataatgaagaaaacccccgattgttgcttttggttgtgttctcctagcagcaatttctgcatgttatagaacttttttttggggggggggggggggggggttaagtaaaagtttataaaaaaaaggacttatgacaactttaaattgttaatttagttgtgttgtttctatacttactgcaaccaaatttgttggcatatgcattgaacttattttgatccaattatacttttccctttggaaaatgttttggaaatttgtgttggacgggggatttggtgcgtgctatgaaaagggtgaaaatttgctccactatatgaaggagaaaggtgaaagcgtggttataaagatggaggaattattcaacgaaaaatcatttaatcaatatatttttacaatgaactaggtctcctaag

SEQ ID NO: 26790 - DNA, 468 bp, Glycine max
  Intron number 2 from transcript Glyma17g12660.2 (locus Gly ma17g12660) derived from phytozome v7.0 (chr-ID Gm17; pos 9534082 to 9534549)
aggagctctctgtcatcatagatctcattaacactgtaagtagtgcatgttactctctgtcattcatgggaaagaccttaagtaagggcttcctttggaacattctttagaagaaaacgcctgtacatggcttaaaggaaattgtgttagtttcattcatcaaggaatgtaatacagtgttgagagaacttttttgaatgtcaacttacaatgccagagaactaacaatcgtgggttcataattagggatcatgccatttgatgtattgaaacctttcttgtataaccaatttctttgcattatgggtggcaaccgtgttttgaattttgactaagttttttcttgggtgttttttggtgcagttgtttatagtgtaaatttgtaactgtgcaagttatgtgcagtctgagtgtctgacaatacagacatgatgttttgttcatattattgtttttaggttgaagcaa

SEQ ID NO: 26791 - DNA, 1018 bp, Glycine max
  Intron number 1 from transcript Glyma20g22980.1 (locus Gly ma20g22980) derived from phytozome v7.0 (chr-ID Gm20; pos 32912297 to 32913314)
ggtggaacacacactataggtggccttatcctacggtaattgaaattaatatcatgaagtatatatatagcaatatagcttacgttatattgtgtattgctcattaacagtagtatgtgatctgatttgatgaaatatgccaaattgccaatataaagccaccttgaataatgtatgtccatcagcaatgatttgaaatccatagtttgtaattatggtcaagttgtgtgttatgttaaccctgcacaaaacattctaattgcttaattgcagaaaaattgtaacttggtgaattttgtcgccgatttgtatattgtagtgatatagtaattttcttcttaaggtagtccatgactagaggattcataacttgcatatttgtactgtgttccacatgcctagagaattcctattgttttgtaaaggaaaaaaatgtggttttagtccttatactttccacttaaactttttagttaaacttggctttatcctgataatttcaaagtgatgaatttaatcttccaacttttggaaatacgtgaattcagtccctcttcatgttttaacttgaactttttgaggtggattttagcctctaagaagaagagggactaaatttacatattttctaaagttggagaactaaatcaattgaaaagtatgggaatcaaaaccatgtttgaatgagagtatagagacaaaaaacgaatatttttcccttttttatatatttctagtagaggatgaactctacaaagttttgtatgaacttctgaatttaatatgcgagcatgggtaatttcatttttgttagttgcagaaaatgaggatgaaattgggtaattactaattaagcatgcgtgcttaacttaaatttgcacatgcaacttaccctgagccctggtggccaattaatcaatcaagcacagtttccatttaaatagacattgccaaatcttatataaatgccttgaaactaatcatttgttaggaggaagagaaagtgcagctatcagaa

SEQ ID NO: 26792 - DNA, 333 bp, Glycine max
  Intron number 1 from transcript Glyma20g02160.1 (locus Gly ma20g02160) derived from phytozome v7.0 (chr-ID Gm20; pos 1737628 to 1737960 reverse strand)
ttggtaagcctaagcaaattaatatttataagttcatgtttggataattaattagtcattattctaaacatatttttgaagaaggatatatatactctttgtatattttattttgtatatcttcggaatgagtgcaatgcttatccaaacacattgatttttaaaattctcatacatactcatagtatatagtcttgtaatttttgttttaatgtggttaataaacatgtgatttgttatggtaggaaatttgatgctattgtgaagtgtgaacttacacttaggttaaccatatttttcttttgtttttccatgtgtcctgtggtgcaggta

SEQ ID NO: 26793 - DNA, 805 bp, Glycine max
  Intron number 3 from transcript Glyma19g17920.1 (locus Gly ma19g17920) derived from phytozome v7.0 (chr-ID Gm19; pos 21648588 to 21649392 reverse strand)
gaagaatacactccgttcatcgtcactctggggtacgttgccattaaccccttatcttgttttgattttgtaaatatccgaaagagatttgcataaaagagacgtggttttactggcatttgttaacaagcttcaccatgaaatgctagtgatgaagtgattgtgagttgaggtttataaaaattgtccgggatgcaattgcggctgcgacgtcagggatttttgtggtcttccacggctgtatcagctgcatgtctacaattttacacatatcaattattgcaacaaaaccgcaattgtgattatgaccgcaatttaaaactttggtttgagtgagatgtaggttaagagtgaaagaaagtgaagtacgagcaccctgtgtgtgtatagatcagtagcactaattggaagtagtttttttcctttgtttattggcattctgatgtgtttatttcatgccctgttagattctatttggtagtcataatgaatcttagattaacacccatgactgtgcatgattgaccaaatgttaaacagtgattccaggatgtttttcttatttgttaattggaggtgaatattagaaaagtcatgaaactcatgatgttattgataaaattcagttaagtagaaattgttgtgcgtcaggtgccatgtactaaagcagcaagtgtattataactttataaattaaagctttacattggccatactatcacattctggttgatttgatgttttggacttattttgatttatgcattaatcttccaattttaggctgtagcaggattagcagctg

SEQ ID NO: 26794 - DNA, 684 bp, Glycine max
  Intron number 3 from transcript Glyma19g28930.1 (locus Gly ma19g28930) derived from phytozome v7.0 (chr-ID Gm19; pos 36494076 to 36494759 reverse strand)
caccaccaccatcaacaacctaatcgccttacaaggtgctgaaaataaacaacatcaactaaagggttttcttcatgattttctttcccctcttttgttacccccccttttttctggggtatggtttttcccccagagaagatgtgatttgggtttatggagtgtaatgatgctgttcctcctctagttgggtacatagaaactctcaggaagaaaaactattagcacagtatcaaggagaactttttttttgcccctattcagttttttttttttcattttgtttgttttcaagaaggaaaacaaatggggttttgattgatgggtcgtaatggtacttccctttttagggttgctgggaattctctcagaggatgggaagcagccaagggagaaaaattcctagttttttcattcactattttttttctccttaagaaaagaggtttttgatgatgcactgatgtaaaaaatcaagtttttataacatgcccagatgggtaagcatgtacttttttttgggtgtaaccgttttctttttctttttcagaacaagagggcattggatctgttaattctgccaaaatgtctcaaatttgcgtatttttatttatttttttgtgatttttgacgttgaatttggttgcaggaattccgacggggcgattctccggtcgtcggccg

SEQ ID NO: 26795 - DNA, 904 bp, Glycine max
  Intron number 1 from transcript Glyma18g08300.1 (locus Gly ma18g08300) derived from phytozome v7.0 (chr-ID Gm18; pos 7074855 to 7075758)
gcgaacttgggtccccaagatatcagattccaccaggtacagtcacaatgctcaaattttgcgttttaccccttatgggtcggtgtttggatgcatggcaaacgagttttttttgttttttgttttttcttaattaaattttctatttgtaaatggtattctgatatgtggtgttcagtctgtgtataatcgttgcaacataatggaatagtgagtgagtatctcagatcattcaacagtgaccaaatcttcatatcagtttttcttctttttttccctattttttttttaattttggttttctgaacaatctagtccagtattttagctgtagattgaaatcaaactttgggcatgatgatattgttatctttttttatgactttattgcaagttgaagttagttaattgttattcttgacaattgacatgtatgcaccttttggtgaatttgcatttctgataaaattaaggaatgtggggttgcaaacttacaataaaaagttagcttgttttgttatttctgggcgtgaactaaagtacgcacaataggttgcagaagcatgatttttaatgatgccatccaactttaactatcttatgtatatttgcaaaactgaggcttcccttttttttttttttgtcggttgttatgatttaatatatcacttgcatatttgtagcagcacttctgtctttgccttctttctttttggtacaggagatttatgatctttttcatggcaatatgcttttgtttgctgtgatggttgttgttacttgttagtctactcattggtgtctttgcttgcttttcttctgatcatggttcttgtgtttgttggttctgtatttatacttaaaaaacagactatatcttctgcttgtggcttttcttgcatcc

SEQ ID NO: 26796 - DNA, 1022 bp, Glycine max
  Intron number 1 from transcript Glyma20g35680.1 (locus Gly ma20g35680) derived from phytozome v7.0 (chr-ID Gm20; pos 43903392 to 43904413)
cactttcacgactgcttcattgaggtttcttctctctctctctctcacacactcactcagtacagaaagttcactcacatatggatgtactagcacactttgcatgttttaaagggaaaagagattttgtcatttttaattgtagttgcatttttaaatagtgtatggtttcttttaaaaagggaataaattgcatatgaaaaggttgaaatcgagttgctaatcctattggatataaaattgatgtgtgtaaaaaaggaaacaaaaatcataaattaaaaaacttatatatgtcatgtaaaaattaattgaaatcaataaataagtaaacgataattctagaccacttaataatttctcataagaaaaaataaataaaaaaataactaatatttgattgtatttacagctgcggttaatatatagcaatacgaaaaatactaaatatacacccgttttctcttccactccatttttacctcattttcatctcatttatttttttatttgtctctctattattataactataaaaaaaatctatatctttcttttactcatacacccaaaaaaaaagaagtatcattattctagcaatataatttgaaaaatatagcctccaatctgccttctacgtcatactctcttaataatattttattatcacaagttttagtgtaagtcattaaataacagtatagcactttagtttcactataatttttaaataattcaaacgagtctgcaacagagtttctaaagatatagtgcaaatataattaatctttgagaactacatacgtacactatattatttcttagaatatatgagtggccaatacgtgaaagtggttactcaactatttcttgtcgctacaatgttcaccactgaaagatgtagtgttgtgcatgtgtttcaacaaaggacaaaccggattaaatagttgcatatccacattattatatagtacttcagagtattgacacatgcatcaaaattgcttattattttggtattaggg

SEQ ID NO: 26797 - DNA, 862 bp, Glycine max
  Intron number 4 from transcript Glyma19g41690.1 (locus Gly ma19g41690) derived from phytozome v7.0 (chr-ID Gm19; pos 47899349 to 47900210)
agaagcccttgctgcgtttgtgaacattgaagcaggtgtttatcttgtactgccaatttgcatgatgtcaatatgtgtattttgaaacaagtttgtgactttagcatattttgaattacttattttttatttggtgaggagatttgaggagtatcaataaacatgcactccctgaaatgttggacttataaatgtttttcaagaatgttgaagagaaggttttatttattttatttttttgtgctcgtgttgggaaagctaacctgcatccccttgcatctatttataacgaaatgatgcaggtgcattcatgcatttgtacctaataattagaaatataatataaccatcccatgttgttttcctcttttattgccaccctgttcagtgtctctattgtaatatgctcatgatagcttgtcatgcattctttgttctgcagggcattttgagaaattctagcaactcattctttagcactctcttttgaacaaaattttgtgtctcacttatgattttatagtttttaataaattttagtcaataataaagagtgtatgaggagtgcattagagaatatgttttctttatcagccaatgttagttgttagtttttgttagaatgttggtgggggggattcgaacccatgacctcttccccctcttcagcccttctcccttcaactcttaaacccccattcccaaccaccaagccaaccttataactccagttagagaaaggagagtatgttattagcacttttctagcacttatagtgtttctcaattcttcaaagatttctttgcataatattaagttgatttggcattgacatcaaacatcttgttaatgcaggtacaa

SEQ ID NO: 26798 - DNA, 770 bp, Glycine max
  Intron number 3 from transcript Glyma18g47050.1 (locus Gly ma18g47050) derived from phytozome v7.0 (chr-ID Gm18; pos 56699647 to 56700416)
agagcaagttccttttacagcaaaggatttgtcagtgtaggtttcctgcttgtttttttaatttataactttccttatctatgtgagttaatatgattgaaaattgaacaaaaatactactggaatggattatagaatatgagttggaatccttatagtagaatataattttgtattagaaattgttgcttaaatataaatatatatatatgtatgtatgtatgtatgtttgtatatatatatatatatttatatttttttttacattttatgaaaccaggaaaagatatgtttgtttcttttttatcattgaaattgattgtactgtcttactgataaataggaaatgcagagagaagtaaagattttaggtatttgaaaagcaaaagtagaagtattatattaggtctgaagaatatgctttttggaaaattctgtatcgatttgattatgtaaatgccaatgctttacaaagtaactattggcatctgtcatatcatgggttattaattagtatggcaattgagtgtctacatggtttctttttaccctacttgccttatctaaattctaaagccatattgtaataattgtatattgttgaatacatcactctgtaattcctcaatgcttccttggaagtgtcaaatttttgcacttcactctgtgtatatcattgtataatttgaagccattttgcagtgtgatcttgatacatctctttatacatctattttgccaggagcaatattgttagtgataacaaacat

SEQ ID NO: 26799 - DNA, 645 bp, Glycine max
  Intron number 1 from transcript Glyma18g05820.1 (locus Gly ma18g05820) derived from phytozome v7.0 (chr-ID Gm18; pos 4454881 to 4455525 reverse strand)
cttccatctgacctttacaaacgatcccaagccaggttttgttgaataactatttgatttttcaattatttttttcttcattaataacaaaaatggattctttcaatttataaaaaaaatttcattacattgaatgttatctccaattatataaattgttttgatcatatcactagtaaatatgaaatttccaatacccctcaggttgaagattggatatttgtgaacggtcaaataatgttcctaataactacgacatgataagttcaacaataatagttatgataaattttgatatcatattagaatttggatttttgacaactccactctcaaattctgaattagtttttgaaattgaataagcctaaaacctaaattttaagatgatatcaaaatttaaattatctatatataattgtatggttgattatttttatgagaatagctgttatttagtatgttaaccatacacattaactaataataatatctaaggacatgataaggggatagatgtttactatctagttggttgtagttctggttctttgtttttcaaattattttataaagttgattttaagaagggtaaagaaagttaagtgactgtttgatgtaggtatacaatgctgtgaagaaggt

SEQ ID NO: 26800 - DNA, 535 bp, Glycine max
  Intron number 1 from transcript Glyma20g31340.1 (locus Gly ma20g31340) derived from phytozome v7.0 (chr-ID Gm20; pos 39967913 to 39968447)
gtgaagtgcattgctgctggttcccgcagccaaaggtaaaaaaaatatgttcattaaaaatttgctttctggtatttctatttattgtttgtatatgcttgcactaacttgtaaggacctggtggtacatttatttaagagattttttgtttcaaatgcataatggttttatggtgctatgcttaggcttttgagaactcattttgcattatgttatttttaaggtgttttcccccccttagctatttaagaactttttctaaaaattcttttccctattgaacacacatagagttcaattattgttgatgttttctgtttgacatttcctttagcaaatatgtttcatttgttttactttgatattcttttcctactattttgaacacataggagtcttgcctgtctcataagcatttaaatgaaaattgagcgtataaaaattagcatacaattttatgagtcacaatagaaaattttaaagaaaatatattgtgttgcagtcaactaatcagaggtttggtcttcaaaaaac

SEQ ID NO: 26801 - DNA, 392 bp, Glycine max
  Intron number 1 from transcript Glyma17g17430.5 (locus Gly ma17g17430) derived from phytozome v7.0 (chr-ID Gm17; pos 14253526 to 14253917 reverse strand)
gatagctgataaagcctactaaggtgacttttctggtaagcatcttcatcgtgctcttaaaaaataggaagaaaaatggtgatttttactttttttatcctattcgtctttaaaggcttggaatgttaatttgagtcttcttgaggttaactgaaacagaagatttctttgtggaattttgtgtgagtggaactggaagtctcgttgattttgttgaattattgtgtgaggattgaatcttgatgcatatgtacgaatagttgacatttttttgcctcttcatttaatgtctacctttgaagcgaatgaatatatgattcttgagggaattagggctcaaattgttcaaagttaaccaatctattatctaactaggtaaaaatctcacccag

SEQ ID NO: 26802 - DNA, 343 bp, Glycine max
  Intron number 1 from transcript Glyma18g00330.1 (locus Gly ma18g00330) derived from phytozome v7.0 (chr-ID Gm18; pos 83638 to 83980)
aactcctccaggcctttccgcctactcgctggcaggtactcactttgtatttgtattgtttgttttcttcataaatgctttcattcacaatatctttcgatctgatgctttcaactacattattccgctcgcgtcctaacctttcggtagggacccagcaacgtatccgaattcgtcttcttcgttcaaacatcacactcttatatctgatttctcctggattccaaacattagtgctttgcaaactcaaattctctattttcgtcctcccccttttgatgcataatggatatctgttgtgtgctggcagatttcattgatttgttttggattgtaggaactg

SEQ ID NO: 26803 - DNA, 658 bp, Glycine max
  Intron number 3 from transcript Glyma18g44280.1 (locus Gly ma18g44280) derived from phytozome v7.0 (chr-ID Gm18; pos 53994609 to 53995266)
aagacagtttccagctagaagctgtaggaagagaagtaaccaactcacaactctttccttatagttggtttacatgagttccgaaacttatatactcactttatatcctttcatatcaacattccagacatatacatacaagaaactagaacaacgagtaactttaacattttggtgagaaattcttttatggttctggggttccaattagtaacacaagttggttatttgaaaggatcggatccacaccatttgaagaaaaatatgtatttaatggagtgctatacatgctcctactcatagaggaagaattttcaggaggatacaagaaattttcacaagtttaaaccactattaccaacaccaatcttcagttttgttataaaaaaaaggattaaattacacctaattatttgggttcgtttatctatatttttagttgcatgggctatatatataatgtggtaacaaagtctagctagacgctatagctgcatcagttacatcttgtcaaatggggataatgttagtaatttataaaatatgatgcaaccaacaatactctcaaatgattagttcatataattttcaatcaaacctttgacaaaagccttattttgcagagtcacaagaacgacagtgttgacgcgcaagtggt

SEQ ID NO: 26804 - DNA, 994 bp, Glycine max
  Intron number 1 from transcript Glyma18g05580.1 (locus Gly ma18g05580) derived from phytozome v7.0 (chr-ID Gm18; pos 4206541 to 4207534 reverse strand)
aagtgcattttttctccgttgccccctacattaaggtaaaatagacaactaaccaaaatcataaaaaatattatccttgttatttaatttctttatgcatattgagaaagaataacaattttgttagatggctgttgaatattatgattttgggcctcacaagatccaccatagttcagtgttctatacaagtaatctttcttttgcctttgtcaacttgcgtcctgctgtgacaggtatgatgatgctccctcatctgtgttctcacttctcttatcatcatgttttattatctccaatattcaaagtggcatattattttttcaattttgttttcgagataaattaagttctttttaacaatttgtttggcagtgttatgaaattaacaaaagaaggtttaattaaatgctttgagtatatgcatatatgacgaagaaagtcttaggcttgtttagtttcagacaacgtctttataagatttcatttcctcttttcacaaaaaattattaccagactgcaactctatttttgtgttatttttatgttttcaatgatttgtacaggaaataacgaaaatataataatctttttaaaaaccacgaaataaagtaaaaataatgtgacaattttgtaattatttgtaaaaacaagaaaatacgtttctcgaatctaggaggcagatagatatgtaacaaaaaactataaacaacaactaacatacaaagttaagaaaaagaatatcaattcagccctgcataaatttgagataatctaacgatgattgaaaatttatgtaatttttttctctgtgtagtgtagtattactactgtaattagtgcacagtgttttactttgatttgttaggttactaatacatttaaatttaaaatttataaataacttattcttgaatcatttctacttccaaagatgtaacttgcttattgacctttttttttttttccatttgcaggtcatatcctttttaat

SEQ ID NO: 26805 - DNA, 726 bp, Glycine max
  Intron number 1 from transcript Glyma20g30910.1 (locus Gly ma20g30910) derived from phytozome v7.0 (chr-ID Gm20; pos 39574437 to 39575162)
actgctttgttcaggtaataattaactaaatagccaagctaggagagctcactcttatcagttaagcggtgtttttcctttaattgttttcatgtaaatccataacatttatattcttcccaccttaattaattataacatctttttaattaattcatacttttttaaaaaataattaatttagtattattattttctcatcatacaatttgccaattatttatactattattttaaaattgtcattttcttatctttttatctatttaattatttttattaatatttaaaaaagaatcttataaaaaaataattttttaaaaagatgttataattaagagcggagggactaatgttttactgaaagacaattattagaaatttttctactacccaaacttggtattatgcttataatccacttaggtagattacagaatgagcagtagaagtgaataacaaacactcttaagacttctggtactcatgcacaatagcatcactaaactttttctttaaagactttaacaaaccaatgattatataaatgatgatcatgcaaatcaaagttaatctgtctcgtatcatgaggccaaattaatgcacatttagatactttttgaaaacataagtactatttaattggagatatgctgacatatgcattgatggttatggtcggttattaatgtggttagatgaaaaatttaaacatgtagggttgtg

SEQ ID NO: 26806 - DNA, 703 bp, Glycine max
  Intron number 1 from transcript Glyma17g33230.1 (locus Gly ma17g33230) derived from phytozome v7.0 (chr-ID Gm17; pos 36890414 to 36891116)
tttggagactctgcttcgaaggtgtcaataccgtaatattcttcaactcttgccttttgttttttaattttgaatttttgattgcattgtttactatatgggaattctattttgtgctctttttcttggcctagacattgttattgaattgatgaaggattttgttttgtaaacctgaatttgtcaaattgagggtgttaatttgatttttcatatggcagatctgatcataggatatgccttaagttctagagatatgtatatatctatgtgtatatttatctgaagatatgtgaaattattgtcaatggaattgactcttctttttccatcggactctatttttctactttatggtctgtcaaagtttttattagtcaattaaattagtatttctttttcccatttttctttgatacagtttctgaaacgttcggatcaattaaattagtgactgaagttccccaattttctattttctgtgtttggttttttctattttctgttgtttctttgttttcaaatatttgaccgcatctaaactaggtttcattgaatgaaggatgcaacacttttcatttgattgggttttttcttaatgaacaatacatagattttgtgttcttgttatatctggggtataaaattttgctcttcagaatggtacttatttttatggattttgcagtaaccactactaaaa

SEQ ID NO: 26807 - DNA, 671 bp, Glycine max
  Intron number 2 from transcript Glyma17g33230.1 (locus Gly ma17g33230) derived from phytozome v7.0 (chr-ID Gm17; pos 36891239 to 36891909)
gacctacctgtcataagtaagtgatgatcttatagtcaatcatcaacagttcttctttctcagttcttcttaagcagttaatatgcttatatatatatattttctgagttgaggttttagtttttggattgggtttgtgtatggtttaactaactattgttacttcatcactaccaaagattttgtaggattgagtcttgttttgtagagcataaaaggaattgtttgcattggtgtttgatattgaaactgcacctagtcagtcatatttatgtatcacacaatttaaagtcatttgcaattcatcacatgatacaaatttttagcctcccgaatcatgctattctaacaactatgttcacaattgattgataaatatgaaactttggtatatatatgtaaacttaaagcctaacaagtatttaaagtcattcatgtatcaaacaactagaagtcttttgcaattcatcacatgataaaattttttagcctaccataaatcatgtgattctaacaactattttcagaatcgaatgataaatatgaaactttagtatacaaatgtaaagtgatcttaggaagattttcttttgactatgtgttgcagcttcatttagttgcttaatgaacccttgacattgttaaatgtttgatttcagtgttgtctgtaa

SEQ ID NO: 26808 - DNA, 354 bp, Glycine max
  Intron number 2 from transcript Glyma18g10640.1 (locus Gly ma18g10640) derived from phytozome v7.0 (chr-ID Gm18; pos 9514947 to 9515300 reverse strand)
ctggtgtttgtgttgttaatcccttgtttttgttttaatctcgatgtaaattctgtatttcctagactgttttgtaaattatggcaatgtagacagcctcgggtctgaattatgatggttttcaactgtgttcttgtatgcatttccaatgactggttggcggcttgggtatattgctggtccaaaacattttgttgccgcatgagagaagattcaaagccaggtatgctgtattttccgtttccatttttttgtttatgcacaactgaagtttttatttccttttgctccaatacataatagatatttaagttttaccatatgttgcaattaagaagaaactctctctttagc

SEQ ID NO: 26809 - DNA, 470 bp, Glycine max
  Intron number 3 from transcript Glyma20g33160.1 (locus Gly ma20g33160) derived from phytozome v7.0 (chr-ID Gm20; pos 41782378 to 41782847 reverse strand)
gaaaatctgcaaaagctgctgctaaggctgagaaggttaattgttgaatttatcatatataagtgggttattctacagtttgttcatgggtgtggatgaaatataagccctgtgcaaaatattgatgtgatctgtgtgattgcatatttcagttagagttatggtttgtaaatggatttttcattaagtggctcaatttgatgcataaaccctgtttgagtgttttgcttcatggtggaccattcttgagcctagccaagtctaatatttgctggcataggttttactttattaatgaattagttgaagcttaatctccaaattggtgtgaagagaagttaattaaacctgatttgcatgtaagtgtaaattgtggtcagcattgatgtttttgtagttaaaatgtcattcctacccttaatcaagccttgtatgttaagaaaactagaaattcaattatgcagtggctt

SEQ ID NO: 26810 - DNA, 858 bp, Glycine max
  Intron number 1 from transcript Glyma17g12900.1 (locus Gly ma17g12900) derived from phytozome v7.0 (chr-ID Gm17; pos 9791290 to 9792147)
tctaatcccaactgggaagcggataaaatgtacggaaagcactgactttttcaacttgccaccttcctttttcttttttcttttgacccacttacttcttcctatttgatttctctcttttgggttttcttcagtttcttgtgttggtggcgtctctgctcgccgcttcttccctcgtgtttttgttttaggttttaggtttttcgtgtgatcatgttggtgtgttgagtttttgggttttcttgcaccccccgttctgttacctcttcatagctgattgtgttgtaagccttacgcattatctgcgttttttttgctgtctttcgtctctcgtttgatttgcttctgcatttcactccaagctttgattttttttttcttctttcggttttcagtttggagtagctcatatgtaaatgtatatacgcaccccttggcatttagcctgcatttgttttttattttttagttcttagtaagattgatgtcaatttaaaatcttgtagttatcaactattctatgcatggtgtgttttaacctttatggcttttttgttttaccagcaatcacattatttggttgttgctgctgctgctgctgctgctgctgttgttgttgttgttgttgttgtgcgtgtctctgttatgtcactttcaaaatgagaaatgcttattggtgcaggcgaatgttgtgtgcagtggatgttttgtgtttgttagacctggcattgtcttgctgattgctatcactttgattattttattatagtttttctcaacatttctaattagctaccatttttttgggggggttggcgagcaggttagatttgtatattcacgattatctcacgaaga

SEQ ID NO: 26811 - DNA, 778 bp, Glycine max
  Intron number 1 from transcript Glyma19g28360.1 (locus Gly ma19g28360) derived from phytozome v7.0 (chr-ID Gm19; pos 35783457 to 35784234)
cgttgcacaggtacaatattgtttccaatcactctctaacacattttttaaacatattctcttttatttgttgaaatttgctagtatcattccttgtaataagaaacaagttatagtctgtattttacggctttatgagtacctttttcttataaaaatgaatgaaggtaatattaaaacatattatattaatgattatcttttttgattttatagtttttaataaattttaactaatttgagagtgtgtgtttgaggggattactttgctcctagccctccccttaatttgttttcaatgcaaatttgccttttttaactcttatacattgcatctgcttgttgaagttgagctttttgttagtgttgcatcagctacactttcataattttgggaaggatacaatgtagtttgaattgaattaaatgcattttttttctcttcagaaatcataggacgttgtaatagctgtcgacttttcgagcatggcaaatgtagatcctcattaatacatatctatctactagctacctttatttaatttcgtttccatcatcagcttttttttgctctttcaatcatgcaaatgttgttggttcccattctttccttctttgctttatcttagaaattggattgttaacagaggcaaatcgtatatacatttcttttgccgaaaatatattactccactgtatagtatttctattgtttgtcaattttattaacatccactcttgagatttgattttaagcatatatatataaaagtagtaa

SEQ ID NO: 26812 - DNA, 516 bp, Glycine max
  Intron number 1 from transcript Glyma17g06130.1 (locus Gly ma17g06130) derived from phytozome v7.0 (chr-ID Gm17; pos 4334591 to 4335106)
gctagtaatcacaacaacatcaactatgggtggggattggggtgtcttatatatgatgtaagaatactaattttataatttatttgtatttgtttctttttatctgctgcactttttagtgtttcttttctgtgcctgctgaagtacacataatgggtgtaatgtggaagagaaattgtgattcttgtgttcattctggtccgtcaaaagagtgcaatcaccttgcttacttgcttttctcactctggttggttcatttggagtttcatttccttctagactgaagtttataatggttgcttataatttggacaaaattagtgcatgtatgttcaatacttataactttcaatcggtgcccccctcgttttgatgtgtcgagtgaatatctaatagtaaatgtggttcactggttgtcccagttgatattcttctattttttttcccacatccgaaaaattgatgaaaatttgaatgctagtaggaggaggaggaggagccttcttagaagtaact

SEQ ID NO: 26813 - DNA, 791 bp, Glycine max
  Intron number 1 from transcript Glyma18g11010.2 (locus Gly ma18g11010) derived from phytozome v7.0 (chr-ID Gm18; pos 9843493 to 9844283)
tcaagtctctcgaagcctctttctctctcttctaggttcgtttctctctcctcctcgttcttgtttcttcggtgattttatgtgtgtgtttgtgtataacggtggtcgtgtgttttgagtagcttgaaacacgtttgacgaacgatgttttactacgttgttgtgtcttgtttattttaaatcatagtcttgtaagttcgtagatcgtgaatttgcttatgatttatttcttagatataaaaaattatggggttttgttggggattttatcatgataaaataaaagctttctcttttcttgaatgaaattggctttttttgtaacttttgttctgttttgttatgattttttgtttagcaccttcctattgattcctgattccgggagtttgatgattggccttcattaggtattataatttgtggatttgattataaatatgatgaacttagataccgtttatattcttaggtgcttttttggtactgttttttcaatcataattggtgttcacacactggtaatctagataattagggttgcaaaattaattttgataccgagttgaaactctaattctgatcagagaacaatacttgaagaattgtttcttagttttgttcatgtgtttcaagtttgatgcatgattcattggttccccaatatggtggatgactatagccaatttatgaactcttgatttcttcttgtattgtaaaattgacatggaattttggtggtttgttcctttgcagaagctatctgtgtttggtgttactaagtctccaac

SEQ ID NO: 26814 - DNA, 462 bp, Glycine max
  Intron number 1 from transcript Glyma17g08680.1 (locus Gly ma17g08680) derived from phytozome v7.0 (chr-ID Gm17; pos 6407241 to 6407702 reverse strand)
gcttccttacccagtaaggccttttttacttttcagaatcccttcacctttttctttttcctccgcattctctttttttcgtttttgtcgatctgagcgagagtcaccgaaaatttctgtgtatatgatctggaattgttgttgtttcttaattaatcaacgaccctttgtcatttacttgcataatggatcttgtgccacggtagatttttatgtcagaaattcatgcttcagtttcaccattcattttagtcaacattcaaatttaccataatatccataccatttgtcttcaattgtattttttctccacttgggatgtatgcctttcatgtttgtgtgaaaattattgtttttgctgcagttttcctagctagatactagtattttttttttaacttggtgcaatgaatctgaacttgaacaggttttgctccttttgtatttctattgcttgtaatt

SEQ ID NO: 26815 - DNA, 604 bp, Glycine max
  Intron number 2 from transcript Glyma20g16860.1 (locus Gly ma20g16860) derived from phytozome v7.0 (chr-ID Gm20; pos 23614008 to 23614611 reverse strand)
agaaggatattcacaatttaagacaagaaatcgaggtaattcattccttcattcatttcctcactgttttcacgctctttgaagccgtgttcgctgattgttgtggatttctagttgttagaaattttgagaagcgatggattctgattttgagtagcttgttgttgtttgtggcgtggatttctatttttgtcactaacgtcaaaagtgttttgagtttggaacaagcatgttgcctgagagctatgataatcaggagtacggagttaagaagcttcttgttaattgttgctgttgttgctcttcttcttcttcttcttcttcttcttcttcttctacacagctgtggttaagtgatacttaagacttgaggaaacattaggagaattcaaaaatcattagaattttttaaaatgatttgttttagtccatttacttaattgatgtatgtacctgactttacctagtaggataagattttttttatttattattgttgctgctaattattataattattaatttattaattacttataagtgtttctgctgactagtgacatttgaaattcataaattttgcagatcttaagaaagttgaagc

SEQ ID NO: 26816 - DNA, 1027 bp, Glycine max
  Intron number 1 from transcript Glyma20g31200.1 (locus Gly ma20g31200) derived from phytozome v7.0 (chr-ID Gm20; pos 39853466 to 39854492 reverse strand)
gcttgttcaggcaattgtagcactcttcttggtcagttctccaacatttcagttaatttctacaaataacatttgtcctcatttttagttaatatattttttaagttgaaaaaactattcttcaagtttgtgctgtgttgcttgctgctgcttttcttcacatttgttgttaatagcatttttaaaatgaaacttttgttccatttactagttactaattcgattgattatccctatttctggttgttgcttttgtgttactttcaatatttttgggataaacgactctctattttttcttatcccccctttctatcttaagatttttagaatagattcagggcccctttgtatgacttgctaaatgatatggcgtcatttatggtaagctttaatgtttgcattaaataaaaaaaaaggtgttacttaaaatacatttgtcccaattgacacaattaattgattaaacaactataatacccaaaatgagaccaaagcaagagtgatattaggaaaaccgagccagaataagagcccgggtaacttttctattagtgcagagtgatatatattgataatatatattttcaagcataccaaatggaaagcagataaaaaaaacagacagaaatacacacagttacgcacacacacacacacactcagaagaagagagaaaaaaatgcattgacttcattaaacatagtaataattaagctgtaatcatttcccaccatgtaatgagtttgatttgtccatcacaaaacaattgtcttttgctagcactatgtccattttccttttgcatgaatttgcacagatttaaatgtgaactctttattgggtaatgcattttcagcatgggcagggtggcacaatgtgtctctatccataatatgtattccaccaaattgcatggtgtggcatatatcacgggtgatctatccaattgcttgatatgtgaatgggttggtgttgcatatgagctgcatttagacatgttaggtggcatattaacagtgaaggt

SEQ ID NO: 26817 - DNA, 330 bp, Glycine max
  Intron number 1 from transcript Glyma17g17330.1 (locus Gly ma17g17330) derived from phytozome v7.0 (chr-ID Gm17; pos 14149418 to 14149747)
gcaacagcctccaattggtgttcctccccctcaaggtatatttctatctactttaagtttttaacacttctttctttaaagggttttgcttttttcatattctttttatttttcttggttgtttctgattgaactatttttttatcaccagatgttacttattaatattgttaatttttattaatgtgaagattcaaaatgtgacttttttttctttctttcttccttcatcaccaatcttatatcttctttctttctgattgaattattgaatgattgttttgtaactcaacagggtatccaggaaaggacgcttaccctccaccaggg

SEQ ID NO: 26818 - DNA, 1004 bp, Glycine max
  Intron number 1 from transcript Glyma20g00530.1 (locus Gly ma20g00530) derived from phytozome v7.0 (chr-ID Gm20; pos 291290 to 292293 reverse strand)
ccttggccggtgtcgctatcaagtacggtgttgaggtactttcatttttttatttatttttaaaatcaattatttatttatttattagttatttatgtataattttatatttttgtatcagcttgattttgattgtttagaaactactattataatttgtgttgtggatggtttgtgtgtgtgtgtgtgtgtgcatgcttgtttacccctctttgggaatttgatgataaaagggtggtttatgagtcaaattcatgcaagagggaatttgatgatgaaagggtagcgtgtgagtcaaattcatgcaagagagactttgatgatgaaaaggatgtatttgagtcaaattcatgcatgagataatttgatgatgaaagggtagtatatatgggtcaaattcatgcaatttttgtggcacatgatgtgggtgcagcctaagtacagtttttttttagctgttttgggtattgttttccaatcagaattgaagttttaccggtaatgtatgctgacccaaaattcaaacctttgttatgcggattacccgggtgacatttcaattcggtttgaaaatagtaacgtaagtacctaagagactgaatctaagacttgtcggatacatatgaaatgtttcagttggaatcatcatgtgtgtagctacaatattaaatgatgggaaattcgggacaaaagtaagtgggagagatattaatagtggtgaaaaaccaatagttcttttctgttttgaaatggttttggtatttttcgttgcattgtctttatttccttgttgtgttttttggttttgtcattttcgagtgattgctgaaccgcttaccactttatgttagttacctctttccagctccacttttgataggagccttgtgctgaattcttgtttcttaagttttcttctttttatctatttgatttgtgtaatgaagtgtaatttcttcagctctttttgatttggaaaattgtaggtggcagacataagaaag

SEQ ID NO: 26819 - DNA, 868 bp, Glycine max
  Intron number 3 from transcript Glyma19g33080.1 (locus Gly ma19g33080) derived from phytozome v7.0 (chr-ID Gm19; pos 40722380 to 40723247)
tggcttaaacgtaactgatctcgttgcattatctggtaatcataatacttcccccggatagctatagtttcctgtgtacacacacaaacttcatgagagtcactgaatcactgataataaaaaaaaacattaagagcatgtgcatgtagataaatagcttaaacaaatactactaattaacttaataagaacttatccaacaaaaatgtcactttaatcatattccaactgttaaaatccatttcatatcttaaaatgatttttcaacttaggtataatctaaattattaaaaaaagtaaatattgtaggataaatttagtgcaatgttatttcagatgttacctatccaccttattattgtcaacaaaaaaaaggaaaatatttttatatccataaaattgtaaaaaaaatatatcaaaaaaattaataacaacgcattttatttaattaaattcagttagattccttcaaaataaaaaaaatactaaccatagcatctaaatacactagctaataaatcaaaactcaaatatttttgttgaaaagtgtaacactacattatctcaagctaaaaaaattatttattggtttctttaaccattgtgatagtgaatagcaagagtactcttaaatattaaaatgaattgtatatgcttataaattaaatacaatatattctttttttataaatattttttcttttccctcaaaaaaaaaataaatacttttattcctatatttgcttaactgcgtgccctgacatttttgtctatatagtaattacataattaccatgatgcttagtaactaactaactaatggttttgtttttgagtgtgaaggtgcacacacttttggccgtgcgca

SEQ ID NO: 26820 - DNA, 686 bp, Glycine max
  Intron number 1 from transcript Glyma17g08160.1 (locus Gly ma17g08160) derived from phytozome v7.0 (chr-ID Gm17; pos 6037051 to 6037736 reverse strand)
caagaagaggtgtgcttggatcactcctaatactggttcgtattcttctccatcttctttcacttcctccatatttataccaagaagacttgttatgctgtgatgctaagttggttttactataagccttttaaattttgatagtttctgttgtctggtcttgttggtgctcatattgttgtagtgtgaattgtatgattctcacttggtttcaatgtgaatttcagtgtttgaagtttgagatttatttactttaaaaattgaatgtatagttccgtttaatgtcattgtattctttcagatataaattaatgtgaaatgagagtggagttgggcttgttaatttaagatgttgagttcttctcatttgcttgaaatgtaatacaacatgcatgtgtttgtagctgaagccagtgtaatagaacatgcaacggatgtatgttttttttttttttctgtggattttagttgatatttttcaactattaaagagaaaattgggaatcttaagtgaatgtatggtatgaaccagatataggttgatagtggtggagatgaatgcacgctagccacacctttcttggaaattcctctataattcttgttttgagttttaagttctgaactaaattggcttttttcaaagttttatttcctaactaagtttacctattgatattagaacc

SEQ ID NO: 26821 - DNA, 974 bp, Glycine max
  Intron number 1 from transcript Glyma17g14040.1 (locus Gly ma17g14040) derived from phytozome v7.0 (chr-ID Gm17; pos 10802742 to 10803715)
ctgacggtttccgctgttctctttcaagttccaaggtatccatttaaatttttaagccatgtttggttgttgttgttttgatgctgagaaaattaacgatgaatctgtcatctggggtagttaaagtttgagcaatcttcagtactgggtgttcaacaatttattgattatttttttgtccgaaaatgaaaagaagaaaaattgaaagatctatatatttttcgatgctattcatttttgctaaacaaagtgctcttatagtagtttaagttatagatttttcaatagtggaaatggtaggatcaactattgtttctgacaggtgttgtactgttttttgattaaagaaaacaggaagttaaggggaggttaacataaataatctggttacctatttgtttgaactttgattttaatgattcgcaaagaaagacattctgattagtgtttcaacattgaggttgaagagatttcttggtgtatgcctggggttgagtcacatggttggttgtgtttgctgggtttagggttttaggatgagaggataggggctgtttggtctgagaaaatgttttctgtttttattttgctttcacttttaattacataaatgtccccatgtttccactttgtttcaataaaaaacaataaaaagttgtttcttcaatgtaaactgtaaactatacaaacttttgggaacaaaaaataagtgaaaataaggtgccatatttgtaattgaaaatgaaaatagaaaatattttctagaaccaaatggtcccttgatttaccaaatttctgtgtactagatatgtatagtgttattgatactgataactctaaagtttgaattgatttttgcaaatctctgttcacttctcttcaagcaaaaatccattggcatgtaatgagtaaaattaaccaaaattctttggcctctaaatatatattaattgttttatttgtttgatgcagaa

SEQ ID NO: 26822 - DNA, 680 bp, Glycine max
  Intron number 1 from transcript Glyma19g37700.3 (locus Gly ma19g37700) derived from phytozome v7.0 (chr-ID Gm19; pos 44810888 to 44811567 reverse strand)
aagaagaaactaagcgtcttgcaaccattcgtgaggtatctctctctctcacttccatttctcattttcacttaacaggaaaacccttttttttttaatataaaaaaaagctcctgctggaaacaacgttggtatttttttttgtgaaattttatttaattaaatcgggttatcatgtaacaaggggaataccagaggtttagagcacatctacagcacttgaatatgtccgatctgtggtttttttctcgacaaagtgaatttgcagcccccaaaacattttccttttattttccgttgggttttttgaggaaaatatttcaaaatttgaactttcatgttcccttgaatatattcttttcagaaagcagtgtcgggctaagaacctaataattcatatacttcctttctagaatttatttggcacctaggattttaaatatctgttgttagaaaacaatatatcaaatatcacgtatatttctttggccttacaattttaaaatttttgttttaaataaacaactggccatgattcatgctgaaacttgttatacatatttatgtagcgtgtgtgtgtatacaattttgtcatttatactcaaattgatatgtaattgaataatcccaaacttattctatttgaggaatatcaggagcttgaagccctggcagatcca

SEQ ID NO: 26823 - DNA, 984 bp, Glycine max
  Intron number 1 from transcript Glyma19g40810.1 (locus Gly ma19g40810) derived from phytozome v7.0 (chr-ID Gm19; pos 47126455 to 47127438)
ttcaacaccttaatttgcacacgctgcttcttcaggttcggttcatcacccttctcttctcttctttgttttctttcataaccctaatctttctttagctttgctttgcatcattttatatccctaagtagcatttagttaccaagttaaactgcttgctgttttgtcctatctagaccgttacggttatggatctgaattttatttataattttttactttatttaaatgaaatactactattttctgctgagtcttggtcttttgtggtatagatctgatgctttcactacaataatccgttctaattgtttttctctcactggatctagttttttgtgcctgatgtgatgctgttcatttagaattttttgcttgttgaactctagcattgtgttcgtttacaaatgatttcaattaggactaatttttttcctaagcgccctttcagtttatgtttccattcaaaattagagtttcatatcagaaatctgtgtaataaccgtttgctttaaagttacatgttacaggttttaccaaaatgaaattccaattctgattggagaataagtgaataacacctaaagaactgcttccaagttttgtccttcttgaaatccaatatattctgtccaacttgatgcccagggattctttatatatatatatatatatatatatatatatatatatatatatatatactttgctatcgttttgtctgcaattatttttttcaggaccaaaagctttttcaaaaaagtagatcaagataaactattttaatcaatcttgtcataaactttcgagtttttctttcaatttgttgtagagatgcgtgctttaatttattccttttgcaacatgatctcgattctggagctatctaccattcaaaagctccaagagaagttgtatttttttaaggcttttgtgctttgtaataaacattgtgttgtttttttgtttcctgtagcttgagaa

SEQ ID NO: 26824 - DNA, 1016 bp, Glycine max
  Intron number 2 from transcript Glyma18g02960.1 (locus Gly ma18g02960) derived from phytozome v7.0 (chr-ID Gm18; pos 1942511 to 1943526 reverse strand)
aatccaaattccagaatccttgctttgaaaggttggctactattccgttgtattcttctcatgaacttgtgacttgtgtttgtggctagtaatgatgatgtggatttgtggataatataactaccggtattttggtattgattcgaatttcgtacgtcattgtagatatcaagatttattggaagcttaaattctttatatattttacttttttggagagatgaaacttacgttccttatgttttagctattgaagcaatcgtttccatcattgtataatgcgaatcgcttagtttcaactagtttgactgggagtggaataacatatccactacgtgcatggtattatgacttaggtgaacaagactatagcccgggctgattttggtttcctggtcctcagttgcttctgaaacattagttctacttactagattgtcaaatgtgcgtgtctttaagcatcttgatcgtaagatgtacataattatgaaacagggatctttgtttgattcttatttatcaatttgatacttgacatcaaaagatcatgtcctcaagtgatataattatattgagagaagaaaactattgtactttgtttttcgttctcacattatggtaataggactattatggaaagtccacaatgggctatgactttattatggacttcattgcttgtaatgctatgaaccttaggtatatttttccatgctttattgttcagataatatatttaccgttcacagttcacataaagccaattaaacattgtgatgatatatataatatattattcacgttatcatcatttgacaaccatgaaagtggttacattttaaggaaaaaaaatgcccctagctaaaagaaattagtcagagttaaaatggctcaatgttcatagcttctgtttgtgttgtaccttaattagtatttgcttttggattatattcccttctaagttacatccctctcttgaagctcaactccaaggaacaactcaagatcacctacaa

SEQ ID NO: 26825 - DNA, 572 bp, Glycine max
  Intron number 1 from transcript Glyma17g09420.1 (locus Gly ma17g09420) derived from phytozome v7.0 (chr-ID Gm17; pos 6968250 to 6968821)
cttgctcccttcaaatctaaccgctctcatcactggtaattaagtgaccctataatatatcatgaaaaaggtttgatatatttaattatttatcatatggttccagttccattgatattggtgtgaccaaacatatggtcttgtctataataaagaaccaaatacggttaaagtttttcttccgtgtatcaacagtattgccttctgatctttccagtctgtttttccagaagctgatcagcgcaagtgtggtgttatccatcacttaattttgaatattcttttgaagactttcttgttttcactttcttttatgatatatagccataaactgtcgtatgcatcttcatttgtacttgctcaatttccatttgttttgtctgtgtcagaaatctctatccatttgttttgaaaattttattaaatatttactagctctaagcagtgcatacactacactctaaagtatttgataatttacaagtggaatataatgtggggttagcataattaatgaagttgaatttttaattgaaggtgggacttctggtattggagctgaaacagctaga

SEQ ID NO: 26826 - DNA, 793 bp, Glycine max
  Intron number 1 from transcript Glyma19g07140.3 (locus Gly ma19g07140) derived from phytozome v7.0 (chr-ID Gm19; pos 8414128 to 8414920)
ttccatcgccgttcagatccaggtatctccacaaccaccacttctcactcaaactccattcttcttcttcttcttcttcttcgtcgtcgtcgtcgtcgtcattgtcgtttcgtttcatttaacgattttcacaaattacaatttacaacctacgtttcttattttcggatattcatgagttagtgtaaggtttccgcaatctattgtggccactgagcgtgcgtgttaattgatatgcatgcacgacgacagtgagagttcgtgtagaaattgaattgatatttctggcaatttctttttttttttgtttttaatttctcactttccatttatcgttcagcgagattttgtcacgttattgttattattattattgcgttcggtgtggaaccaaaccgagatgccgtgtgttgaatatgtttgaagacacatggcggcggttacagggttacttaataagcctttgtttctttgagtcgattggtgtttttctttttttaataaattggtccttgtctcttgaattgagcatttgctgcgaaattttgaagattcaagtattcaacgttccagaagagttctttgtttacatttatatatagcacctgaaattggctttggagttcttatactgtttgtttgtttggttttgaaattctggattttggattgtgttctgctcagttttgttaaggagaaagtggggtttgagagttttggcattatttattattagcgtgtttggttccacattccagataccccagacgtggtttttcgcgtcagctaagaa

SEQ ID NO: 26827 - DNA, 724 bp, Glycine max
  Intron number 1 from transcript Glyma18g48440.1 (locus Gly ma18g48440) derived from phytozome v7.0 (chr-ID Gm18; pos 57844954 to 57845677)
gccgcgacgcgacttcctccgactaggcaaccagaggtaaattcttggaccttttttcattttcgctcctcctttccgttcatttctttctaattaactgcaatgagagtattgatccctaattcagttttgaccctctactgtgaaattgtggtttttgtgcgtgttttcttgtggtcactacttagacgtgttatttctttgttttaaactagaatacgcctctgatggaaaatatttggatctatttgaaaatcctagtctggacaagagctacttggtatgaaatacaaaattaggggttctggtttaattagtaaattctggtacaagcagatgtttgagttggagcaaattgtgaattatatacgttctattttgtttaacagatagcagaccctttgataagcatatttgattgagatgtaagccattgcctaggttcttttgaatctatataatatccaaataatactccagttctaaatctaccctaatactacctaaacaacttactaaatcccccaaaattaattcatatgaaagttccaataaatttataaaaaagataaaactatgattgtccctcctttttaatgcatgatgctttttcaagagcaatataactagattttgtttttttttcttcttgaaattgagtttttttctctttcttttgctttttgctagtgcttataaaaggaatagtagtaagcacattcat

SEQ ID NO: 26828 - DNA, 807 bp, Glycine max
  Intron number 2 from transcript Glyma18g48440.1 (locus Gly ma18g48440) derived from phytozome v7.0 (chr-ID Gm18; pos 57846004 to 57846810)
atcaagaaagtcaggtatatagcgcttgtgtaaaagacctaattttcccctttagaatattagcaaaatatgcaccttgactctacatcacatttctttttatccaagtaatactctaaatacatgatgttagctaaattccagagaatatcctgcaatagtgggaattatttaagctatgcagcatagattttgacacagacactccagtatggccaatgtcccaaatataggacactaaaacacaccacacacacatataagccttgcaaaaaaagattatttttagagccttgttatactatataatcactttatcttttcataggaaaaaaactcaaaataagatgaattttaccatatttcttgtgggcttattttctctatctagcctacgctctgaacatactgagatgtggttttgttgctgaagtgaaataattatgcgtaagatatcaatttagcctgcaatctttaaccttgaagatattaacttgagatccgttaatctgttcactagttaattccaagtttggaagtaatggtctatcttgttctgcttttatggagatttgccaggtttttatgccttggatgctttagtgtgagagttagtaaaaactaaagtttgaattgaatcgaaggcatattatatcattctagcctggggattttattccacttcattccctttgcttaaacacttacccttttttggtctttgtgatgctcacattttataagattttatgttgcttctatttgttctgactttttgcatattctattgcaatatggcaggggtct

SEQ ID NO: 26829 - DNA, 692 bp, Glycine max
  Intron number 1 from transcript Glyma20g03060.1 (locus Gly ma20g03060) derived from phytozome v7.0 (chr-ID Gm20; pos 2795480 to 2796171)
ttctctccctctgagcctttcatcgctcctcggaggtacctacctcaaagcttctttccttttcttttccttttaaataaatgtctaattttttcccttctaatttaagtttcagcatcgttttctaattcttatttgatcgatttttaccttctttcgttttttttaaaataatcttctacttgtttttctctctccctctgtgtctgtattgtttttattgttatacggtttcagtgatggctgattagggtttgctcgttcacctgccatgtttgagatttagggttttgagagaaaaaaggtttagataaataaaaatcatgtttttttttttgtttattataaatcataaattattattattattattattattattattgttgttgttgttgttgttgttgttgttgttgttgttgttgttgttgttgttgttgttgttgttgggttgtttcaaaggcaagattgggtgttggaatgcttttgtcgacaaatgtgtggttactgaaggtgttggttttttagtaatggagggctatggttaattgcattttggtggtgtgtgtattcttttgaatgatggcttgttgttttctttaattgttttttttcttttgaaataactatgtatgtgctgtctgttattaagattaaagactgattttttgtgttgttgtcgtgttgcagag

SEQ ID NO: 26830 - DNA, 643 bp, Glycine max
  Intron number 2 from transcript Glyma20g03060.1 (locus Gly ma20g03060) derived from phytozome v7.0 (chr-ID Gm20; pos 2796331 to 2796973)
gtgactactactctggtaagtacaagcaatggatggagtattggttattgcaatgacattcggagttatatgattgcagatttagcacacgtttaatggaatttgttttaaactgcactttttaatttctcatgtcctggattgtgaatgctgagggtagccatttgcattttctattaaaagtggttatttgtttgaaacatgattctgttcgtaatatatggaaagcaccctggatcctgtgctcttcatgagaagggtggtgccatattttgatttttttttagtatattattaattattaatagcatgcacagtcaacagacaacattctttggtgagtgtaactaattaccacccctagcccactttttaattttacagcttttcctcttttatgactccaaagagtagttaacattaattctttgaagcatttgaaatcatgtgtctaccaattctttttttaactgccaaaggtcatggctatctaagtttatttgggtgcataagtccaagtgttttgtgttttattactttgactaatgtgatttgtgtaaaataatttaacatctgctgaaatcaatgatcttcttgctttggtgcaggaaattaataaaaagatactctctctggattacac

SEQ ID NO: 26831 - DNA, 465 bp, Glycine max
  Intron number 3 from transcript Glyma20g08880.1 (locus Gly ma20g08880) derived from phytozome v7.0 (chr-ID Gm20; pos 12625350 to 12625814 reverse strand)
aaattttttatctgcaggttgtgtttaatatccgtttttagttgtgtttgtaactttgtatgattttttttatcgacaaatgttagttgttagtttttgatgtttgtatgaatttgtttgtctatatttattttatgttatatgtttaatatgcatgctcatatgtagatatgaaattttagtgtaattttgactttaaacttttatccatgcaaattctttttcatatgcatgtaactatgtgtcgtgtagcatgctagatacctaggttttgttaatcatattatgatatttgatggaaaatttatttctttctccaaaaaatattctaattgttttaaactgtgatttgtagagtagaactaggaagatgtatatgttcaaatgaatgtgtacattgctgaagtttgtctatctacttccctatcaggcgtggtacagtaatccatctcttagagattggtt

SEQ ID NO: 26832 - DNA, 570 bp, Glycine max
  Intron number 1 from transcript Glyma20g28080.1 (locus Gly ma20g28080) derived from phytozome v7.0 (chr-ID Gm20; pos 37027949 to 37028518 reverse strand)
gctgaagttcaagctcagcatcagcgcaaatacaagttccattcttcacccattttaactttttagggtccaacttaattatgttatcatacatgtacttgttgtagttcatgggttgggttgtcatgtgcaagtgataattatagtagcatgacttgatatttttgtccattttccgtataagctagcttgttatttattattgtcagacagtaagtgacattatttagaagtgcatttgttatcctgatcataacccaaaattaaagaaattaggtttatgcgtgtgtttggtttatagagcccttatatctggtaaaaatgaagccaacaaagctggaaattgggtatgccatgtaaagttggtcatttcttcactaaactagaagatctggttcaatagtgaaagccaaatgataataataactttccaattgccaaaattgctagtgtttgtttgcttttatcttgctgttttctatcgtggcaagataaactagaaagtaggaagtttatagtgagttgtgcctatttgattttgctgctctgtcttgtgtaggagaatttctg

SEQ ID NO: 26833 - DNA, 533 bp, Glycine max
  Intron number 1 from transcript Glyma18g41240.1 (locus Gly ma18g41240) derived from phytozome v7.0 (chr-ID Gm18; pos 49968972 to 49969504 reverse strand)
tgctccacttgcacgcctcacaatcctttttcaggtttctttaaatttagtttttaaatattataatgaatgtgtttgaatttaggtttgtctagcatgtcattaatgtggaatttgagtttttggtttaaatggggtgtgatgtattttggttttctggtttagtggttggtttcagtcgtggatgcagaactgcgtaagctttaattcaattcgagtctcatttgttaactaatttaaattcattgtactctaattcttctagtatgtgtgtcacagaaagaaatatcatgataaaatagttttagtttaattagcatactatgtaagggtaatttttatatagtttcccggtttagtcttatttttttagttttaccttcaatgacatttaataatcccggaatgtgagttaatttatttcattgaaaaggtttgagtgaatatccatcattctccttgttaaattcaaacgcagttctttcaagtagtgtttatctgactattttacatgccttgactttgtcagctgc

SEQ ID NO: 26834 - DNA, 969 bp, Glycine max
  Intron number 2 from transcript Glyma18g05680.1 (locus Gly ma18g05680) derived from phytozome v7.0 (chr-ID Gm18; pos 4324462 to 4325430)
tacgagactcattaatcaaggtccgtttattccatatccgtgtatttaaggattttgctatgaattttccactcttattttttcattcattttaactgatcttcattgtttcatttgaattaggccaagtcataacataaacttagttttctggttacatggtagtttttgacagctctttctcttcaaaggttttaaattgtggcagcaggttcgtcatatttgggacaaatgcaggttgatgcagccacaattgtggttgcagaaactctaaaaaccttgaagttgcggttctaatttgggtcgtggaccgttttctaaaacattaatttaatcttctttcaaatgcacagaatggtcaatttctgaccttctcaccggcctgaaccagctaatggttaaatcaatcattgttactaaatgcctaaggaattaaaagtttaagcatatatgttttgaaatacaatcaactgaattcttagctatggttctctaggattcttatctgttgatcaatcatgaaaaggaaacatcttagactgatactttttggatgacccacaaaaagaatatatggtgctaaaagatggtggcaatttagtcattgcttccttttagacaaggcaaattctttctaacattggttttaggcatcctctagtctagaaaaaaaaattaggcattgtcttttgcatgactggaccaaaccttcagatgatcagctttatgttaatgctacctttctataacattctgttttgaaaattaagatgttcatatagatagcatccactttatgcatatatatatgtttgatactacacttcctagacataatttacagttggtttactacctgaaaggttgcattatcaatatttatgttctttgattcagtagcttttgtacaagttcttatattcactattatcttattattatcagagattttaagggttaccggaaaga

SEQ ID NO: 26835 - DNA, 594 bp, Glycine max
  Intron number 1 from transcript Glyma19g44360.1 (locus Gly ma19g44360) derived from phytozome v7.0 (chr-ID Gm19; pos 49817173 to 49817766)
gggctacaccgtccactccaccctcagaaactttagtacgtactccatcctctttcttcgccctccaccctattccaaatttattattctctccaaatatacagtttcatagagtaaggctttgctaaatttgtataccagacaaacaaaagcttttggtaaactttcacatatttttttggacagaagataaatttttgcataaaacaaagtacaaatattataacttttatatgattcgtatcgtattcgtcctttccagctagccaaccaacttggttatcaacgttgttaatttaacaacaaacttgtcttttgatgaccaatatgattcgtatcgttttccttttttatataacctttaattatatctcgaacaaacaattcttcgcttgcatcgtttaatttgctgatcttggtcatgcactaaataattggcatctagctgttctgttatttaaaaatttgagtaatatatatatatatatatatacacctaactgcaaggtcttacgcttaattgaacaatgagtaattaattaatttaaattcattgcagaggacgagtcaaagataggccttctgagagggttg

SEQ ID NO: 26836 - DNA, 784 bp, Glycine max
  Intron number 1 from transcript Glyma18g10750.1 (locus Gly ma18g10750) derived from phytozome v7.0 (chr-ID Gm18; pos 9607259 to 9608042)
gtttgtggcctttacttttctctgcagttcacaacggtatctttcaatttcacctgcttcatacactgatcatgtaattattaaaaataaacattacccttttatgtgtttttgtcagttttatcaaattattcaaaatgcccatttttttctggtgaggattttgctgaattcaatcatgggctgtttggattgtgtgaatttggattggcatagattggaaatccaagtgtttgaggatttttggttcactgtctgcacaaatcagtaggttattgtgtgatttttctacttgaggaatggtaattgcatgctgtgtttcttgttctcattatgtggttacctcctgtttcttccctgaaagtttgattttgtcgccacgggctgttttgattgcttgaatttagattgccatatatggaaatgtaaatgtgtaaggacttggtttgtttgttggaacaattaatagcttaatttgtgaatttttctacttgagaaatatgagaatagaagttcttattatctttttttgacagcaagaagttcttattatctagctacctcctttttttatgttaatattgatctgtatgatttttcaatgaaaaaccacagaactagtaactttttaaattagttttgtgtgctttttttggaattgtcttcagctacaaggttaggtccttgtttagtttgtttttggttcagaacttctgcacttattttttctaattttcgtgacagtatagaattaaaccttcaattgttgctttgttacagggtc

SEQ ID NO: 26837 - DNA, 350 bp, Glycine max
  Intron number 2 from transcript Glyma18g10750.1 (locus Gly ma18g10750) derived from phytozome v7.0 (chr-ID Gm18; pos 9608058 to 9608407)
ctggaaggtgagtgagttttaaagtttgattggaggtattttgaactaggagaacatttttagtttgcattttagagttaactgcttcacttcttggttatccaattgttagtatgggcgaggaaataaataatgtaaaatggtgtttgacactgtgactggtacatgataaactcccatcatttgtttcatgtgagcaattgatatgctttgtttatttgtttccttcttttactttctttcagtctatgttttcttcctttcgtgctttttgttccaggaattggtgtggctaatatatgatgtcaatgttcagaactttgaatcaggagggtggtgatcatcaaata

SEQ ID NO: 26838 - DNA, 768 bp, Glycine max
  Intron number 2 from transcript Glyma17g13780.2 (locus Gly ma17g13780) derived from phytozome v7.0 (chr-ID Gm17; pos 10566481 to 10567248 reverse strand)
aagatcatattggtgcattgccttgggtaatgctttcttcaaggaaatgctggcttaaaaaaactcttttgtcaactagttctctttgatagattccataatatctgttggtgtatttgtaatgagatataatgccctgtgtttgatgcataatgccataataaactgagactgaactttaagaagcacccttagtttcctgaatgaatcaatatctggtgccattgctgctatgacaattaaaaggtaatgcaatgggcttcaagaatgacatacgactgttcaataaattggttctctaattagtggttttcagtttgtaacaggtttaaggactaactgggggtcatcaacacatatgttgaccatttgtagtgtactcttttactatcgttgacatatccctaatgtaatagttgagtgtactttcttttgctatgtgtggctgtattccttggtcgtaagactggcagaagttttaaacagtcgtgtgtacaaatcttttgtggaataggattgtttcagtgctccatgtttttatttcttctagaagctaataagttattttttaatgtaaaagtattttgatcttactgtatattttctagtactctttttttccctctaccatttaatctaattcattattcttttattttaaaacaaatgtgttttgtcatttccttacatgagttacgtctactctttatttaactttgacttggtccatcaggtcattccagcattagattctcatacaccaatttt

SEQ ID NO: 26839 - DNA, 817 bp, Glycine max
  Intron number 3 from transcript Glyma17g18250.1 (locus Gly ma17g18250) derived from phytozome v7.0 (chr-ID Gm17; pos 15473628 to 15474444)
ctgtaggatcatttattctggttggcaccggcgaggtaggtttttgtaaatttgtgtctcgctttaatttctaagtttgaattggttcaatgaaactgttgtattgtgatgtttttgaggttttctactgcataagcattttgtactataatcattaactggtgttcattacaatttttggtggcttggacatagttaacctttgcatatatatggtttgttactttgctgcgttatgaatcagtaactaataaataaattatgattccaattctttttataatgtccatagaataattattaacgcatagaaagatattgatactaccaaactgattttgcagcttaatttgattcagagtacacacaacttgtctaaccaaagtgtatcactgtgttctgaaaacattacgaaccaaatattggaaaacttgttttggaaagattgcctttcaatcttctcacatggttcagcagttgttttcagtcaattcccttacaatattattttttattaaaaagttcaaatgtctctttcttttgttgtttcaagagcattcctggtcctcatgttctatgtctcctttctcttttaataaaggattctatcgcattgccccttccccctaaaagagcaaaaagaagaatattttaatttcttcaaaccttaagtatattctaatacacaacatagactcatacaaactcatacatgcacgattttggaatttcaagttttatacagcagattattgaagtaatggggatggtgttgtgattagtctgtgccagtagattgtgaagtattccaaggcag

SEQ ID NO: 26840 - DNA, 801 bp, Glycine max
  Intron number 1 from transcript Glyma20g35770.3 (locus Gly ma20g35770) derived from phytozome v7.0 (chr-ID Gm20; pos 43972652 to 43973452)
ctgttgaagctgccgaggccactattaagcaacaggtagtactttggattcaacacgtgcttcgttataagtatgattcattggatggtgcctgttcattattttcgtattaggttttttgattaacgtgttttgccatgcggtccaagttttcaatgtctagatgatggcttatttaattatgtatttgtgtgttgtggtgcttgctgggcgtttttatttatgtattgaaaagagaaaaataatataattgaatttgggtcctcgggatatcattagggatagagtatgactggtgtttaaggttttaaattgtggcagtggtcatggttcttcaccattcttgctaccgtgggaaattgcagacaaatgtggtcgatgctgccacagttgtggttgcgttaatgcattgaggttatagacaccccaaaagccaaaacgttgtggaccccaaaagccataacattgcggtcgtaatcacgcacagaccgttttttaaaaacctttgttgtatttaataatataatatgataatatgatatataaacctggttggtcgtccctcattttttttcactcttcctctcttctggtttgattgctgtcacaatggggttttaacttctattctgctcttctaaggagaacgttactgttgcttgcagttgcagtggtagttttatgttggtaaaatgaaatggtggcttcttccatgtcataccttgtgagatagggtattaatgatgcaacatgtttcttttgacaggtagaagagaatagccggcttaggtctgaacttct

SEQ ID NO: 26841 - DNA, 879 bp, Glycine max
  Intron number 2 from transcript Glyma18g15970.1 (locus Gly ma18g15970) derived from phytozome v7.0 (chr-ID Gm18; pos 16149734 to 16150612)
gcacttcaagctcagaaccaaaaacttcagactgaggtttgtaattttcttcctagttctattaagattttgttgttttaattttggtttcatatgtgagaagagaacttaaaaaagaagaccaatttttcataaattactaaggccaaatttgatgagtttattaacaaatacttacaagaaaataaaataaaattaattaaaaagataagcaaatcaaactcttttcgtaagttaaaatttacttatacatctcaaactttttagaaactttcttagttaacttctccattgaggtacataagttaaattataagaaaagattgatgtattttacctccttaaactattttatatctttttcatgaatgtttgttgagaaatttatttaaattaaattagtcctaaattgacgaagaaatagaggggatgttcaagttctgctatgtcaaattgttttgattctgtacaataaagctaggtaattatgatgcttttctttaattattatgttttttcaaaaaaaatatttattatggctctcaaaccttttatttcctttcaccaacttctggaactgataataactttctataaagctgctttttccaattattcacagtaatttcataaagaccagcttccactcaattacatgtttgtcatgcaatgcatagtttccttggtttggaaataaacaatcatttgggttcattttgacattgacacacctttgttttaggctgatattacacacttatactccaacctttcctgcatgctattatttgttttgtgttatttttcggattagctaatttcactgctaccactcactgctgcagatattggcactgaaaaacagagaaccaactgaat

SEQ ID NO: 26842 - DNA, 468 bp, Glycine max
  Intron number 1 from transcript Glyma18g16390.1 (locus Gly ma18g16390) derived from phytozome v7.0 (chr-ID Gm18; pos 17026569 to 17027036)
gctggtcagaagcttcatgggggttcaagcatgacacttttgctccaaaaagaaagacttccatgctcccctgaacttattcaatctttttgttttcaaaactctgaaccttctttccaaggtgatttgctaccatcatgtttttgcttctttattcttgtctctggccttttgctttcataatctttttgaagttgctgagtttttttgtactttaaaacctttttcgtcaacatgaaatttcaagaacagagaaagacaaaagaaaaacaacatataaatatttgtagttttttttcataacaaaatcagaagtgggtttcttatagattctggtttctttctgataaagaatatatgaaaacccaaggaaaaaattattttttttcattgaaaatcgtttatgtttgaattatagcatagttattaatattaatatttggtgccttgaattcaggttcaaaatcc

SEQ ID NO: 26843 - DNA, 508 bp, Glycine max
  Intron number 5 from transcript Glyma18g04290.1 (locus Gly ma18g04290) derived from phytozome v7.0 (chr-ID Gm18; pos 3051602 to 3052109 reverse strand)
acatatatcttcggttttcctaatgggatagggcattttgttgttatttgtatggtgatatttatctttggttttagagtgatgattctatatatgaatgaatttgggagagcatgtcaatcaggtttagttttatgattcttatttttaatttggcagtcattggatgattaggggcctttgtcattcatctgatgatgatattgcttgcatgtttgatgtgttttgtgatttgaatatgattttaattgaatgatgtagtcactctggatttcctaagactattttgataaaaaatttcaaaagtaattttaggaaaagaaaataagagaaaattttatgaacttttttataagttaaattagtttactcataagttaaaaatcataactaatatgagagagtttctccccattagcttataagctgaatttaacttatagaaacatgtttcatttttattttttttgaagtatttctggaaaagtttatctaatcagactctggc

SEQ ID NO: 26844 - DNA, 306 bp, Glycine max
  Intron number 1 from transcript Glyma19g37450.1 (locus Gly ma19g37450) derived from phytozome v7.0 (chr-ID Gm19; pos 44592849 to 44593154 reverse strand)
ctactccaaggtatgttgttgtttctctctctctctctctctctctctctttcatgttttgtttcatgtcttactatgaccaatgcaagacgacaattggggttagggttttttcttcttttctttttactttatattttcagttttcataattatgcaattattactgtcttaatccatgacattgtgtgtttcactgttttgactttctaatttttattagtgggtttggttgcatacaggatactgagtgtgcattaggactgttgattaggttaatccattggattggggatttaagtgtca

SEQ ID NO: 26845 - DNA, 349 bp, Glycine max
  Intron number 3 from transcript Glyma17g06770.1 (locus Gly ma17g06770) derived from phytozome v7.0 (chr-ID Gm17; pos 4831689 to 4832037)
gtgccactctccgatttcaaagttcagtaaaattcttcagcacatatatatggtgtgtcataaaataaaatttaatttatcttttatctggtaggttatttttttatatcaacaaatattagtcgttagttttttcttttatctgatagtactacatgtctagatagattgtatcaattgacaccatgtgtcaaacatcttcccattcttgtttttgcctcagttgatgatttggaacatggatgctctaatgtagtgttacttacttaaaactttgaattgtagttaaagaatttacttatgcataacaaaaccaaatatgcaggtactttagtagaaactaaggtgc

SEQ ID NO: 26846 - DNA, 813 bp, Glycine max
  Intron number 2 from transcript Glyma18g51050.1 (locus Gly ma18g51050) derived from phytozome v7.0 (chr-ID Gm18; pos 60007528 to 60008340)
ctggagctccgtctggtgacatttacttgtgggaggtaaatttttattcatttatttgttaataattatgcatcaagaagagagagagagagagagacagagctattttttcaatataggttaatctagaccgatgagtgagcaattcactttggagcatagttgtgaaacccggtccgatcattgatccaatcgagatagtggatcagtagtccaaccggtgggccagtaattagtccgattggacctagtatatattaaaaattcaaaattacatatgtatctattatatataagtatataattaacattatttgagtaacaaaagttcattcatattccaaaatccaaaataacaattgataataatgagacattaagacgacgtcgtagaggtggtccatttttttaaaaattttttataaaaccggccgagtcggactgctccaaccgggatttggtacctaaccggccgggtttgaccgggtcatctcaggtccattgcatgaccgatccaatagtggaaccagtccggttaggccactaggtcctggttagaccagtccgactgaccgggtcgggcagaaccggatttcacaactatgctttagagagtaaagtaagtaatctcggttgttaatcattgattgactgatattacttactccatccttagtttagaggaatcaaatctaatctaaacatgtgttgaagatttgcggcattagatgtagtttatggctgtgactgttttatgtttattgtactgtattttttataaggttgaaacgggtaggttgcttaagaagtggc

SEQ ID NO: 26847 - DNA, 592 bp, Glycine max
  Intron number 3 from transcript Glyma17g21490.1 (locus Gly ma17g21490) derived from phytozome v7.0 (chr-ID Gm17; pos 20821720 to 20822311)
agccatttcttcttacttggtgagtttctcttgttttttagtgtcttgtttcatactttaactcaaatttgcttaatggtctccatttagttccttttagaattgggaatttgagggagtaggtgtctttagttgcttaatcatgttagatgttaacatgcatctttgatggaaagagatggaaaggaaggtagcattgctgttataaacgacttttactattttaaatccaaggagtttggagattttagatcatcttcataatgtgatattttttcatttcatttactagctgtataaactttttagctaaataaaaaagctgcattgctaatcaaataaatttagacaaattacaagtgacaacgttttagtcaataacagaaagaataacaagaggttgagtttccactttaaagttttctcagctcaggcatctgacaataatctttctttcgtttagccttcaaattgaaacttgaagagtatatatatttatggtgtagaagcagaacatatgcattttctagtatgcttactttttaaggggttatttgagaaaatggtttaacattgtttttgtaaaccagga

SEQ ID NO: 26848 - DNA, 550 bp, Glycine max
  Intron number 3 from transcript Glyma18g08350.1 (locus Gly ma18g08350) derived from phytozome v7.0 (chr-ID Gm18; pos 7109905 to 7110454 reverse strand)
agcagctgaagaatacattccaggtttggcttttgatttgatttgctttgcttgatcttgggtgttgggaatgatgccttgaaaaataatgcattgaagttgtgatttttgatctgcaacctgatttgataaaaaaaaaaaaaacactttctttttaattcatcctagattatgaggaggggaaaagataaatagtctaaagaacaaaaattaaattttgctgccaaattgatctggatcactggtatgttctggttgccaagaaattttctgtggatagcttatgccttattgtaaagggtgtatggaggattgaagtgaaaactcagtacaattgatctttccatgtttgaggaacaagccttcaagagagttatagtgattttgcaaccactatgggtcttttaatgttttctcgccttttcgtttgttaaatttctgcatttttttattgctatttgcctgtcatggttatgtggttttttgctaactagtgagagttaatgatttctgctgaaatcctgaaaacttgttctttgtatttcagatt

SEQ ID NO: 26849 - DNA, 652 bp, Glycine max
  Intron number 2 from transcript Glyma18g45440.1 (locus Gly ma18g45440) derived from phytozome v7.0 (chr-ID Gm18; pos 55214049 to 55214700 reverse strand)
ttctgagagattgcagactctcgctagacgagctggtagctcatctgctaatcaggtatgaatgtagttggtgtttagattttcaaagcagaatgtgttgtttgcagagttagtttttgctttgttgttctgaaatttgaggttgagattgcaaagtgtcattgtaaggaacacattaactgttaaaactgttacctctgttccatgatgttttagacttttttttcttcataattattgattattgatgttgtacatcaaagtctcgttaattaaactaccgagactgtgtatcaactgacatgggtttgtttcagtgtaaacgattgtcttgagtttgagctctgagcctgggtatgcagttgtgttaagaaaaaaaaggtctgattaatttattgattttcacttatatatcctatttaacaattgttactgacttacaatagtaatttataaccagtaatgagctattaaataaggtattttaattcaaatctaactattattttttacatatattaagtgcttcttaatctgtgttaaccttaaacatcaatagatatggaatggaggcattgtttttgtatcataaatgaggggattcggattacttccatgtaggcagttatagttgtatttttaagaagtaatt

SEQ ID NO: 26850 - DNA, 980 bp, Glycine max
  Intron number 1 from transcript Glyma19g44220.1 (locus Gly ma19g44220) derived from phytozome v7.0 (chr-ID Gm19; pos 49712626 to 49713605)
ccaccgtgagacaactcgataaaggagaccctcccctttgctccatcactctcctcaaatggtaattaactaatactacaattcacttttggagatataacatgagttgggttggatgcttcaaaaataaaagttggagggttcaataccttcaaactaacaattaaaaaaactattcacttctattaatgcatgcttattatatacacacacctttgcatgtcttatttgatgtgcatgttaattagtatacttagaacgtgaattatgagtctaatttaatactataaatttatttttatgaggtgaaatttgtctcatcctcgtttgtgtatattatatgcaagtatgttgatttctcaattggattgagtctctgtatcgtgaagaattaatctcttacttacttttccatgtaccgtacgagaattgttagggttggtgtttgtacaataattaacatgacttacctagctagcttttataagaaaaaaacaaaagaatcatttgagggagaatgaaagaactggcttttcttttttggttatgttcaacactttcacaagccggcccaccactctctaattttattagctgtgcgctacttaaaatttagtgaatcatgcacaaaaattcaaaatttagtaggtggggtggatttatatcaacacataaagctatgttatgaatcctgcagcataattaattgtggaaaagaaaaatgcaaatccaaattaatgaccaactatcgtttttcttgcattagccgtatgtcattaattggcaatagggtagggcccttgaatgtggcatttggatttaattggaatgtagtagtatgttggcactgatcttggatgacctaataatatgtgtttgtttccgcttgttggaaggatgagcatattggtcactaatttgactattctaataattgatgttactgctttgctttggatggagcacaggatcaaaatacg

SEQ ID NO: 26851 - DNA, 484 bp, Glycine max
  Intron number 4 from transcript Glyma17g10670.1 (locus Gly ma17g10670) derived from phytozome v7.0 (chr-ID Gm17; pos 8014458 to 8014941)
tactggtgagtttcttgcatgcttttctgttttcattttgtttgagtttaatttctttggactgggaatgtaattttcctttttttgcactgtcaatcaataaaaaaatcatgctatggatgactgtggggtagttgatataaaagttgacaaaattatcatacatgatttctgattgattgaagatgttccactatctttccatgtagtacactagtactatttatttacttttttttatatttaattttagagattaagaaacacgtgttgtcattgtaaaaggttttacattgacgacaaatcagaataacattgttactgcatgtgttatttatttagtttagtattgacatttcagtttggctgcttttgcaagtttttttatttatttattatttatttattttgtgaactatgttgctggtgtcaaaatggtattgatatagggatctgaatcaacgcctgggagtaacaattttat

SEQ ID NO: 26852 - DNA, 800 bp, Glycine max
  Intron number 3 from transcript Glyma19g33150.1 (locus Gly ma19g33150) derived from phytozome v7.0 (chr-ID Gm19; pos 40777239 to 40778038)
tgctgttttgatacgctcttgttctcccgttagtggtattgctcgatatttatagatagcacattcatacttactatgaaataaaccactttgttgtttgtttctacgtacctccatggccatttagatttttgtgtgtgttagtgattcagtttatggatgaataaagggataaatgattattagatattataggtccttctagtgacttcttaaagtgaacacgttattcatattctcttaaaaaagaaaagaaaacaaaattttcgagatatgattaggctgttaggtttgctagtaaactcgtttttttttgtcatgttcggttattcccaaaagtatgtttgcaaattttgcctggaaactcagtttcacataagtaagactcgggttgtcaaacttagtttgcaaacttcaatccaaacatgcattaaatcatcacaatcttgtatgtttcagcttattttggctgagtagtgtgtaccaaaaaactgaagactatttgagtgtcatatagtggctatccatagaagtgtgtgaataaaatgtatgtgtaaccattactcttgttgctaatccgaagcagcaagccagtaggctgaataattggaaagatgaggctttcggtacaagtccagcattgttattacaatcacgtcattcatttttccttctcagagcagtagcaaacgaactcttgcagaaaaactacagtctctttactagtattcattgtaaggaaaccttgcataaaaatatttataatttatttataatgttcaacaatatcacaggattgg

SEQ ID NO: 26853 - DNA, 755 bp, Glycine max
  Intron number 2 from transcript Glyma19g36580.1 (locus Gly ma19g36580) derived from phytozome v7.0 (chr-ID Gm19; pos 43862273 to 43863027 reverse strand)
tggatccacaggtatgttgttgtacaggtttgacacacgagtagcgaagtttgactcatgcgtcttgtaattcacttagaggatagaggttttggcaatttttgcaacaatgagttattgtccttgctcatttggtaactgataagcaactgaggtgtgcacagatccaaagaggcttccaaggaagaaaataattgtgtgtttttttaaaaaaaaaactatattttctcttctaggattagtggggctaaaataagttttcaagtttagaagaaactgaaaattgtccttatagtatggttggatgtctgtttagagaactggaactgacgttaaagccaatctaatgtgagacaagctttttcatttttgttgtagtagaaagtgtgctgccaataaaccaaacacacgctaacacattcatggaagttctacttgatgcattgctcaggatatctgattgcaaacaactttgtaatatttcaacaatcaacaatgttcacaagcaattacatatttcataatttccattcatatgatatcttccttccactggtggtttccttccctcttcctgcatttaccttcattgtcattaaaacttacaagttgtgattgactggttagtgcacaacgcaccattgctaaacttgagacctccagattttgtagctctcatctgcatcgctgtttatattatgtttatcatttagaatatttaaacttttatctttgtcatccttaggttcatcctt

SEQ ID NO: 26854 - DNA, 368 bp, Glycine max
  Intron number 1 from transcript Glyma20g38600.1 (locus Gly ma20g38600) derived from phytozome v7.0 (chr-ID Gm20; pos 46148017 to 46148384 reverse strand)
ttaccaatttcaaagacactgcgtctctccaaaacgtcagtactttcttttcttctttttatctttgccttcgcaatgttcttaataaattgtagggttgtttgctttcagttactgcttactgaattagaatgggattgctagtgtatgagataatccatcttttattatgtaatttgattgactgtctcttaaccttattgataggtgggtttgtgcagagagatattttgttatcttatgcgtcgtttttaattctttgttaattattcctgtcctgttggagagagggacacacattcactggcgttttatccttttttgctctttcagggtgcattgggatcacctgccagtgtgccgcccga

SEQ ID NO: 26855 - DNA, 676 bp, Glycine max
  Intron number 1 from transcript Glyma19g34360.1 (locus Gly ma19g34360) derived from phytozome v7.0 (chr-ID Gm19; pos 41957778 to 41958453)
ttcgcgacgacgtcgttgataatagagctaagaatgtaaggccaccaccttttttcgattctcctctgtttggatttgattttttaattggaagtgagttttgtgctttgcttcaattgtttctgtctaatatgagagtatgtttctggaaaagctattatatggttggaattactttactctatttgctaggttcagattaccaccattatgtttacatgaagcaaaacgaaacgttttaaaggttaatgaaaataagacttagcactataatgatgatttctttcctgattagtgtgtctaaaaattgagattcttcaacttgagatatgttaggtgagtggttgtcgatgccagtcaacttgttataaacatcgataacatgtctctctgtaattgtgtgttaggtttgatcgtttcttggtcgagatttagttagttaggttatttatttattcctttgtgtttgcacttatggttactttgtgtaatctttgagtaatccttgaacaattgttttcttgttatgttgtgagagccttctttttctgcttcgtgttcttattcttactgttttttttttctgcctttgggagggaagagagggagtggaagagggggagttgatcaagtagcacttattattgctaatttgtaaccctcttgcaggtttttc

SEQ ID NO: 26856 - DNA, 282 bp, Glycine max
  Intron number 1 from transcript Glyma20g37840.1 (locus Gly ma20g37840) derived from phytozome v7.0 (chr-ID Gm20; pos 45602832 to 45603113 reverse strand)
ggaagaagggtgtttctaacaggttctttcacgaggtaacaacaacaacaacttgaaattattgaattgtttattgggacggtggttcttctgttgtagccgttttgatctttatttgtgcgtgcgtgcgttactgaacatgagaagcgtgatgtgagtgtgtcggactgtcactttgattgtttttttggctgttttctaactttttctagtttgtgttttatttttttaactgcatgctgggattaatttaaatattattataactttttgtatacacag

SEQ ID NO: 26857 - DNA, 721 bp, Glycine max
  Intron number 3 from transcript Glyma18g02030.1 (locus Gly ma18g02030) derived from phytozome v7.0 (chr-ID Gm18; pos 1209203 to 1209923)
agacttcacttccagcaggattgcacggttcacatgttggtttttcttttctcatgcagagatctactgtttttatggatttttcaattaatttcttagtttagggaatcttttgtttgtggctgaatgatggtaactggtatggtaatgagtctataatggggtttatcttctttaagtatgtgcttgttgagagtggagattggggaaaacaaagtatgcaagttggcttagtttcttggcatgttgttgcttagaaaccaaatcaatttgtgacatttggcatttcaatgtagaggggtcagagatgtcaactaatagtttgtatgactggaaattagaaccatatgattgaggagagaggatcaaagatctttgtatgtaatcatgtttcacattgattattttggtatttttatccatcctgattttaaactgttggagacctaagcttccatttagttttgggtttttagtcaccttgttattttggatcaaatgggaaatgcaagtcactgaaactccctttctctaactgttgaaaagaaggactaaagggacagatataaactcaaatcaaatatttctttcaatatattactggcatttcttatttgaattttgaaccacttgactgcttttatgacataagtgggttctttggaaatagctcaaaatgtgttttaataactaatgcccttccatttcttgcagactaaag

SEQ ID NO: 26858 - DNA, 939 bp, Glycine max
  Intron number 1 from transcript Glyma17g33510.1 (locus Gly ma17g33510) derived from phytozome v7.0 (chr-ID Gm17; pos 37413974 to 37414912)
gatccctttgatttgattcgcaaaggtataattttttcattcaagctttccataaatttcagatctttcacttacccatctcattaaattgtctgtttttcttcttctgttattacctgcttttgttctgttttgattaattgtacttattggttttttttttttgttgttttctgattcttcaaggggtttaattgcttgagatctcgtaaaggttttggctttcgtaatggaaggttgtgtttttgtttgctcttgctttgacttttttctttttgtcttcagctggttttattctgttgcacttttattttgtttgttgttcctgtgatgaggtttgagatttttggatgttttgttgggttttaatatttgataggctttctgtgtagatacaattgaacaattctttaaattgttgtttacttcatcttgatcactttcaattatttgttcccgaaaaaaattagggtttttgcttctgtcctgctgtttcttacttggtgataactgttcatcaatgcattttttatgttcatgtgattagttaaaggttgttgtgtctgtaattcataatacatagtccctttgttgtccaattaagttttatgggattcactgccaagtttcaattttgaaaatggtcatcctatggttgcttgataatcaacctaattacagatgctttatgtatgcttcacttctctgttgatttgactatgcaaattgttttaactggaattcaatattgagttgttcatttgtttgcattcatatttcatgtgatattggatacagttgaattcatttatctatgcatgacacttttatgatttttatttttcctgttattttgatgacagtttggttgatcaactagtatgaccaaattaaattattgcagggtttggctgaagctatctggaatatttgtgttac

SEQ ID NO: 26859 - DNA, 767 bp, Glycine max
  Intron number 1 from transcript Glyma17g09060.2 (locus Gly ma17g09060) derived from phytozome v7.0 (chr-ID Gm17; pos 6715097 to 6715863 reverse strand)
ctccaagaagctcaaaggctcctctcatctctccggtcagcttccttgcttaacctgtttcgatttccctcactctttttcctttttcttttttccgaaattgaccttgttagaccgtgtcgtagcctgatctgtttttttttctcgatctgtgatggcatttccttggccaaatgttagaattgcttctccgtggatatttcattttccgatctgttagagctagattctgattcgtgcttgttgtttattttttaatgtttatcgaattctgttcttggagcctgtgcttgttcctagagatttttatgcaattctgttgctgtttagcgtttgctggcaactgtgaatgtaattttagtttatgaatcgagctctttgttttttaaaggtttagtgaatccagacgttggagcctgtggattattattcgtagagatttgtgtgcaattctgttattgtgtagcgattgcttactattgttgttgcagcgaccgattaaattattttgtaagatgtgatgattgtcctatttatcgctttggtggtagtaattgataaggcgtttaattttccttgctgcaattgaaaataggaggttctgtctttttgaatctgagttcaattttgattatcagtgatgaagaaggtgccgtgttattgtagaaactaaaagtattcggtggacttttttaaaataaaatttaaataggtggtactgtattattctgtggattcaaattaattcattaaccatatactagcag

SEQ ID NO: 26860 - DNA, 573 bp, Glycine max
  Intron number 2 from transcript Glyma18g45230.1 (locus Gly ma18g45230) derived from phytozome v7.0 (chr-ID Gm18; pos 54995806 to 54996378 reverse strand)
aaagaacgtgtttacgagggaaaaccacgcaggacgtatatgttacaatcagtggctcgattttatttgtttgtttttgtttctcaataatttcattcaattttgagttacgtgaagaatctgcgtttcacttatttttcaaatggtgattttttttttaatgccaaatagtgatgttctgttgatgattatatatttgtagtgtagtggaattccaaaaattaatgtctcatgctttggatatatttatgcgtatttattagcatatatttatgtgtacttattagcagttgtcataaatgaactattatttgtacttgaatatgctctactaatcaaagatcttgtgccttgacttgacttgattttttttcttctgactcttggattccatttatcattgcaattttgcaggatatatatatgaacagaagaatactccttcggtaacctttcaattcaaatgtatctgtgaattgttacaaattttccagctctttgtgatatcattgtattgatgttgctgtgtgtttttcttttctcccattcacctctgttcttttccaattcaga

SEQ ID NO: 26861 - DNA, 623 bp, Glycine max
  Intron number 1 from transcript Glyma20g39050.1 (locus Gly ma20g39050) derived from phytozome v7.0 (chr-ID Gm20; pos 46520418 to 46521040 reverse strand)
accatcatcatcacccacatcatcagaatttcaaggtgcgttcccttcattttctgctatagtgtttggtagcatgagcaaaacaacaatacctttttcttttacaattaatcttcttgagattggatttggtgtcttcttttttattcgttttggcattagggggttgctaggttggtgtcaaattagtctttcgcttgtcaaagtgtgctgctttgacttttatgcactttttatttggtgccaagttagcgttttccgcgacttcagcttgtgggcacactggattgttccaaagtttgtgtttttgtcacggaagttttttttttattcacgtactgcagttatttttttcaactgtttcagatttgttttctgttagtatctctggaagtccaggaattctctagatttgaattgtttcaatttcatttttgtcaaagttgagtttgctgattatccctcatgtgaagcgacatgtctcttgcttttgcaatttatgttttgattgagagtagtttagtttgtctgcctccagtcaagcaaagattatgtttttgattctgtgaaatatttattttggtcatggtccttaggtcttgtattgcaaggttattgaggat

SEQ ID NO: 26862 - DNA, 475 bp, Glycine max
  Intron number 1 from transcript Glyma20g02250.2 (locus Gly ma20g02250) derived from phytozome v7.0 (chr-ID Gm20; pos 1909799 to 1910273 reverse strand)
taatcttcgtcaacgttacttttccacctcgtacggtaacacacgcttcttcttcttcttcttcttcttcttcaaattggtacttggattctgtgtttgcttaattgaacctctgatccatgaatctgaacgatttcatccaaatcattaccatttgtttctttaatttgaaggaagatatttttctatatgttagctggatgattcagattccattttttttgacaaatatgaaaatggatatattaatttcgatttcgatcaggattttgactttcacgcgaatgattaatgattaaagtttggagagtacttttacggatttcaatgcataataatgaattctaatgcaccaaatgaagaaggaagaaattgttgctttagtttttaggctttccctgctttaattctaacatgcactgaaattttacttgattcagtgattaatctttgtgggtgattgaatttggctggt

SEQ ID NO: 26863 - DNA, 699 bp, Glycine max
  Intron number 1 from transcript Glyma18g53390.1 (locus Gly ma18g53390) derived from phytozome v7.0 (chr-ID Gm18; pos 61682076 to 61682774)
cgactgagcagccacccacccacccttcagcgaaggtaaacccttttgcttatgtttcatattttttcattttttctgttcaatgagtggctttttttgtttcaatttcaagattattggctgcaccatgttttattcattcagctaaatcactgactctaattgttcagtatgtgaagactcaaaaggcgttatttttatttttattatttgtagatatattgtttgacgaaatgtctgcatgtatgtacgtttgttaattatacccaattgtagtttatgctggttttgatgttggaatttctgctgaaccttaaactttgtatggttgaggacataggttgagttgaggttgtcttttcgatttatatgtaaatatgtaaatgattccctccctggacttgaattccccaatttgcttgcttgctgtgttcaaatatgcaaagtcagagtgcatgattgtggattcggaacctgattctaggattttccatgcttcaaattgattttgagcttcatatttttgttttcttattcttgtgtttcagaacaattccaaatcacatatattttttaagcttccatcgtgttgtgctttggtactttgtagttctattgtctttgattagtatcaatgccacgcttaaataatgaagcatctaccctcggttttattctctgattgtttaaaacacagag

SEQ ID NO: 26864 - DNA, 623 bp, Glycine max
  Intron number 4 from transcript Glyma19g44450.3 (locus Gly ma19g44450) derived from phytozome v7.0 (chr-ID Gm19; pos 49880343 to 49880965)
aatttcgacaccttcacagcaaacagctccaacaggttttcaggcaaggcttgataatttatatcatgtcaatttcttctttttcctctttgattatgcatcattacaatttgttgaatcgtgctagacaataggaaacaaggtgcagatataactcaaccataaattttgtttctgacttctgagagtagttttcttatataatcccatcaaattcattttaatatcaaattataaaaactttagcaataacagaagtcataaaaaccatgtgatgaacaaccttaaagtactactcgtttttcatatgagcacatgtgggattattgtaatgatcttagaatacaattctcttatttttgtcgtattttctttttttcaaaaaactttataacctcatcaattttgcaatgtgcttgttattccatgcaggttctattcttcacagtggaggagatgggctgctactttcatacaagcagcttggcgtcgatactggaaaaagaagattgagaggtcattgcgcgaagcagaagatgagctacaagatgcttttgcaaatgaggaagggtctagtctaagccttggtgcaaccatatatgcatcaaggtaatttgctgcca

SEQ ID NO: 26865 - DNA, 649 bp, Glycine max
  Intron number 4 from transcript Glyma20g33940.1 (locus Gly ma20g33940) derived from phytozome v7.0 (chr-ID Gm20; pos 42376932 to 42377580)
tttgccgggaattggtgggtaagttccttactttgactgcagccgtgtgaaatatgattttgttgtttctatatgtttaaaatattatcctaagggcttctttaactttttgtcttcttttattctttagttgtcatatgctgtaggctgtagcttatcatgaggtgctactatgctgtttacttgtttgatcacaggcttaagtctcagagtaacggagttaagagtttttttttatagtttttttattaattaagcatgttaaaccagtaaaaaatgtaattaaaatatgatttcagatgcattgcttcgtgtatttatttccctcatctatacatatgccggagaagaaaatgatgcatcgccagatgacttatttcctagaattttggtgtgttctccccctcccccttttgttttctttaatgcaacttacttgggagttgaaaaaagacaatggtaaatggtataaagttaattaatatgaggaggttctgaactattgtgatttttcttttattccctttctttatgccatttttaatttttaatatttttattttcagttgttttgaatatgctttcatattatgctgtgtggtctgtttgagcaggtgttgcccttaacaagcaagtgcctggagaagct

SEQ ID NO: 26866 - DNA, 540 bp, Glycine max
  Intron number 1 from transcript Glyma18g06270.1 (locus Gly ma18g06270) derived from phytozome v7.0 (chr-ID Gm18; pos 4849651 to 4850190 reverse strand)
acacctgcttcgttcaatcagatactcacactcggtgattactctgaaacatctctttcttccctgtttgcatgccattttctactcatccagtttctggacaaactttattacatgaagaatccacttcataaagggggaacagcccatttgatttcttcacagttatcactttcattttcttctctttatccaattcacatatttcatctcattcatcaaaatcttcttcggagaattctccactcaatattaattaacattcatgtactcactttgataatttcttttctacttgtgtgtatgtgtatattcaataacagttggatatatataaactctcatatcttgcttatatttttgcctctaaatgcatattttgttcaacaattgaagatcactttgatatatatatatatatatatatatatatatatatatatagatatggaacgtattccgtgtttcattatgcagcgccctaaagcctcagtgttattccaggtgtcagattacatacaaggtttaaagcaaaaactg

SEQ ID NO: 26867 - DNA, 668 bp, Glycine max
  Intron number 1 from transcript Glyma19g16970.1 (locus Gly ma19g16970) derived from phytozome v7.0 (chr-ID Gm19; pos 20668392 to 20669059)
ggtaagtcaacagagaagcaatgtcccattgtaatgagtgttagtatcagattcttgccttatccatgaccaatgattattcttttcaaattttgttaagctcaatcaaaatggactgaagaacactgcatgtgcagtcatttggagttcattgtttgttggtacttggtggcacttaaaaaaatcaatttgtttaaaatatattttgttggtatctaagagcacaattgaacttgatccagtcaatgcttgtgattcaaatttgatccacacttgatataaagaattctacaaattttgtgagcgttattttgctttgtatttaaaaaccctgttcaaaagaagtgtatataacaatgtttaaaacacacattttgtaacctgtccaaattttgtgagcgttattttgctttgtatttactgggatccgttttcaattgtctttacaatgagttatgaacctttttcatgttaatgtaaacaaaacaagtctgaaagcttctctaaatttatattgcaaaacagagtatctagacatagttgtactcaaatatattatgtagctatccttaatgttttgtgtaatatattttctgtttctcctctggcagcttaaacgatgggagcggaaggagtgtaaaccaaacagtcttcctatcttgcacaaa

SEQ ID NO: 26868 - DNA, 538 bp, Glycine max
  Intron number 1 from transcript Glyma20g29630.1 (locus Gly ma20g29630) derived from phytozome v7.0 (chr-ID Gm20; pos 38499418 to 38499955 reverse strand)
caccagcaggtagccccaccaccacgcacttcacttccctctttcttccttttcttttattttacgacttaccagctgggaatcaaatcctaacacagcgtttggatgtacatttctgatattattattcttgctcactaataggtttagattattagttaagaaattttttttaaaaaaaacacatgaaaagattcttaaacagtacaaattttatgcattgtctattattattattattagtctttgactcgactaaggtagcgtagtgctgacacacaaacacaagtctgtttgaccaaacaacaccaacatcgtaattcgtgaaaattttcggaatatgcaccttagatattttgaacacaaagtagtagtattattccaactcttcctttccttcttttttatattcctcaatcctcatcacaaattcacaaatatctccacgtacttcattcacatttcccattattaattatttatttttttcctttttgtgacagattcagtgggtcgtagcaggggcagaagaaggaag

SEQ ID NO: 26869 - DNA, 356 bp, Glycine max
  Intron number 1 from transcript Glyma17g33920.1 (locus Gly ma17g33920) derived from phytozome v7.0 (chr-ID Gm17; pos 37829561 to 37829916)
aaaaggtaaacttattaatctggttaattagttcctcctttttctttcggtgtgtgtgttgtattctcagcaaaaaagattttttttttcactgtttagtttatttttgggttcttctagtttgctttttgggtgcccttaacctttcagaaacatattaaagagaggtttagttcagttgattgaatatagtataagttgttgtaaatcttttgatacctgcttttgattcctatggataaacaaaacctttcagaaacatatattgaacatgaatctcctcttgtgaacattttacaacactcttgatttgatgattaggtggaaactattaaagctgagttaaaacgagtgag

SEQ ID NO: 26870 - DNA, 685 bp, Glycine max
  Intron number 3 from transcript Glyma17g33920.1 (locus Gly ma17g33920) derived from phytozome v7.0 (chr-ID Gm17; pos 37830355 to 37831039)
gctcccatttgcccagcaaaaaagaaggtactatataaacatatcctaaattcatttggtacttttttcgaccattaagcaataaaaaattaatttaatagatgattaatttttattaaaaaatctgactgatcatctttaatcaaatttttttcattcataaaattataatttgaaatcttgtttaagagaatcaagtccagtatcactcattaacaacttaaaatattaatttttttatgtgtataataatagtaatgaagtttgagcaccttgtgcataatgctcaaatcccttcactaggtcaatcctatctaatgggttaatggaggcagatgttatataacaacacttatatgtacaacttggaaatttagaatattaattgggtcgtttgattgtttgttaaacatagttccctagtcagcaaaaattgacatacggttactcaattagggataaaggaattggtcaatgaatatatagcacaagttttgtaattaattagtttagttaggtgtaaagtccatttcatttcttcatggtggttaactaactatattatatttatttcatgtgcatatatgacttcaagaaatcttattattgatgttttgccttatcatatggttacttttttaatgtgttctttttgcgttttgccataatccttttaggtgcaaag

SEQ ID NO: 26871 - DNA, 680 bp, Glycine max
  Intron number 1 from transcript Glyma20g08680.1 (locus Gly ma20g08680) derived from phytozome v7.0 (chr-ID Gm20; pos 12268144 to 12268823)
ttcctaagttttcattcaatcatcactgatctaaggtacttcttcattccctctgatattttcatttgtttcactgttatttttctgtgttaggatctccctttagaccaattctaccatggttgctttggaaaaattttgcactttatgttttggatttttgttggttggtgtcttagaatgtgatcattgattaagttgtggtattttgattctggttacccttcattttgatcagtggagaatccattgaggaataagaaagaacaggggaaaattgttaactttagtataatcccgacatgggttttgatgcatttttggaaactggtgatcaagaaatagaacatgccttttatttctatttgtattgtcataaataattacaaaaacattacttgcttttactttgttccatttttcaaataccagcaaaaaaaaaaagcattttgatgtttcttttatcatttttgtatatatttgtaaacaggatacaaagtaaatgtttgaaactatgaaaatagaaaatgttttttgtaaaaagtttttaattttgtactatgaataatgatcctgattgttgctgacaaagttaacttgtaacattttttttctttgatttgttgtggttgtggttggatcttgcccaactaatttgctttatcaattattatttagat

SEQ ID NO: 26872 - DNA, 809 bp, Glycine max
  Intron number 2 from transcript Glyma19g05980.1 (locus Gly ma19g05980) derived from phytozome v7.0 (chr-ID Gm19; pos 6700938 to 6701746)
attcccttggtgacctagtccccttcagcaacaaggtatgttaatttttggtctttgtttaataccacttgcaaattttctaagcctttgttcatttttcatataattaaacttttatattattagtaaaagtataacttttttgtatttggtttcttcattttaccttattatatttaatttaaagttccagtatgggtttaagcttaaaagttacttttttttgtcgtttgctttatccaaagtaaaagggtgttcatatctgaatttggattccctttgttcatttttctacatattcacacatttagtaacttgaaccataggataaaaaattagatgactcatatttgtatcttagtaaatcagacttaaaataaacattcgaaatcggagttgtccgattttcatctaactggctggtactaatattctaattgtgggaatgtgtgaaaaatccactacactgagtaaatcagatttaaaacaaacattcataatctgacttgtttgatcttcattcaacggttactaatgtactaattgcatgagattgtgaatttttttttttatcgacaaatattaattattgatttgttagtgggaggatttgaacctatgatctctctccccttctacctttaaccaccaagataatcctataacttcacgagagtgtggaaaattgaattcactaaatcttgttcagttcatgttttgcttgtttgattcttcaattttttgtgtatcattttggtattgattttttatatatatattttatttgggatcatgcagttgtactctgg

SEQ ID NO: 26873 - DNA, 731 bp, Glycine max
  Intron number 1 from transcript Glyma17g18440.1 (locus Gly ma17g18440) derived from phytozome v7.0 (chr-ID Gm17; pos 15791422 to 15792152 reverse strand)
tgcagttgctcccatcaaagatcagggaagttgtggtgagttttttttcctatcattttgccttttcttatggtaaagaactaaagataatgtttgttatctaaggattttagatttagtaatcagttagggacttgttttaaattcaagtgtaacagcttttttgctagctaaggttacttatcagataaggctttgttttataattcaactataacagctttctctaactttgataaaagatacccctttttctttttaaatgtttgtttagatattttaaactgttttgagatttttgttaacaatataaataattaacttgattgcatagattgtgaagtagcaatatcttaaatttaaaaaagtgagtatgattaaatgtattatttttaacccaaaaaaaaaactacgatcaaagaaaaatattgaattaaatgtggacaaatagatttttatgtgtttataagttgattgacatactaccaaacacatatagatcaacctatggagttatttcaatttaattgcctttagtgaagaatacatgtgatctaaaaaaaatactcactgccgtattatttaagtggtgttgagtttttttttctgaaaattcaaaagcattttaagtattactttttgaattctgatgttgagttgttcttgatttaaattttttttttttacttgatgcaggaagttgttgggcgttctcaacggtggccacagtg

SEQ ID NO: 26874 - DNA, 892 bp, Glycine max
  Intron number 1 from transcript Glyma20g30080.2 (locus Gly ma20g30080) derived from phytozome v7.0 (chr-ID Gm20; pos 38805069 to 38805960)
gaactggtttcactgccattgtcacaggttaatgattcccagatgtgtatctttcccttatgaaaaaatcatttttttcttacaactttttcatctgatcttgctgatgcttttttgttataatcgttggctaaaaaaaaccatatatgttttgattttgatgcaaattttcttgtatccagttcaatgattgactgaacaaattgaaaaagaaaaaaaaaaatcatttcttgttcaattggcttctgctatagccaaccaagctatacggtagttttttttcttccacctatattatttttccatcatgttaatgagtttttgagcgtgccttactgttgaatacatgttttttttgctatatgttgcatagatagaaccaatgttttaaattgcagacatacacagttgagatttcgtagcgatccttgatattatgggaaattgcggctggttcagccatgattgtggtcacagaaatcccaaaaatcttgatgttgcggctgaaattgtggtcgcacaccgttcttttatagcttgtatagaactattgggaagtagaaccctgcaaatttgcatcagatgttggcttgtggagtgatttacaagctttgtcaatgaagatccaaacccggcattgaactaatgccttttgcagtggactctatatgatttagcccaagaaaattgcatccctagaactaagttaatgcagcaacaaaaactggcgtctttggtggggcataacttgtgcactctgcatatgcatgcttcgttgaatttttgctactggcgtgatagataattcttgaaatgttccgttgtttaactgtggtttgtggacattatggtaacaggggcatccagtggtattggcactgagactacgcgt

SEQ ID NO: 26875 - DNA, 692 bp, Glycine max
  Intron number 1 from transcript Glyma18g02750.1 (locus Gly ma18g02750) derived from phytozome v7.0 (chr-ID Gm18; pos 1781313 to 1782004 reverse strand)
ggtctcttcctgatctgcccttaaccctctctctctccccgtttatttgacgctgttccgtcttttcttcttgtttctctgttttccataaccttttgattgttaggatatatatatatatatatatatatatatatatatatatatatatatatatatatatatatatatatatatatatatatatatttctgtaatttgttttattaattgaattttcatatttcagtcttccttgattcatgtttagaatcatttcccggattagttaatcaatgttataaggtagtgctagagttttggaatttagttgtttggaggatttagtttttcaagttaggattttaactgttatatggattctctggtttatcattgttttacaatgacaacaatagggtttgaacttaagacctcatttaaactactacctagaccccacctattggtggtatcatttttttatccgtaaaaattgaagaaagtgttaggggtttacaataactcacgcacatgctcaaccaaccgagatagacccccttgacccttggtggtagcattggttcttatatcacaatttactagctttaaatatgaatagtatgtaaggatatggcagttatacagttctgactgaagatttctttttcatatttattttggtgcttgtagattttacaaagtggcagtaa

SEQ ID NO: 26876 - DNA, 605 bp, Glycine max
  Intron number 1 from transcript Glyma19g44960.1 (locus Gly ma19g44960) derived from phytozome v7.0 (chr-ID Gm19; pos 50242536 to 50243140 reverse strand)
ttttgtgagatattaaccatcgttatttgttagactttgtacaaaaagagtttattaagaacaatttgttgatactaacaagttggtggtcttcatgatattaagttgcattttcttaaataaaatatttgatttgaatcttataaatgaaaaatatatgatcaagaatattaataagttttttaataaaaattattttttagtaaaattgataaataattcacatcaatatcataataaaaaaaaaattattctatttttttaatcccatgttaaaaaaaagtttgagttaattttgtttaagtactttattatttcattttttattgattaaaacttattaaaattataaaatcatgttaaagaattattaaataaaatgaaaaatccataaaattttgtgatttttaaaactgtaactggttaagaaattttggtaaaaagcgtggcggctgttgtgccaattcaacgtgccccattcatggacgaaaatactctagaaattgggcgggcttacttgtaagttgcacgtcgttgaattcatcacaagcgcttgacttgtataggcagaagcaagaagaagcttccgaatcagaccctgttct

SEQ ID NO: 26877 - DNA, 951 bp, Glycine max
  Intron number 1 from transcript Glyma17g13980.1 (locus Gly ma17g13980) derived from phytozome v7.0 (chr-ID Gm17; pos 10751898 to 10752848 reverse strand)
ggataaggttaatttctgaagcataaacgacgctgcgttttcactttgaattttaattgatttttttacgatggcgctggactataacgattcagtttgctttatgtggtttgagtgaatttaagaaacctgcatgctgatgtaattaaaacatagaagttagaagtccgttgaactactatagtgattaacgtggcttttttaactgtatttttggaatgtgcatgtgaaattgttgggtagtgctttgattgctactaagggagaaagaagtagctgtgttaattgaaaactctagcaaaccttcatttcatgtttcagagaacccacatgggaaatttaggtttttcagttgtttagttaaaaaaaaaaattgtctgttcaaaacatgtcgaagactcaaaggctttgattttcaatttttttaaatcctcttggttcttctgatctctcaaatctctttcgaattgctttgagtgactgagagtgatgttgtaacttaactttgattgtaggaagagatgatatatgatctctcatctgataattggccgaattatcagatactagagttagttttattcaatctctccaagcaagggtgtgaatttgtaggtttatgtactgatagatttaataacacctgatttttgaaccacaatatgatgactaagtttagtaatgtaaatactggatgatctggggaaaatgctctattgctattgccctgatttaatttctaaaatggttatatatggtgtcgtttgttacagtcttttttgtccatgcgtttgttttagctcttcaatataatcaaaagctaagggttgaaacaataatacaatatgtccaatatatattagcttgggaattagtaacatcaattattgattcattcatcattttttgttttatgttatgagtttttatattgttttcttgctaagcagt

SEQ ID NO: 26878 - DNA, 630 bp, Glycine max
  Intron number 2 from transcript Glyma18g47780.1 (locus Gly ma18g47780) derived from phytozome v7.0 (chr-ID Gm18; pos 57350254 to 57350883)
ttttatttgcagctcgaaggagagacccactcttgggtaagtttcgttctttctcccctcacgataatactttgttctcttcttctatgtttttgtatagctaagatgtgtttttttaatgctacatgctgtgtatgcttaattaaactgacatgttatgaacatttcaaatgaaggaaaatggaaataatgtcttttaactttcaaatacacttcttcccccattggttttcttatattccttccttcctaacatcctcagcataccccaaaaccaaagttttattttctaacttcaccgcccattgagttgttttcgattatttttagggttttgcattcttaatttacactccccgtgtaatctttctctgacaaataaaccccacttaattttttttatggcttagattcgttacatcttttgcagctagtgttagagggttcatttaattatgtaagtcagtaagtggtactatacatacagctttggtattttgtaggctattgcatgtgagcttatattattgtgttatttatcatgtatgtttaatttatgttgtgggcacttatcttttgtttatctccatccccagtggcacgcggattaagacccgcaaacgaaatatt

SEQ ID NO: 26879 - DNA, 385 bp, Glycine max
  Intron number 1 from transcript Glyma18g03570.1 (locus Gly ma18g03570) derived from phytozome v7.0 (chr-ID Gm18; pos 2434515 to 2434899)
gttagttattagaagatcttagatcattatttgtttatgctctcaaactaatctttttgtgacatatttaattttaaaaattttaagaaaaaatcactaataatacttaattacgtgttatgtaaaaattaatcaaaagcataacaagaattaccttagagcatctttaactgttgaatgatttttgggttcttaatgtaatttttgtgagtcacttattgacaagtcagatttaagaatcacttgctatttttactctaacccaacaagcaccaaaatttgaggttcttaaatttttcttttttctttttttttcccctccttttctctctcacagcaccccactcttgctactaaaaagtgatgtgtcccaggaacttgtttc

SEQ ID NO: 26880 - DNA, 343 bp, Glycine max
  Intron number 2 from transcript Glyma18g36890.1 (locus Gly ma18g36890) derived from phytozome v7.0 (chr-ID Gm18; pos 43595005 to 43595347)
gtggggtggtggtttaagctttgatccgggggactggtatggtttctctttctggttcagatgtgaaagttgaatttgattgtggctttttctttgttctgtgctgtttctgagaataagatggaattaaaaggagatgaaaggaaaaaaaaattgttaagaattgggagagttcaattcacagtggcatttaaaaggtttaattgaacaagttaaaagtaataattgtatggaatttaatttaattacctgtattatgagatattcttgcatttaaggttccaaaattaaagttgtctttctttgcagggaagatctctagtctcttggaaattgggtctgt

SEQ ID NO: 26881 - DNA, 782 bp, Glycine max
  Intron number 1 from transcript Glyma17g06080.1 (locus Gly ma17g06080) derived from phytozome v7.0 (chr-ID Gm17; pos 4300486 to 4301267)
attgctttgtgaatgtaagttttatggttgttttgttatatgcacacttcagtcaaattgttaggatactattatcattcttatcctactaacctacaagaattggtagcaaaatactttctaatacacctttttaaacacattctttattattacctgatattaaaatttacataattagagtttcacttcatatttaatgagtcaaattaatgattttgtagttgctaataaattttagccaatgataaaaagtgtgttagagagtactggtatgttgctcacacaaatctaacctcagtcctaaataaaataggtagaaaggattgcaatttattcaaggttttaaattacagtctacaacagttattgaggttgcaatattcagggcacattgcatcaactgcatttgcatgtaattgtccacaatatcaaatttttattggtctatgcaatcacgcagaaacacaatttgaaactttgatttgtcctaaaaatattttattgcaattaaagggcagtaaaatgaaagcttagaatattattatgatcagtttaatgtgtcaacacatcgttgtcagtaaactgcactaaagattttattttatttttatgaaatttatcagaagagaaatgattatgttattgaaattctgttatattgggtattccgaatttccaattaattatgtgacacagaattagtaagttagagcataatctgttacaccttattttcattgatatcaatttttttttctttgaacatgatcagggttgtg

SEQ ID NO: 26882 - DNA, 757 bp, Glycine max
  Intron number 4 from transcript Glyma20g37280.2 (locus Gly ma20g37280) derived from phytozome v7.0 (chr-ID Gm20; pos 45174359 to 45175115)
ctgagaaaaaaggccttattacacctggaaaggttagctgtgctaaagatatattttttacatatctggattttggagtggagattctttgtgtggcatcaggcctgtaataataccgctatgcacttctcaacatggcttttatttggacaataatgtttttccaattccatcagtaaggatgtgttttattttttattttcaaatattgtttttagttttcaaaatgcaactaaatgagatgctcaaatagctagtggagagtgggtcgatacagagtagaaatgtggaattgagaaagaggttgaacaagatgaaaatttaagaagataaagacatctctaagctgtttctattttttatatttaaaatacttgttttgaaaataatttttaaaacttaatagatttcggagagaatttgattgctaaacagtttttaaaaccaaaaagtgagaaagaaaactaataagctctaaatgtccttcaactttggcctgcaataatatttggagttttggacaatgttcttcaaattctttcagtccataatataaattatccatcttagtcaggaaatacgttttattgagattttctaatattagtgcttataatattgaagaattgggcctttccactcctcgggcacttattatgttgtctgtattgttgaagatactatctaactatgtttaatattttttactaatggttgaaaagactgttctggttgagtatacaagtggtaacaccgg

SEQ ID NO: 26883 - DNA, 383 bp, Glycine max
  Intron number 2 from transcript Glyma18g38610.1 (locus Gly ma18g38610) derived from phytozome v7.0 (chr-ID Gm18; pos 46259730 to 46260112)
ttgacgtattgaatcgacataaacaggtacctctcttgtatatgtttgtctataactgctattgatctctttaagttttatgataaatttttctataaacatttattagagaagaaaataagaatataaaatgataagttttatagaagttctgtcatttaatttctccgaaagttgagttatataagttgactcaattaatattttcttcttattttcttctcctataagtgcttgtggagaagtttatccaaacagaccttagtctctgctctttggagttttgcactataggctatacccctgtttagttctgtttcttatatggtttattttgatttcttatgtttattttttttttttttttgatgtagaccccgttg

SEQ ID NO: 26884 - DNA, 687 bp, Glycine max
  Intron number 2 from transcript Glyma19g41130.1 (locus Gly ma19g41130) derived from phytozome v7.0 (chr-ID Gm19; pos 47448896 to 47449582)
cgccaagttggagaagctcgccgagggagaaacaggttcaattctcctcaaaattgtaacaatgaatatatagatagtcttcgtaatcgttgttataatgtagacctggtgcatttgcttttgttggaggttttggaagcataagtctcgtgatccgtaaatgtaaccgtgctagtggtctttagtaacacttgtcgataggaatttgttagttgtcactttttattttgaggaattgactagttatccatggttgccacttgccaagttcgttttcttctaagtagtgaaaaaccttatcaggtaaatttgctttgtgagtttgatagctatgatagtttatagttcctaggcatgatactgttcctgtttggccaaactttcttagaatgcaatttttactgcagatttatggtttcacagcgagaattgcttgaatttctgttaatgttagccactagttagttttggtgacgtatttgcagcttgctaatatagcctttaggatattgtaacaacttacaagtgagtttcatcaaatgcaaaatgaaaaacaacgcgataaactgttcctcaaacattatttgtggccttccacatttctctgctgatctggtaactgaacttctatgacatgttttttgtttggtagagtcaaaagggaagccgacagaagccattcgggga

SEQ ID NO: 26885 - DNA, 927 bp, Glycine max
  Intron number 1 from transcript Glyma18g48200.1 (locus Gly ma18g48200) derived from phytozome v7.0 (chr-ID Gm18; pos 57683375 to 57684301)
tgttttggacaggtaagtaaaaatagagaaagagaaaaatgttttgcggcaatttaaagcattgcattgaaactgaattcttattcgggtatgattgagatggagaaaagaaacgctaaacatgtcttaattttttgtttcagtttcctaaaattaacaaggttttaatcatcggtggcgtttgttgataatgcggtcccaattgacagttaaaaaaccttgatgtttcgacccaaatcatgctcgcagactattttttagaatctcgtaaaaagtttcacttttgcccttaaatgtctccgttagactaaattggtctttctgttcgttttttttttttttttttgtaggaattgtgttaattttgccataacgcttatctaatgtgagatttctcacagacatgtcattaagttgactaagtgtgataaattgatagaactactaacttggtctaacggagacgctttaaattagatggaaattttgattcgtcgaaaagtgaactaagtaaaagaagaaaaaatagaatgatgaaattttgattctgatcacttgtatgatattctggattgctaatttggcttatgctggaatgacactggtgttttcctataaaagtcccttcaattttaagagttgctaagtggaagtaatgggtatgtttttatgtgtttcctaattcctacaattggattatttgttttaactatggcttttgtttggacatttcacctatgtgttttttcctttacgttttactaaagattgggaagaaatctgtttgtactttgtagtataactctgactaagagcaaaggagtcattgttaatgagggtaatgtcttttctttaaatactatacatgtctgcagaattcctcacttgtttctcttttgtgtgtaaggtagttttgacggtaattcc

SEQ ID NO: 26886 - DNA, 989 bp, Glycine max
  Intron number 1 from transcript Glyma20g12270.2 (locus Gly ma20g12270) derived from phytozome v7.0 (chr-ID Gm20; pos 17456487 to 17457475)
tgattctcaggcgcttttttttgctacattttcaggtgattaaatactcatgttttttttttttttttgtttcaatttcttgtctttttacttttctggttgctgcaacccatgccgttcgtccattttctattgcgtgtgagagagacattcatttgtttatctttgaagtagcattcagaattttagtttctctgttgaccaagcactttaattaataacactactgaattgttgttgctgttgcacataggactaaatcaatagttttaggaattctaattgttagaatagttgtttggtttaactacatttttggtccctgcaatttagattttttcatttctgtttctgcaatttttttttctttattttagtccttacaaaatatgtttgttgtgttttcgtcctttaagtgctttatatatccctttttttattgtttaaaacacttttttactgttcaaagtattatctaaaatactttaaggaaaaaaacaaaacaaacacattttgcaaagactaaaatgaaataaaaaatttctagggacaaaaattaaaaagtattaaattgcaggaaccaaaaatgtatttaaacctatttgttttattatatatcgcttagcttttattaagctgttttttctggttgtatttacctactctatgtaggctgtaggtgcctaggctgtaacctttcttctacctttgtaagtcagctgttatatatttgtgtatgtgtctgggtgtatttgagttgccgagaacttaactctgcacttcatcaatctaatgtgtatcagaaacccttcaacaatgtagtctctaaatttaacactaataaattaaattaaaatacagtatatgtttttgaatgttttagttgcttctttatgcatttctattaagctactagtagccaaatactttggtgcttggtttttgataattgtttctttgactgttaaagtttgcagctatacttgaag

SEQ ID NO: 26887 - DNA, 883 bp, Glycine max
  Intron number 2 from transcript Glyma20g12270.2 (locus Gly ma20g12270) derived from phytozome v7.0 (chr-ID Gm20; pos 17457721 to 17458603)
aaaaggcaataggctgttactctccatcggttcaggtatctctcttctcttctcctttttctgctatttaattactcatgttttgattttcgtaactaaattgcctcaaattcacttttcaaaagaagcattgttcgatccactactttactctttttctgtgtatgtgtgtttctctcagttttggtgattcgttgtgaatttctgtttaggttttggctctagctgactggttttgttctctcagaatgtgtttattgcgtgaattggttgcgtgtttctggttgttaattatggtaattggcttttgctgcatacaattttgacctatgtaaggggaaaattaaaaaaaaaattaaaagaacttctactggaaatatgtgtatatcatttttttgatgaggaatgtgtgtcgtggtgctaggaatccagagaatgttagttttggaaagccgaattatggaatttaattaattgttcttttttatttttgtggtaagtgagatggctagtgaaggtattggaaatgaattaccaaaggttttattctgcatttgtggcttatataacgtgtttgtctagattagtttattttgtgctcttaaaagcttatgatgaaattgatgagtgaacttttgactgagaagctatttgtgtatacaaattaagtgatgccagattttacttggtaaagttctaggattgtatttttacgtgtccccttttgtgtatgattatatgtgtatgtgtattctgctttgttgaagtttgtgttttgaagtactgttgatatctgcattcattgtcagcttagagtttcatgctttagtagtttcagctatttgtttgttttctcctgaaatgtaggagcttattgttattg

SEQ ID NO: 26888 - DNA, 343 bp, Glycine max
  Intron number 5 from transcript Glyma17g29170.2 (locus Gly ma17g29170) derived from phytozome v7.0 (chr-ID Gm17; pos 31399888 to 31400230 reverse strand)
tgtgtcatctgtggctgagataacaccttcatccggtaatggtccatggttcctttataaccattttccagttccacaaatattttggccttccatccttcagtcttctaatccaattcatctacaaaatacatcatttaattccatcgccattccacctaatgctaatgtttcatgttcttccgagtctgaatcacatcacaagcaaaataaccttataaatgataatcgaactcgagtaatcactttttaaaattttattttgatctatccttttgatttttgaggttgtaagtttctttctttagcttaatcactagaagaagataagaaagcttttgaa

SEQ ID NO: 26889 - DNA, 509 bp, Glycine max
  Intron number 1 from transcript Glyma18g01860.1 (locus Gly ma18g01860) derived from phytozome v7.0 (chr-ID Gm18; pos 1091327 to 1091835)
gtttcggaagcagagaccgaaatacttcgaggttagtgatctttttttccgcttttggaaaaaattcgaatattagattctgcttcttgttcgttctgtagaagaattgcttggcgttttcgtttccttaaggttcaaaacttgtcttaagtttctttctttgattgctttgatatagggtttgtaacatgattaaatcgatttttacttccattatcttccatttcgcagtattagtttattttattaagttatttgccgtgtactatgattaaaatctatatccctctgttggatgttttgaaatagggttttatagagtttcagggcctttatttggccatttaatcgattagtgtatacatgatgcgttcttcaagtgtgagataaaaattaagtttataagtattttgattttgattcccaaattatcattatttgaattctcctatagttttttttttttttgttaaaaagttttctgaagttgttgttggttgttgattaag

SEQ ID NO: 26890 - DNA, 935 bp, Glycine max
  Intron number 1 from transcript Glyma19g40790.1 (locus Gly ma19g40790) derived from phytozome v7.0 (chr-ID Gm19; pos 47103355 to 47104289)
ggttgcgtacggaccctgcttgcaccgggaggtgtgttccacgtgcgtcgctcgtctccgtttcatctgcgacgatcgcctttgctgcatctgcaagaccgaatgcaaccttgttttcgccaccaaggtatacgcaatgcccaatcctctgtttaccctaatttttttatatttgtttttgttaataatcggtgagatgaaattgttttgcatatgttgccctaaacgtgtggagtctttgctaattgctatacattgcaatctgaattggttgagttaaaatgttaacgtgccacacattgacgcttactgttgtattcgattatgacatgtgtattttatcattatgaattagaagaatcgttcgcatcttttagctctagtttgaagttgtgctgagttattctagggtagaatttgtccctaatttgaatcatgttgtgaattttctactactaagattactgtcacttgtccttgggcagcttatttttcctgcattttgggacaagaaattttaacatggattgcatattttcttcttcttcttcattaacttgtttgtaatgcatccagaattgtatatgcttatatagtgatataagcttgggcagcttatatcacaatataacttttttttttttattactgtcacttgtccttgggcagcttatatcacaatataagtgtttttttatccttattgtcatttctaaactactgaatttatccattcatgacttggtaaacttacttggtttggaaaccatagttttaattcagaattgtagcctgtaaccctgtcacgtttgcttaaaaccttggcagtagggcttcttttgttaattttacattgttgtaattggttttctctttcaatgttgttgatatacaattttactgtatactgccaggctctaggtgattatacaagg

SEQ ID NO: 26891 - DNA, 919 bp, Glycine max
  Intron number 1 from transcript Glyma19g18800.1 (locus Gly ma19g18800) derived from phytozome v7.0 (chr-ID Gm19; pos 22832946 to 22833864)
aaaaccaaactcaaattttaaagaggagcgagaaggtgtggaatgattgtagttctcatttaatcaaccttcattagtctaggtcttataatttattacaagaggttgtgaatgcgtgtatagaatgaaagggttttacctaccaaacaaatttaaaacaattcacatgtattctaaaatcatatgtgatacaactattcatctatacatttctcacatttagagtatattggacctatatgtcactttttcgcgaactacagaaaacattaaacttaacatcagataatatccaagttttgagatacaattaggattggatcagtgttttgttcgtatgagttaatatgtttatgaacacaatactaatcgaaaatgtgcaacgaaaaaagacttaggtacacctaatagtagacaaaatcatttgattacaaaaaccaaacttaagttaacataacacatacccccccccccccctccttttttttgggaagataattttaaaaaataagaccaaaaaatttgcaactaaaattatgaataacgtttttattaaattaggtgataaaaatttatggaggtttatcttaccttggccacgtaaccttgtttataaattgcaatgtgctgtaaatttttaaattttcaattgtgtgtgtaattcaaaatttagtgaaactaaatcttgggttgtgtgtgatgataattattagtggcaaaatgggattaatttatattagaccacgcagttcaaggtgttgtagtctttagatcggtgatccatgtcaagtacactcattaattttcttcttagctcatcctaataactgggtcgtttctatggggtgagggtgaaatgtggtgggagaaatcatgatccctataggtaaagtgtaacatcccaatttcttttgattga

SEQ ID NO: 26892 - DNA, 580 bp, Glycine max
  Intron number 3 from transcript Glyma18g01110.1 (locus Gly ma18g01110) derived from phytozome v7.0 (chr-ID Gm18; pos 563441 to 564020)
aggccagaggcgctgacctcagagttcattttaaggtacttagatttgttaccatttgatgatcttctgtgtggtgatgtactagaccattatgtgtaatatgcctaaccctaatttttagaattgaatgtgatgtgttttttaatatgcatttttgcattgtccataattgggaaacctgatgaaaaaagcaggggtttgttttgattatgtggacttccctctcgtaaacttcagtgatataattttccattgttattgggtgaacctctgttctttggctgtgattgaaggttcagtaaatgatggaacacgcttttccactatatgctagtaataatgatggttaacttggttaactcgattacgtataaagaaaatatacttattgttttaataactacttttattctaatccatttgaggtaatggcaccattgtttatggttaatatgttttcctctgttgttgatgaaagttttataaagatggttattggtcagtgatggagtttaaaataatttatttgtctgtctactttacagaacactagggagactgcctttgccatcaggaagtt

SEQ ID NO: 26893 - DNA, 899 bp, Glycine max
  Intron number 1 from transcript Glyma17g35030.1 (locus Gly ma17g35030) derived from phytozome v7.0 (chr-ID Gm17; pos 38984015 to 38984913)
gttctgtcattgaatcccatttcagggagggtcttgtaagtatctactattttattgtattaacggatgcactttttttccccctgctgcctaatctattatctacttgttgacattgccttaaattggttatacaatttttatcgggactgtttctatcataactgataagaggttgaatctccatgtccttgaggagcatagaagttagaacacatgataagaataaagattaagagccatgtctttaaggttagcatgtgataataatattgtaggttcaaatctttacaaggccacctactcaccctcacccctcacccctcacccctcacccctcacccctcacccaccagcctaccttggtgcttacacctccaataaagcaggaaaaaaggaggaataaataacagaaacagtttgtctcctacaaaatattgtgcttgaacttggcctttgtatctaagtaactaaattttcttaaaatttttgtgattcacagattacttttcatattcaagttatactttaatttaaaccttaaaataagggcttggtttgtttttgaattacaattattgtaattcccttacatcatcctgcaagaaggtcataaagttcaattgggtagtcctggaagtgcctagaggaacctatttagcaaggaagtgcatgctgttgtatagatggtgtttttgaatattctgttggcatactacacattctaaagtccaagggagatgctcataaaattctaattactttgcaagttggaataagtagcagaattgcaggatctacattttctgtgtttgataatttttaatggtctgatatatatatgttgattgagaagtgtacttacaggctttgttgataatttcctattctaggtgcaa

SEQ ID NO: 26894 - DNA, 487 bp, Glycine max
  Intron number 1 from transcript Glyma19g34890.1 (locus Gly ma19g34890) derived from phytozome v7.0 (chr-ID Gm19; pos 42485201 to 42485687)
tttttcagtgagtgagaccacttgcataagcttctctcacttatacatagatttgattttgtagctgtagctttcattttttttttaccatcattctgttaaaaccagtttttccttctttgtttttaaattattaattattaattaatgtgtgtttgattcaacagtgatgtttctattatgagggatgtactgcaggttccacaaagagctaataatgtttcagacatgcttattctattggtgttttttttttcaagtgcttttttttaaactttctttgcaattcttgtttcgtggttctaacttccaagtcagataggttcctcactgtggcatgagtgagtgaactttggataagtaagtgttgtgtgaagattttgtatgagtacttgagcttctttgccttgtcagcttttgatttttgatgttgtggtgtggcagtggaagtcatactaaaaaaggtgattcttttgcagtggcaagc

SEQ ID NO: 26895 - DNA, 566 bp, Glycine max
  Intron number 1 from transcript Glyma17g36820.1 (locus Gly ma17g36820) derived from phytozome v7.0 (chr-ID Gm17; pos 40745673 to 40746238)
cttcttccatcgtaagcttccttaatttccattctcacccttcattcatatatacgttttaatttacatgtcaattcgttgatatgtttacttattaacgttaattaattaatttgcgagacttaattgcctgcagtaaatgagtaaattatacgtacctaattataactaggacaaaacttgtgtgtgttttgttaatggtttaatttttgcgttcagaattaaaattccctcttgtttcggtgttgttgtctaatcaaatgcaagttccatctcttacctagttacctatagtaataatgtctttaactgagcctaattaataattagtgataagaaactctaactttgattattggagtacaatgccaatgagtacaaaagaacaacatatgagttttgttccttataatacccatagattgatggttgttttctgattagttgaaatcttgatttgataagcttagcacaggaatgttgtatgttatttgtgtgtttcatttatcacatttgttattcggtgtgcaggaagcttcaagtgccaaatatatagtgcagcagta

SEQ ID NO: 26896 - DNA, 572 bp, Glycine max
  Intron number 2 from transcript Glyma18g06850.1 (locus Gly ma18g06850) derived from phytozome v7.0 (chr-ID Gm18; pos 5526160 to 5526731 reverse strand)
tcagaggggaaccactctcaaccttcagatttttggtcagtgtgaacatattaatttcttcttagcaatcataatgtttattttacccacttcacatttttttaaacaattcttattttccattgagattctagatttaggccatgatgttgtcaattaattaacttgcccctatttttattttctgggcaaagtttttcaatttttggtttagggaaaaggaaagtaagcacagtggttctgcagcagcagaacagtatgtgttgtgtgcctctttgttataagcttcattcaaaatcagagggagtaggttcaggatattttcaataggacaaagtatctgtttgcaaaaggtggtgtgagggggacccaaatgtactattaagccattatgttttgggctagtagatgcaaactggaacactaaattatgctcatgcttttgtttgtataaagtagacttgtataaaagcagaattttacagctgcaaaaagattaagatggtccttaattgggttttgatatggtatgtgcaggactacggtgtgaccatttcattttacagggctcc

SEQ ID NO: 26897 - DNA, 442 bp, Glycine max
  Intron number 1 from transcript Glyma18g06850.1 (locus Gly ma18g06850) derived from phytozome v7.0 (chr-ID Gm18; pos 5526864 to 5527305 reverse strand)
gagacccctcaactgtgacctcccaaggtaccccaaaagctcaaaacaaggacttttctcataaagattacatttttgttgttttcaaagacattgcaattttcttcagaaaatggggtgtgtggttttggtttttagaaactgtttttttgttttttgtttttaagaggcaactaaaacaaggtttttcaaatagctgatatagggtgatgtaagacactgagaaaatatttcctagttgtctatgttttttggttttgaaaacacttgttttagaaataatatttttcaaaatttatttgattttgtatgagaaattgattgttgaatagtttggaattgtttaagaaacagtttttaaaactaatagaatagaagtgaatgaaaaaagacctcagtatatgcctctaaatggttttgtagcatgttcttggtaggttca

SEQ ID NO: 26898 - DNA, 493 bp, Glycine max
  Intron number 2 from transcript Glyma20g26230.1 (locus Gly ma20g26230) derived from phytozome v7.0 (chr-ID Gm20; pos 35736661 to 35737153)
tcaggttgttatctcttccttaattacactctcatttttgtctccaatttttcaagtaaaaatatgaaaataaaccttattttcatagataaaaatcagcatagaagaaaacatatatacagtttcttaaatactttagttatgttctctaatcaaaattagagttttacctgataacctatattgatatttaatgtaaacatttattgagcaaattatcaatgaaactctaattctgatagcagaacctcaccaacaacagtcgacagactatgtctaagttttgtcctatataataaaacattttttggtatagtttgctaatttgctctacgaaaccgttcaaattctcaaaggacatcatgcaaatgttgttggtaactagagaaaatcaacaaagaacttattatagttaactaagtttgaaccttataaaccatatgaaaaaatgaatccaggtgtgaaacaagtagaggtgaatagaaagcaaagc

SEQ ID NO: 26899 - DNA, 555 bp, Glycine max
  Intron number 1 from transcript Glyma18g03780.1 (locus Gly ma18g03780) derived from phytozome v7.0 (chr-ID Gm18; pos 2590281 to 2590835)
gaaagcctccctctttgtcctcagtaagataccttcacataggtttagttttgtgtatcaacattttatttcaagctagcttgcaactgcggttacagaaagtaaaaataaaaaataaaaaaacaaaaaaatcatttcaacactgcttcatagttcatttatagctttatcttcatcataaattaataaattgtgttcaagcatgtaaaaaaaaaagctgcacctactggaagatttagatttttattggccacccatatgaacaattcaaggggaaaattagtaaccagttttcagcaaaaagagtgttaacatacactgatatacggtaacagccaaaagagtcaaagctaaggtgcattccaaaactagagaaaaatataatttcctctgtacagttttaggaattttttcatatatatttattggttattggttgtagtcataaaaatgtgttataaacatgtttgattaatatgagcacaatataacttggggattccgtttcattttggaacagcaattgaacttagtgaaagagtaagctactttggg

SEQ ID NO: 26900 - DNA, 439 bp, Glycine max
  Intron number 1 from transcript Glyma20g31520.1 (locus Gly ma20g31520) derived from phytozome v7.0 (chr-ID Gm20; pos 40145003 to 40145441)
gagactggtttggtgggctgcgaaaaaaaaaaaaggttttgagaggagaaggagaaaaacgaaaatgaggccaaaaggaggcaactgacttaacataactatttatacctaggttattcagcctattatttgctctatatttatttatttattactaaaaagctttttaaatttatttacgaaaaattgggatattacacttaacatccttccaagagataactccttctgccatcataaaaatacagttgaaagtagatttttggtcgtcaaagaaacctgcataattagaatcaaaataactaatgacctgaagttggtgttacacaaaatattcccttggccatttaacgtatctattttgtatttagtatgagtttatgacttaccttgtttcttctcaggacaaacgtttagtgatatagttggaacttgctac

SEQ ID NO: 26901 - DNA, 709 bp, Glycine max
  Intron number 3 from transcript Glyma20g31520.1 (locus Gly ma20g31520) derived from phytozome v7.0 (chr-ID Gm20; pos 40145828 to 40146536)
aagtcttatgtgagtttcttgagtactagttgtaactgaactttcatgtgctattggtgtatgccagctcactatggtttcatagctttgtagaagatctaacgcctgcagagtcttatatcatcaggtcacccttggattgttgatgatagtgttgctcctgacaaacctctggaccctgctgttttgacacgcctaaagcatttctcaactatgaataaacttcagaagatggcattacgtgtatgtttagttatcattgtatgccttactgttttttgtttgatttcaatgatgatattgattttttctgaagatttatatatacaacttgttgaatgagatgatctcataactttgtatggcataaaagttgcatgtgccctttttcggaagggacatctaaatctggatgtcatgtcagttagttatttatttgaaattatatttagagaattgccagtttctatgaatccatttctttcttgtattagatctttctgcttttgctggatattttattttttatcctttgtaagatttttgttcgttccagttaatgatgattaaatcagctgtatggtctcttcgtttcagcatacccattcatatcaattttgtatagtttttatgcttaatggattttttaacttaaaaaattcttcagatcatagcagaaagactttcagaggaagaaataggtggacta

SEQ ID NO: 26902 - DNA, 479 bp, Glycine max
  Intron number 3 from transcript Glyma20g19600.1 (locus Gly ma20g19600) derived from phytozome v7.0 (chr-ID Gm20; pos 27664084 to 27664562)
cagggagtcaacaagttggtaacaaatgtccaccaaagagggaaatggaagatatattgttcttaaaagaagataattagcgatccaattgttaaaagtatttgtttatgatattcacttaaacaggtgctaacaaaatatgaaaaatttattattatataacattaagtaaaaaacataattaaaagttattagaaaataggataggtgataaaagtgtatttaacataatatttttgagttaacagtataatttatttcccgatgaaaattcagctgtagttagtttgtatataattgtttaagttcaagtgtgtttggaaagtgggatggtttggttgagctgagtttggaaagttaatttgagaggaggtgggtctcgatgcctcttagtatggcatgtttggattagctttataatgaaatttattaattaattttttaacagtggaaataaaataatttttttattagttttg

SEQ ID NO: 26903 - DNA, 706 bp, Glycine max
  Intron number 2 from transcript Glyma17g07890.1 (locus Gly ma17g07890) derived from phytozome v7.0 (chr-ID Gm17; pos 5830463 to 5831168)
ttgatattcatccgtcgcgaaagcatacttgcctggtaagatgcctatatttcacttgtcatatctaagtttgctatatccagttattttgtgaacaagataacaaacacatgccactttgtgaatgttcttgtaaggagctgggagcataattgtgtttagattttagttttactccattaatggttgacaaggttttaaattctgtttgtgtgaaattgtggacaattgcggttgcaggcacccaaaaaagcttgacaatgttgctgatatctgatggctgcagctggtttttttaaaaccttgatggttgatgctgcaacttgatgaagtgttttgtgatattgatgcttgctcttctttatgttcagcagtagactgctagttgaaaatatgaatgtggcataatgccagcacaactaacatggctactcctatgatgtgcttaatttgtgatttaacaaaattttaggccagtttaatgacattgccagagctgttagctgtttttcacttatgcattaacaactgctttgacatcagtactggatgaatgattattgattttcttttgtaagacttgaataaatcaaactggtggtttgatgatgctttgtgctttttcttgtatgctgctgctgctgatgttcctgtgattattacatactcaggctggtggttccttaggtactgtttttgcctggga

SEQ ID NO: 26904 - DNA, 1035 bp, Glycine max
  Intron number 2 from transcript Glyma20g35180.1 (locus Gly ma20g35180) derived from phytozome v7.0 (chr-ID Gm20; pos 43457192 to 43458226 reverse strand)
ttgggaaacaggtatattcactgatcatttccttccttgaacccatatgacattaatcatgctaattaacttatcatcaaaaaagctttacaagacaaagcatcatgcatatatgccacccatccaattcctggtttacacgtgatgctgttaatgattttttttttttaatttgctgaaattatatgaatgtgcggttgtgtttcttaagtttcccttttccttgatagataatactaaacagtaaacaagattgaagtggtagggaccaggggcaataattgtcaacttggaagaaaattaaaatgaaaaggttgtgttattgaatatttattctataatggggactccagtgttgcacgagaaaatcgaggtatgatcctccacctttgacggtgcaagttatcatacaaagagtgcaggagaaataattatgctgatatgctgctataacaaattatgtgcatcaagaaaataccagtgtgtcattaattaatctataaaacatcagaaccaataaataaaaaattaaagatattgctaaccagtacccttaacacattaattaaggaattaaaataaaaaaatatttatggtgtaaatcataggagaacttaaaaaagatcatggactatgcaatgttctacctctccagtaaaaacatttttactttgtttcttaaccaatatcctataaaaacttgttagtgtttaaaaaaataaataaaaggtggggtcgcgaatctccgatcaattagaatttagatctgccttgatgcttgcacgaaacatggtgtggcagtttatggcacatgcaactacaacatgtgttagacgtacataccaatatgagcatgggattcactgtccctgtaatcttcaattaagacaacatcgatgcttgttgttttctgacccgctagaattaaacaatgggaacgcgaatctcgcgcaattatttcattaatataataattaaccattttgatccttattttcaggtggtcagcaattgcagccaaattgccaggaagaa

SEQ ID NO: 26905 - DNA, 520 bp, Glycine max
  Intron number 3 from transcript Glyma19g32010.1 (locus Gly ma19g32010) derived from phytozome v7.0 (chr-ID Gm19; pos 39804653 to 39805172 reverse strand)
ggagattcttacatcatcttgcaggtgtgagctgtatccaatattacctcatatgtgtttatacattgctaaactttgtgactgtatgaagacactagaggctgaatgctgtggaaacagtttatgtttttctgtttgggctgtgaacaataaaattgcattttagtccttgtgagattgaaacaaacaatataatgccaattatggtattgaaattctagatcaaagaacatacacagtataatagagaaagtgacttctatccacatagatctcaaaagggtgactaatttcaacttataattctaggtgaacagcacagcttgtatgatatatataataagataaataaggaaacccttaagtctttagcagaacccctactcttacaaatgatagtcttcaataaaattccaatattgagtggagatatatatttctactttttgttttaaaagtattgggtgttgatttcaagtttatttgcagacaacacaaggcaaaggaggtgcttatttgt

SEQ ID NO: 26906 - DNA, 773 bp, Glycine max
  Intron number 2 from transcript Glyma20g35860.1 (locus Gly ma20g35860) derived from phytozome v7.0 (chr-ID Gm20; pos 44068887 to 44069659 reverse strand)
ctgctctcttgttgaggcttgtcactaacaacgtatatatgctacatcaaatcccactttttcctcttactccctttcttatcagagaaattattacatgatacataatttataagtgtagttaatttctttttataaaattcattttcttttatgtatatgaaccatggtctagaacatagacgctgctagtttaagattatgtggtaactcctctcatccatgtatcaatagtaatatagtatagatatgatgatgatcgactctgagcggagcctgtgccttcaactaactataaattctgatagccaataaaaaaaacattttgatacattcagtacaagggaagaattaatttttgaagttactcaggatgtgtttggatatgcgttggatccactttgaactgtaatatgtctatgcgaccatgttgtaggtacctttaatctaaaaggttattggagttttcaactacttttcaaacacacttaaattctatcttaaaccaattttacccgtccattttaacttcaatgtagataatctttttaagattccaaaatttataggttaaggctgattataaacaattatctttggtttgattggttttatgtaaattaatgatgaaaacagcatctcttgtgtgtgtgtggtaatttgactaacttacttctttatggaaaacgaaaatatgagaaatcagatcactgagtaaattgtggttaactgttacagagaccacaggggttcagtgtgtcaatcgggcttgg

SEQ ID NO: 26907 - DNA, 481 bp, Glycine max
  Intron number 1 from transcript Glyma20g01180.1 (locus Gly ma20g01180) derived from phytozome v7.0 (chr-ID Gm20; pos 814928 to 815408)
tttcttctcaaacccatcaatctacggatctctcagtaagtgggtgtttcattgtttttcttttaagtttctctgtttttcaaagttgagcttttctgcctctgctgaatgcaactatgattgatttctaatcttcaagagcttaattatgttgtcctgtttatgtcagtacataaatttgatcccttgttaactagttcattaaataacacatggacccacaaaatttggtgatttctagtaaatttcaacagataaaagagtgtattgatgcattcaatttagtgtatattttgtgatttgtaataaatttcaacagataaagagagagtgtattaaaaatagtgtgttactagcatttcttaattgaggattaaatttattcataatattctgagtctgtccttcactttctgaagcatatgtggaaatgttttaccccttttttaaggtcttttcccacttcttgttaggcttcatt

SEQ ID NO: 26908 - DNA, 724 bp, Glycine max
  Intron number 3 from transcript Glyma17g09130.1 (locus Gly ma17g09130) derived from phytozome v7.0 (chr-ID Gm17; pos 6764082 to 6764805 reverse strand)
ccaaacaccgtatgttatgttatactctaattgcttcttaactcatctcgtttttgtgttgtgttgtcttcataacctatctgctttacctaacttatcactgttactgtgtcttaagcattgttggtgtgatatttttatttttttgatcaggcaaatgttagcaattattatgttatgctagtggtggaattcaaagccatgaccagtatcgcctcaacccctatgttagttgttgatgttgacctttatagcatttgtgttcgagatattgcaatagacgatgatgaaattcctgtcagatttatacggtgccaggacacaggacctctgtgactttgttattatagtattaataacttaatatgatcaaggatcctatatgccttctttgagattgatgtatgaaattaatattatatgcaccatagaggagtaggatgctgagaagatgacataactacttatgcggcattgactatggtggatgtctcttttgaagtgcataccaaaaaaccagacttctaaatcctaaatgcatgatacataggaaagatatcataatgctcaagaaacttgttctgtattatttcatgctgttttgacgcataatttttttctctctcttgccaagtatatatgcaatttaatatgacaagtatatgttttagttgagaaatattgtttccttagttgattatttgaccttggaagaacttccagg

SEQ ID NO: 26909 - DNA, 777 bp, Glycine max
  Intron number 2 from transcript Glyma17g35890.1 (locus Gly ma17g35890) derived from phytozome v7.0 (chr-ID Gm17; pos 39877082 to 39877858 reverse strand)
ttaggaagagtggtactgcgaatatttttatcaaggtgcgcactttttgttgtatttttacgttgaaaaagaaaaatgactacttgatggtgtgaattgtcgacttagttgatggaattcgtcaataaacttgtttgtgttcgcttcttagtccttaaatttgcccaatttgtaatttgtaataagctagaaggactaaagttttaaatttagggatgttttgcctattttgataacattagctcttatggcatataactaagaccaactaaaagtagaaagtatttattgggaaagtaaaaatttattacatttttctattttcaacgtaataaaatggtttctttattatttttctaataataatcttttttatttaattgcttaaaagtcagacgtaaggatgaggttaacaatgaagaaacctgtattttaatttagcttaattggaaagtagttctatgactaagggtggtgggtcttttgttttaagaaaagtgaaagtataaaatgcaatagaaaccaataaaaagttttgatttctatataaaatttttagatcaggaaacagtgaaaacaaggtggcatttttgtaaacctaaaacgaacaataaaccaatcaatcctttagttttctatttgcttattttttttagagtagtggctaggcaatgaagttcttttttgttgttgcctgttgtttatatagaatctcatgtttctaatgatattggtggtgcagaatttggataaggctattgaccacaaggccttaca

SEQ ID NO: 26910 - DNA, 858 bp, Glycine max
  Intron number 1 from transcript Glyma18g16060.1 (locus Gly ma18g16060) derived from phytozome v7.0 (chr-ID Gm18; pos 16300331 to 16301188)
agtagaagcagctcacagttccagaaccccttctggtacttttttttttgttttgtttctttttgcttttctgtcagcaattctttatttgtcaatgcaacaatattgtttctaagattctaaattgtgatcggggtcgcgatttcatcgtgatcctttaacataatagaaaattgcagattaatacggccgatgtagccataattgtaattgtgataccgttgcggtcgtgacggaaagcatggttgtgaatatttttaaaaaactagtgtttctatgttttgaatgggtgtacgtgatgtgcctaggtgcatgtttgactttgtcatttgtaaatattgcttcttttttttttttcaaccaaggattttaaagctatgggtttgatggtgttgtagattgtgaattcttggtgggttttttaagctttcttgtctcctttttgtttttggatgctgcaagcttggtttgttctggttggtgaattacttgatagcattcaatccattaaccttgtagttaacctaagttagtgaaaacttatacaatgctcgagtttggactataactaaactaagtaacgctttggctcttttcttgtagtccttttagatgtgaaaagagcagggaaaactgaaaagcataggagtcctaataagtgataatgaaaagttttgttgtaacatataaagtatttgttcaaaatttgcctaaatgggttgagtgtagttggttgagttttaaggttacattgacatgttccttcctttgtgaaattctagcatatgtgggactaactcttttcctctcttgcctgcatcaggaatttcaaaaactagtccttcatctgttccttcc

SEQ ID NO: 26911 - DNA, 418 bp, Glycine max
  Intron number 3 from transcript Glyma19g16000.1 (locus Gly ma19g16000) derived from phytozome v7.0 (chr-ID Gm19; pos 19282594 to 19283011 reverse strand)
agtgaactgtctttggcagatcgtgccaccatagcaaacatggaaaatagttgtgtttggattctgattatttctcatgctaccacctataaaaacaaaatgttgggatatattgaagactattttttccatattctctttattgtaggattttggtggctgttttgatagtatgtgagagggttggtgatacttttatatttagaataattttaattttacatgcaatgaaaaaaaaattcatgctgtgattcaaatttgtcttctgaatcaagttttttgattttaattttgcaagttaatttagaataccttggtagagttgtgttcaacataaatgtcgggaactgattctcacacaactatgattgatggccttggtgttgctggatggggagttggtggaatagaagctaca

SEQ ID NO: 26912 - DNA, 746 bp, Glycine max
  Intron number 2 from transcript Glyma20g02550.2 (locus Gly ma20g02550) derived from phytozome v7.0 (chr-ID Gm20; pos 2135562 to 2136307 reverse strand)
ttttctagtcttatctccaatttgcagcattccaggttagtactactccttatccatgtcctctttttaaaatactaaaatgcccctgcttttgattcaaatgacatgactgccaacatgcaatccacctactcttgttttatacgtctagacaaaacaattcaaaaaaattacaaaattaatttatttgatgatatatgaatcatatgagaacttcacatcaatcaagaatcaaatcttcaatgcatgattcttcttggaagatacgtcttatggaagaaagaatatgaaaaaaatactaataacacactttttgatattttttttaaacacatactttattattagattgattgaaaaatacattttttggtggtcccattttagtaaataatcaatcatacactatcatctacaataagtttttagcttaaaagtcatactaagaaattctgatttatgaactgaaaatgtatggcatctcatgcttgccaaatatttgtgtgtgccaattggctaaaatctgtttacagttattggatcaacttagttgtttcctctgatgtatcttgtttcactcatcttaaatgtaagagaagaaagtgtactctacaaaagaactagcacttctggatttgtaagctattctaaaggtaatctttacaagaaagaaacatgaagttttcatgttaagcttattctactctacagtttcaagtgctcaaaccgtagatattcagagagga

SEQ ID NO: 26913 - DNA, 594 bp, Glycine max
  Intron number 1 from transcript Glyma18g10300.1 (locus Gly ma18g10300) derived from phytozome v7.0 (chr-ID Gm18; pos 9170627 to 9171220 reverse strand)
gccctctaggccacttctctacaaccccattaaggtattttatatatccttcacttttgttgtctctttgcttgtgcttaatttaatttttaaaacttttttcaccaagttctatgacaattttctactctttttttttttgtttccttcttctttaaggaactcgctgtgaattttattttcttgtttaagatgggaaagttaagttggagaaagcaaatgttgggttttgattattttgaatttcactttgtttttggttcaatttgagtgttagagtacttggtgggtgcttgaggatgaagagtacatgtataaaaggaatttttattttattttagtttgcatgatcctctggttgggggtagaaattaagggctgaaaagtggatcaaattatcaaagcccatgaaaaataaatcatgcaatctctactcaaattgggtttgttacaaaaagtaatcaatcatgcaaaatgtttagttcgatgtaattggtgacatttgaaactgcttattaaagtggtcaagaaatgcagtgattgattttgattaattacttgttaaatgaatatatgaacatgcatgttagaatt

SEQ ID NO: 26914 - DNA, 496 bp, Glycine max
  Intron number 2 from transcript Glyma18g16160.1 (locus Gly ma18g16160) derived from phytozome v7.0 (chr-ID Gm18; pos 16495546 to 16496041 reverse strand)
ctactttgtggtggaattggagaaatcgatctggggtatctgctaaaaatcccaactttgtgattgtgtgaagaatgttttaatgggtgtttggaaactcttgatcttctgttttcttgttctgggcttttaaaaagcttgaattagcatgtccccactttgttgttttagtttgtggatgaaatgaatccttttttaactcactgatgcttataaggttgttcagttttgattttatggaaaattctggagttttctcatatagtggcgtgataattgttaagctttgagaatgcaaatttagctctattgtctctttgtttgcattcgctgaacctttgatgtattatctgatatgttatcgaagattttcttgtttactaacttactctccctttatatctcaattttttatgtgtgcacgtgagctgatgagcatgccaatgactgattactattgtttgaattttacttgattgagatataggaggtgaag

SEQ ID NO: 26915 - DNA, 801 bp, Glycine max
  Intron number 1 from transcript Glyma17g16350.1 (locus Gly ma17g16350) derived from phytozome v7.0 (chr-ID Gm17; pos 12999362 to 13000162)
tcactcaccttgctgctttgatttggatcttgaaggtgaaatagtagtataaatgactttttgagcattcttttctttctgggtcgtttctcaaatgatattttcatgctgctgttgcttctttttttttgtcaacgtataagcattttatttggttgtgttattgttattatcatctttattatcattgctaaagtagttggatttagtttgcaacctttcagcttgatttgttcatcgtttgagcttgttcacatttgcactgaaaagattcaattttcatgagcttttctttttggtggatgcaattttagatcttcagctgatccagctaaaacagttgagatttggggttgggggagtgttgtgccatgcaatacaattatactaatgagattgtttgaaagtgggtattggattctatgaagatcagacaatgtgacaccaaaaactctgtttttaaaagtttctttttcttcgtgtaaaatcattatcaaatcacatgttagtgttagatccgcttgcatgttcgtgagaagaaaaaataaaacaaagttcggatgaaactatggttgaaagagagttaagctcgtttattataaggtcttctcctgctagaaattgtgcccccaaactaccttatagattctaaatcagtactagtacctttttttgttaacatataataaattctgtgtacttagataattattactactttattaattttggtagtttgcttgattttgagcctcattagtttcagtgtacactgccataggtttgagagggtactgccat

SEQ ID NO: 26916 - DNA, 755 bp, Glycine max
  Intron number 1 from transcript Glyma17g07000.1 (locus Gly ma17g07000) derived from phytozome v7.0 (chr-ID Gm17; pos 5059767 to 5060521 reverse strand)
atttacttgggtaatcatattgatacttttccagcttcttagctgacatcatgtatccatttaaaaaaatttgcttcttttttccctctgtcttggaatgtcttctatgttttacacttactacacatgcaaattattaatacgtaacagggttctagaatattgtatgtagtcatttgttgtttacaaaatgcatcaaaagactttcaaaatagataagaatgtgaaaaagtcaactgagttgtctcagaatactcttcatgctaaagttaatattgtccttcttcacgtaatagtctttttagaattttcatgactaattaaatatcagttagcataattgtggtttaactttatgaaatgagtcaacaataatcctcatgaccaagttttttttttttttttttttttttttaaatatccgccccccctcctcttttgctgagtttgtagagctttattctatttgctttaaacatgcataggactgatatttcaagatgaatcttaggtattatcagttttgtaaaagagagattgattatttgttgaatgctatttttgattgcttagctatggtaagaccctctactcaacattacggctaagatattgtaattgttcaatcaaaagatggtaaagttgttcttttaatgtgtgtgtggtgtatgtgccatattccttttagtatgaaattttggaaatatgtaaggtaagatcaatctcatctgggtttgtttcgttaaatgtattag

SEQ ID NO: 26917 - DNA, 928 bp, Glycine max
  Intron number 1 from transcript Glyma20g28130.1 (locus Gly ma20g28130) derived from phytozome v7.0 (chr-ID Gm20; pos 37097729 to 37098656 reverse strand)
agagctaataatcctcagatcaacgaaaaaaagaggtgcccttttcccttttctcatttgtagggtttttgtttctcactttgcagtttgtcaaacttgtctctctttatttccgtttgacctgttcccagtttcttccgctttatccaaaggtttttaaattcgtgtttaaagtttgtatcgttgcgtagtgttagatctgttgcatttcgagcttaaagctaagatttttatttggatgggtttgatttgtgggtgaaccaaactaaattgattgtgggttatttattactgtctacggttttgtgagtgttctcttctcttccgtggaaacaacgtcgtacgtacattatggtatgttttgccacgtttcctttataaactccctaacccttttcatttttcatcatgctttcaagttttgattagtttcattaacatgatatgattgaaatggaaagaaaacatgtcctactttattattgcaatcaatgttgcgtatatatgatatttgttatagcaattatttcttggaggggatttcttttgcttctgctcctaatctcctattaactaacctgttttgcaaaacatattttttttatccattcaaaactcatatttgtgttatcctgaacagtcagagtgtgggaccttcaataatgatgacattaactggtgacttaactagtatatctcttcacttgcattttcagtttgacatcttcagtgtgtaagggcttgaaaaatgttttactctgtctctgaaaatggctgataccatattgaagatatgcatccatgaatgactttgccttacaattgttttctctaacaagtctgcatgaactattttttactcttgttatgtatcccaacatattccatttatataattgcacttgcagttcttgtaggtttcattgtc

SEQ ID NO: 26918 - DNA, 463 bp, Glycine max
  Intron number 2 from transcript Glyma18g01340.1 (locus Gly ma18g01340) derived from phytozome v7.0 (chr-ID Gm18; pos 702467 to 702929)
gatctttcatatatgtatacaagttgttggtttggacttcatttgatttttcattgttcagattcaatgtttccttgatcgaaatacaattccatatgtaaattattgttagacatgtagctatatatatgtttaattgctgcaccataatttttgaaaacttgcataattcttttctttggatctattcctcatattattgttttagggtggatgaaacaatttaatgatatctagatctactttatgttattttttaatcatcaacaatagaactatttgaatcaatgcatcaaaaaatgtattaggaacgaagattgaaattgaagctaggtacatagtgcaaaaatatttgcttattttggaactggtctgatctgcgattattgaatttgattatgctctcagggtgaccaaacagaacagagctgcaggaattcttgagaattttgcagagggagag

SEQ ID NO: 26919 - DNA, 557 bp, Glycine max
  Intron number 1 from transcript Glyma18g31780.1 (locus Gly ma18g31780) derived from phytozome v7.0 (chr-ID Gm18; pos 36975716 to 36976272 reverse strand)
caaggaagttgcaggattgccaattgatttgaaaggtttacttccttttccatgaatccttcatgtctattctgcttttaattacatatttatttttaggatgtccaaacatcatatactgtgtttttatttaatctttactgtaatcttctttttttttttactttatgatttgaagtatatatgcccttaatgaaccttcccatggttatctgaagtaatgccaaaatagcctcttttccctattcaagagtttactcattcccaaatctgctttgctgaagttggtttactagactagataaagtgtaagaagcattgcctgttagactgtatctataaacagtttaaaggagtcctttgcatctgtagcatctgtatgataatataacaactcaatgataatgtcttgagtatttacttttttctcataaatttgttattgccaagtgtaccttttttcttaactgtccttttttatatctttgatttgttgtggcattccactgaatgtatgtgatgcgcaggtaaaagggctttcattgctggtgtggctg

SEQ ID NO: 26920 - DNA, 702 bp, Glycine max
  Intron number 1 from transcript Glyma18g45750.1 (locus Gly ma18g45750) derived from phytozome v7.0 (chr-ID Gm18; pos 55455852 to 55456553 reverse strand)
cctcctcttctttttcttcgcatcgccccttcacggtctcattctctctcattatctcaaatctcacttcttttcaaatatttagttttgttttttgtgatgggacatccacgtagtgtgtaaaatataaatcagatttgtttgagctgtgtgatgttttcccctttacaggaattctagattacatacacgcttggattctcgtttttgtttcttagggtctttcaaattgtgttgaattaaaataaaatgtggtgtaatgatgttagttaattgtgattaatatgtatgtgagctttttttgttccatgcgtatgtctatgagttttaagttggtttatttacttacttcaaatgcattctgcagatcaaggtgatgactcagctgtttcgagcgaaaaggtagcctcggtttaatgtttttgttttatttgactgtataattaggatcttgtttggataaacttttcccttagcactcatagaagaagaaaataagaaggtcaaatgaattgagctttgctaaaatcaacttatgcacttaacttttttagaagttcttttcgtttgacttctccaaaagctaaggcgaataacttggttttagcttatggagaagttcaatgcattttaactttcctcattatcttatcctgtaggtgcttagggagaaatttgtccaaacagcaccaatatatatac

SEQ ID NO: 26921 - DNA, 736 bp, Glycine max
  Intron number 1 from transcript Glyma19g29390.2 (locus Gly ma19g29390) derived from phytozome v7.0 (chr-ID Gm19; pos 36959991 to 36960726 reverse strand)
cgcagaaatcgacgcctccttccacttctcagagggtgagtcattatttgcaaaaagaaacaaaaaagatttgatttttgaattcattgctaggattagttgaagatagctattagtttatttatgtttacgtaacttcagtaaaccattatttgcaaagaatatgatttttgaatttattgctaggattagttgaagatagccgttagtttattatgtttacgtagcttcaatttaatttaatttatttactgtagaattatgtaacccctaaagtttgttttaaaaatgatttttttaatgaatatgtggataaaacccagtgacaaatgtggattaagtagccactttagttcacaattcaaaaataagacttcactttagtcctttctcgaggtgagtttttgaaaggacaaaacttagatgtagttcttcaattagaattggaatttcatctcagtagttcgcacaatgtaagtttgcattaaaggtcaacaaagattatcaagggaaaacttcaactatgattagagaataaaaccaaaagcagtaattttaaatacatggactgatatgaagttgatgggagagtttgagtgctgcaatttctatttagtaacatatattctgttgcattttatgcatgtgaattatcggttgtgattattgattgtcatgtttgcatcattttacttcttcagtcgtctttgtcatcgcttggaccagcatacaacac

SEQ ID NO: 26922 - DNA, 818 bp, Glycine max
  Intron number 1 from transcript Glyma17g06960.1 (locus Gly ma17g06960) derived from phytozome v7.0 (chr-ID Gm17; pos 5021557 to 5022374)
cttcttcagaaacgccgttgccaaggtccaaaccggtgcgtactttactcttttcaactctatcttaggttattaggttccgtgtcgccaaaaacgaaatgtgccacgcatttggaaaattgaaaattaaaaataaaactaagattatttaagtaagtataagtcgtttttagattatttggattttgaattgagttgttgttggaaaagtgtgactctggtggtgattgatgacgtcttatctcgttgttatcttgatttgttatctgatatatatatatatatatatatatatatatatatatatatatatatatatatatatatatatatatatatatatatatatatatatatatatatatatatatgtctgactccaaaattattataatgtaagacttagtcttatgatctttttggttattaggattcttgttggtgttttgattactcttttgggcaaaacgcatctttttaattaaaaaaaaaaaaagatgttctatttggctgagatatatatactctcttctctttatgagctggttagttggcttggaagtaatttctagtttttgtgaagtaatgaatatattcattagttgttgtcttacatgcactttgctgttgaggctctttactgtttatagccatgaattttgtatgaaaaagtacgataaacttcacatgaaaataaatctataatttgatttcagatcctaaaatacaataggactttgattgagtttttcatcatcttgtgtattcttttgagcaaatacccattacctttccttttacagcccactcaagtttgg

SEQ ID NO: 26923 - DNA, 1016 bp, Glycine max
  Intron number 1 from transcript Glyma18g50760.1 (locus Gly ma18g50760) derived from phytozome v7.0 (chr-ID Gm18; pos 59784385 to 59785400)
tggctctgctgttttgtacttgcttcacttcaacaggttcacctcgttactatttctttttcttctttttttccttgtttatgtcttgaaaagttgaaatttttattggttttgtgttttttgtttgaggggttgttcagttttccttagacgctttactgtttccattttctggtggtattcattctatgctgcgtggaccttacgccatgttggttttttaaatgaatgcttgtgaaagatgtaacctttgttctttgaatttgataaagaaagttggttttgtcctaatgtggaaacttatttttatcatgacggttaatcttgttgatgccaattgttttaagtggaaaatatgcaaatatgctgtttaacttgttttgttgctgtaaagatttagatttttaattcttttaatgagaattgatttggcatttgaattttcgttgagtcaagtgagaagtaaaatttttttacccttcgggagtttggaatatattttatgttgaaaattgaaattatgattgcttacacgagatttgtgcctaaaaactcctgtaattggggaaaccgtgcatgagttagcagtcactgatggtgatcagttttggctgtaaatggaataatccgtgtgtaaaggtccttgcagattttagatcctggatatcttccagttccttatcattagtataggaggtgattatatttaaatggaaggaggttattagatatctttggtgtaaagattggagtcatgaatcatacatgctataagaattaaatatgtaaaaatgaagaactatatatagcttcaccagccgttgacttaaacaatatgtttgcttgtttggttccctttttagtgactacttaaacaagtctggcaattttgtatgtctcataatttctattgtgtgtagtatataatacgaatatgtagaggttcgacatttacttgtcttctttcctttctgtttacttactttccacttgctaattgtctgtttatctttcag

SEQ ID NO: 26924 - DNA, 591 bp, Glycine max
  Intron number 1 from transcript Glyma20g32530.1 (locus Gly ma20g32530) derived from phytozome v7.0 (chr-ID Gm20; pos 41146715 to 41147305 reverse strand)
cttcgatccactacgtgcctgatcctctgcttcaggcacatactcccgcaggttctacctcttctcaccctttttcctttctttctttttctttccaaaatatcccaacttttaaaaaataatgccgtgtttgccttctaagaattactgggtattgtttaatttcttccctttttccacggtcctgaataaagtttttgcttttccccaaatctcagtggatgcatccgtcttctgattgttggatctttacttgaattcgattatgggggtttctattgatgctgattgtgtttttatgaaaaaaatcttgcaatggatataacataggtctcaatttttagacatgttgaaaatttcaaactttatgacttgggtttttgtttttgtttgatgttttgaagttaatgataagatttggatgatatagctatttctgattgtttctttatggttttcatcatatttcataacttttgattttgttttattacctggaaattgatgatacccttgaaactggatattaggttaaatggcgaggatcaaacctcaggctctgctacagcaaagcaaaaggaagaagggtcc

SEQ ID NO: 26925 - DNA, 677 bp, Glycine max
  Intron number 2 from transcript Glyma20g34120.1 (locus Gly ma20g34120) derived from phytozome v7.0 (chr-ID Gm20; pos 42564943 to 42565619)
ctcgattctaagaaaataaggtccagttaagcacactttcttcttcttgtcttcttttctgccttttgcaaattgatatttaaggaaatgccatattagttactacattgttttttacctaatcgtctcttggattaagtattatctgactaaaatactcttatttatccatgttgtatgtctgggcaaagattgtgttaacaacatctagacaccaagggagtgcatgtttgattttcagatgaaagagtagttttgaggcaaaagtaattttgtcaaagtataagaatctttatttttgttttcattttgtttttatccgtttgatttacattggaattccatacaacatttcaaacttcaatccaaacatgcacaaaatgagttgataaaatcaatatatatatatatatatatatatatatatatatatatatatatattgttttactgcacatatgtcttatgacttgtgcttaaaagattttacaatgtgaagtttattttgtcaattgtgataatagcatttgttaactaacttatttgtgaaatgtgaagttgttgttccaacaataatgacgttatgatattggtggttgtgaaatgtgaacaaattactcatgttatatggccgttttttaggaggggtttgatcactaggaacacgaagtcagcag

SEQ ID NO: 26926 - DNA, 648 bp, Glycine max
  Intron number 1 from transcript Glyma19g36590.1 (locus Gly ma19g36590) derived from phytozome v7.0 (chr-ID Gm19; pos 43874015 to 43874662 reverse strand)
aattggtacgctatatattcatgccgttcttttcaacttacattatgcttttcttttcttttcctcaaaatcttccaaaactttcttattaaatttttttgatggggtcttgaatattttgcttccattttcaacttcattaatatttgtgtaaggtcactttgttcataataaaaatgacttatgtcttggtttagtttgcatatgcaaacgatgatgtctcttcatgacaggcaaaacaacctcaaaaacattctgaagctctaaaattttgcatactttttttttctcttcacgtgcttagagcttgaagtctccatttttattttatttttacctcttgagcttttggttcagtagctctgaactgaacactgtacggacttagcaatagccctcggctgagtgagctttgaggaatcattttcccttttactttcagtcaaacagtaaataatgtactctcatgggattgttttctaaagggtcattcattactcatgctttttatctcttttatattttttgagatcatacacatacacaatcatagccaccactattattgttttactatttcaaggctgattaatatttgttttttgaatggtgttggaattaaggtctcaaggaacatcgatctggtgt

SEQ ID NO: 26927 - DNA, 753 bp, Glycine max
  Intron number 4 from transcript Glyma18g00600.1 (locus Gly ma18g00600) derived from phytozome v7.0 (chr-ID Gm18; pos 244404 to 245156)
ctgaccgtctttctcaggtgtcaaatctagctctgatacaaccacatgccaatttcaatttgattgcaatcaaattcctctgttcattactgacgtgatatcatgattcaagaagacttatcatatttgaggattgtttaaggttataaagctgaagattgatatcatatagcttttccttatttctaactttgtttgcatcattaattagattcagactaagcaatataaatattctaaatataggccacttaacatggtatggaaaaagaaagcaaacgtcatgatttattaataattgagactgaaaaactgttggctgaagcatggacgatgatataatttctataattaagaacctaggatctacccttatattatttaagagttctgaacgtgaattagggatctatttcattaatgttgaattaatttctcacatattgcaatttgcaaaagtttggtcatttccgtgggtattggttaacagattgctggataaaggatatatctaacgatgtgttcggggcaccaaacatcctcccccaccccggtgcacataataattacaataaacaatgatctctttggcttcctagctaactcagctcgtgtcctttttagattttacgtgcttgtatattttgtcgaaatataaaacccattaaattaaagcttgttatattattccggtctaaactatgtagccacctctcaggtggcaatcattccaaattgtagtattttggcagc

SEQ ID NO: 26928 - DNA, 712 bp, Glycine max
  Intron number 2 from transcript Glyma19g44080.1 (locus Gly ma19g44080) derived from phytozome v7.0 (chr-ID Gm19; pos 49609585 to 49610296)
gagaaatcttatctcaatagtgataaaaaacaaatgtaaggatacttgtttgctaatgagtgttttagtttgttgttctagaaggtgaccttacctccttcccttaataaattgcgctagttagttcttaccgggctgtcaatgttacggctaaagttttctactacattgtgcatttggtatttctttaagtgctagttgtatgatttgatttaggtggataaaataatatgttgtagacaagaaagtagattgagagtacttaaaaaataagaaattaatataatgatttctgataacaaattttgaatggtcttaaagtcgacacttaaaggacattaactaaaatttgttattgttaatgtaacttctattgtgttgggccctgaaccctgatctttcccatagaattgtatgtaggcagaagcacttgttgtaccattgattcttacaatgtatgattgtgtctccatagtgaagttggcgaggatggatgatatggcatatggtcatccttaaaaggatgacttgaatttgtaacctagaaatttttgtgactagctaatttaacagcatatgggagggacagttcctttaatacaatataatataggcttgtttgtaatctgccggctgataattcttctgtatttgaactggtcctggctggtcctacatttatgcgtcaggatacttgaaaacctgaaagatt

SEQ ID NO: 26929 - DNA, 637 bp, Glycine max
  Intron number 1 from transcript Glyma17g06890.1 (locus Gly ma17g06890) derived from phytozome v7.0 (chr-ID Gm17; pos 4949027 to 4949663)
attgctttgtgagggtgtgtatattccttcttcatcactttcatggttttcttacgtacataacttagcatggtttgagttcacatatatttctttatcattattttgttaattaaaacgaaaatttatgtgtgcttaattttgcattcaggaaccttcacaaaactatataggttctatatacaattattatctattagtctatattttcagcttaaaaacatttttttagtgaagtcagactatatataattagtcaatattattagctctgagcccatcctagtggtcattgttgggtttattggccacttgttatccaaccacatacaaatatccaatcatgtaaaattcatatcccatgatgcttaattctcaacataaggattgtgtgttgaagatctcataatattagtggccaaaacaatatatataaatagaacataattataatcttatgagctagttttttagttaaactcaaagtataagaactctaatgaaattttagcatgtttatcatttagactatagagtaaacagtaggtttttaaaatgactgatgactttttttattttattgttgattattttgtatgtaaggtgataacaaatttgtttgcgcaacagggttgtg

SEQ ID NO: 26930 - DNA, 930 bp, Glycine max
  Intron number 1 from transcript Glyma18g43650.1 (locus Gly ma18g43650) derived from phytozome v7.0 (chr-ID Gm18; pos 53225937 to 53226866 reverse strand)
agtgtgaatctgcgattaacgagcagataaagtgagcacttctatatgtctcatctttcttttttgatttgttaaattagtatattttcttcttgtttttatttttatttttattatattagtatcttttgttgtttatataaacagatcaagcatttttttccacttttccaaagtatggattttaatttgttgagtgaaaaagtacttttagttttactttttaaaaaaatgttattttttttggtatataaaaaaatcatgttatgagtacatatatgatagtcattaattttatgtcttaaaaatatcaaccatttaacaactacttggattttgttctcttattgtgagtatatggatagagtaagtaatctcctttcttattttttttccatttgttcctttattgtgagtacagataaagtaagtagctttatgaacagggggtgggggtaaaatatgctttaaatagatctaaaaatggttttaattttaaaaacggtgttatgatccttgtatttcttgaaaatgtggtggattttatccctgttaagttaaaaatggagtagtctggacgaaattcagcacattcagaaccaaatttgattaaattttcagggacttaacatatattttactcttgaaaaaacaaattactattgatatttgtggacattcataatttgttgtgtgtgacaattgattttctcattaataatcaataactagaactagttagtctcggcgagttgtaatagaggagagctagatcctcccccctccccaccccacccaaattaatattaatatagcactacgagatcttactgtacaaggaaaatgaaaataaactttctttttgcatgcatggttggccctctgcttagaccttttcctcttcaattatattttacagtgtggaataca

SEQ ID NO: 26931 - DNA, 830 bp, Glycine max
  Intron number 1 from transcript Glyma18g32900.1 (locus Gly ma18g32900) derived from phytozome v7.0 (chr-ID Gm18; pos 38436856 to 38437685)
atagctacggtggaggacctgctggcttaaaggttttctatcaactctctctctctctgatgggtgtttataatatcctcatgttgctttttattgagttgtatattgtgttgagtgattattggcccaaaaggtgttttgatgccttaatcatcttttctgttttgaacttttgggtgtgttagagagaaagggaacacttcataatcatggactaaactatgacatatggggtccagtgtaatctaattagaatttgttctcctaaacaaactaaatctgatttcgtctaagaaattgtgggattatctactttgttatcaaaatttactgaattatatgatgtcccttttttatagaatgtccttggactattgttggttttgggattcctaccaactgcaaatttatatgatgtcccttttggtagttggtaagaatcccaaattttttatatgatgtccctttttttatacgaatgtgcttgttttgcctgcctatcaaatgcagtgtgttaatgatcaattatttggaagagaagagacttatacccttttcctctctttcataaactcccatcttttattgaggataagaataaacttttttgatttaaaataaactaccaaattggataaatcttcagtggcacttttgctccttgtccatgagattctttctccgcagatttatctttaactagcattatatcaaatttaaccgtatgcccttaatgttacctgagaaaaagttcaatctgacgtgggaaatgcattttattttaacttctgtgctaagaaagcatgtttataatttatacctatttcagc

SEQ ID NO: 26932 - DNA, 442 bp, Glycine max
  Intron number 2 from transcript Glyma19g05410.2 (locus Gly ma19g05410) derived from phytozome v7.0 (chr-ID Gm19; pos 5841018 to 5841459 reverse strand)
ttgttcgcctgcacgaggcatgtggtaattgctttccattttcgtaattaagggcctgtttggcttcttttctaagttgtcatccaatttcaaaacgtgatgtccagtcaagtatggaatgcgctgttatgttaagtaggagtttagaagtgtttcgggaagtacaagcaaaaccagaattatagagtttcctttttattttgattctttggacttttggagtgagggacagttctggaaatcatattttgatttttgagaatcttccttgattaaatgaaaaaggttttaaaagaagagtcatgccgactcaatatttgctctgataagtcattattaatgtttctgttgttagctgttgccactcacaagcacttctttctgttgtaaaacgcttttttcttcaggttcttgcaagccgtactaagctttatattatatt

SEQ ID NO: 26933 - DNA, 498 bp, Glycine max
  Intron number 1 from transcript Glyma17g15900.1 (locus Gly ma17g15900) derived from phytozome v7.0 (chr-ID Gm17; pos 12618940 to 12619437)
gactgctaagcaaggtactgcatagaaaataccttcttttttttgcgcataagttgttctatgatgattgttactttttattgtttctatctccactcattctctgtgaagaacttagttatattctgatatctatcttgcaatgggtattttgtcatgagaaactgggtcatatatttgcatttgtaattttgtcaagaatttagtccacacatagctttggtttggaattttccaattaatcaattatatgtaataacgaagataatcggttgttattttctcaatgatgtttccaggctcgaatgatcatacaataaaatatctgttttcttaagtttttctttcatatatttgatttttgatttgtttattttttgtttgctaatgaatttttcatattatattgtccaaatctaattcattatccatgttgtggttatggggtgatctttctttacaggaagaatttcaattggcaatcttcaaaaacaagaa

SEQ ID NO: 26934 - DNA, 745 bp, Glycine max
  Intron number 1 from transcript Glyma19g43830.1 (locus Gly ma19g43830) derived from phytozome v7.0 (chr-ID Gm19; pos 49392813 to 49393557 reverse strand)
attgttcgtaggcaacttcaacctcaccaaaggtactctcttatccattttattactatcggtgtattgtttcacactgcacatatcgaagacttgcaggcgctctgttacagcctgtgagttcaaaacttgtgcgaaatcgcatatcatcctgtttccaattcagatcttcttgatgtgcatgtcttgagggttttatgcagaatgatgaacattctctaaccaacccattaatgatttatttctatttattttgcaaagggaactatttttgcaagtgaaacttgttcctttgaggattttgtttgatatacatgctgtgcttatggacggtcttgtactgattcgttatgtcatcagcacaaaacataaacctaagctacatctaatgttgccaccatgatttttttttgtgtcccaattcatatcggaataacacttccacattgtggcaaatattataattcctttctaatatctcaatctaaataaaaactttttcgattcccattcaaggcattttgaatatgaagagtttttggtgtcacatgatatttttttctttgacaaaaatgaagttatgggtatgctttcagtttgtttttatttcagttatagcccataatgtaatggattctgccatattggtttttaatatcaataatagagtgctattttaaaagttacaaccttatctgtgtaggaactaagaatttcattgaggctagagaaagtggtgatcaat

SEQ ID NO: 26935 - DNA, 875 bp, Glycine max
  Intron number 1 from transcript Glyma18g02470.1 (locus Gly ma18g02470) derived from phytozome v7.0 (chr-ID Gm18; pos 1562689 to 1563563)
gttttggaggtagcggtccttggataccctattttgtaagtttttttttttaatcttttcttgcatcttgtgaccgtgagtgtgcgtttgtgtctattttttttttctttcttcaaggccacatacaaacttctccgtctgagtatttaaatgttaacgaattcacgttatagtaatattttttttttataacggatttgattgattagctccaaaaattaaccattagatgcaaataatgcagtggaagtcaaatttcgaagctaacaaggttgatccaacttaacccatggttactgattcgagtcctaagcatgcatttaagttaaatactcggtctataatagtcctatatgtttcaaataggattgtcttccttgatcgataactgtggtctatactagaaaaaactaggttgtacatttttttttacaacgcttgactgcaattggataaatatttttgatgttgtagaattaaaattagagtttcatctcctaatttatactgcaatgcaaagtcaaattttggagtaaacactaggttgtagttttttgttttcttaacaaatctttattgtgtgaaataccaaaactccaattcaaacaacaaaatgataccaaaaacatttcaggaattgcatgtacttttttcgttttcaatttaaaaaattaaaaaatgctttaattattaatatctctttgatttcttagagggatttggttgcatggtcagtggattactaatatgatttaacgaaggatagttctttgtaaattcttgatgcctgccccgtgtgttagtttactttctgatgtagaagaagattatgattagcagaacaacattgaaaattttgacttaaagaaagtaga

SEQ ID NO: 26936 - DNA, 782 bp, Glycine max
  Intron number 1 from transcript Glyma20g25920.1 (locus Gly ma20g25920) derived from phytozome v7.0 (chr-ID Gm20; pos 35530992 to 35531773)
ggtggcgcgtcctcaacactggctcccctattaccgtaaatactgaatcatttgttatttatttgttattagctcaaacttgcatttgttggattctgctttgccaatgtgtttgaatttgatttgatttcatttgattttgttatcggagttggggtttctgagatttgttgacttttttggtgttggatatctggttttcggagcattgggatttgaagctgtaggtttatgttttggatctgaaaaaattgacctacttttgaaattaacgaaatgtttgtaaagatttatcatttttttttgaaaaaattgatttagaacagagatgtatgggagttttgtcgctgtttgattgttgaaagaaccccatgttggcttttgattgattgattgattgatagtctgtatcctattgcatttttagacatttaattggtgtgccgaaattggtggccttttaaacgattctactgttatgtattttatactttgtagctaacttattatttgttcattgtttgatgtgggtggatttcaatttcatggtatttcttctagcttgcttaatttcagttagtatcaactttatggccttttgatctcttgatcaactggtccaatctcctgttagtagacttacatttttacacactaatttagcttgatttttattgtttttgtttcttcacttgcgtttatcatctattttctaattttctaatatactgtatgcattccaatcaggttccagttggtagggctacccttggccgtatcat

SEQ ID NO: 26937 - DNA, 736 bp, Glycine max
  Intron number 1 from transcript Glyma20g01640.1 (locus Gly ma20g01640) derived from phytozome v7.0 (chr-ID Gm20; pos 1160198 to 1160933)
ccgtcgctagaaacttccgctccaattgctcctctgtgagtttcacgatccatttccaaacgacgtcgttttgttcggtttttgagtagtttagatctgtagttcaaccagctgaaactgttaaagtttgagtttttttgcattcccaaaacggcatcgtacaaaaagaaaatagtttatttttgatgaaattcattataaagttcaatttttactcgtgacttgtgagagtggtatttcgggaaattacacagttttttttaggattcgaacttttttgtttagattggtgtgatgcgtgcaatcaaaccgctatttatggttatgtttttgtggagaaagtagaatgcttcccatatatgttactcatggcttgcttatgttctcattatgttgtttacaaatggggttgggtttagttgaagagactagttagtctatcatagcgtgtcgaaccaatgttcaaactcatgtaaagagaggtgttcacatttggagctcgaccgtctcaaacaggattgtctcaaaagaaagaattggtcttttgtttggcattttgtgtgttgttctttgtgaaattgcgtctttacaatgtgttctttaaaatagagaaataattttgcatttgttgaattattttaagttggaatcttatgagggttgaatttctgtgggcatgtatatgtgtaaggatgtctgtgtacatctctgaaatttgatgtatgttgatttaagg

SEQ ID NO: 26938 - DNA, 517 bp, Glycine max
  Intron number 2 from transcript Glyma19g43360.1 (locus Gly ma19g43360) derived from phytozome v7.0 (chr-ID Gm19; pos 49027885 to 49028401)
ctaacgaaattgtggtcggaaaggtatacaaattcacgatcgatttcttttgcatttccacccttaaaattgaaatttatatatccgcttgaaatataaccttagccatggattttcaaaatacatgcttacttggatgaacttccttggaaatatttctgagagaagaaaaataagatacaagaaatgaaatgggtgtttccataaactaaaatgaactcatcatttataggtgtctataaattagttaatgaataattcattttagcttacaagaaagttcatttcatttttttatccgtattttcttctcctacaggtatttttaaataagcttatgcaatcagacccaaattagaacataaaaccgaagagtgaaagtttccattaggaaaatgcatttcttttctttttttgtgatggatcaatggaaccgcttacttatgagggttattaattaattttttgattctattgagcaggctttaaagcagctaccgagagaaaagatccaaat

SEQ ID NO: 26939 - DNA, 572 bp, Glycine max
  Intron number 1 from transcript Glyma17g14210.1 (locus Gly ma17g14210) derived from phytozome v7.0 (chr-ID Gm17; pos 10977512 to 10978083)
ggtaagatttggccacaaaattttccgtctaaatattaaatataacggcatatgaacatttaatttcaaaattattaattaagtttttttactggaaaattaagttaaaatgccagttaaaacaactttaagtcagtggaccagacgtaattatacatgaggaaaacgtgactactattaaacgagaggaaaacaatgtaaaaatatctaacctaccaccaagggaatcgacgcatcgtcgttggggcagagtttagacagtgatactactactaccctcaatcacgcatttcaaacactcccatgttaaccattttcaatctttcaatgctgtggctgaagagtagaagttgaaacagattcaagcacaaacagttctcgaagcaaggacaaagcatatataaaagcctcttcatcattatattggggttcttcaaagttcaaaccaagttcatttttgaacgaccacaacagattttcttgtatcaaacatatatggccacactagctacagttttcctcccttctaagcttaagccatcgcattcggggaaccaggtctctccattcac

SEQ ID NO: 26940 - DNA, 780 bp, Glycine max
  Intron number 1 from transcript Glyma18g01740.1 (locus Gly ma18g01740) derived from phytozome v7.0 (chr-ID Gm18; pos 983255 to 984034 reverse strand)
cggcgacgtttgtggccaggtaattatcatatctcaatatacaaggaaaaaaaaaatccatttttttaatgtctgcgtgatttttgtgagaggattttccccctttgattaatcttcgtggctttgatttgcccttttgataaaatgataaaatgattaatcttgtctttggttttgtgggggttaaaatgataaaatgaaaatagtggctggtcgtggccattctgtacactagttgacccttttttctgtgcgttttaatgagtgcgtgatttttgtgatctaaatttggctttctgagaaagcatggattttgaaacctatttttagcaaatatgcgggactatttcatagggatttaatttatggcacatgcacatgcttatgcagactctcaattgtttcttcttcattttcttttatgtctgagggagagaggggtttgattgcgcagtcataataggcttggaatggcagcacaattgacagtttgcatttggggattttttttttttttgcatgtgtctgatctgttcatgatgcagctttttaggctatgatgattatttattagaattgcccctttgtgctatgttcaatgattattgaaataaaatcatcaatagagaagaaaaaattggcatttggattatggtttgatttatttacagggtagaatgaagttgaattatcaagttataaagttgttttactttcttgatgaatattgactcagatgtttgctctttaatgatacaggagtcaagtcaagtattgggc

SEQ ID NO: 26941 - DNA, 985 bp, Glycine max
  Intron number 3 from transcript Glyma17g29450.1 (locus Gly ma17g29450) derived from phytozome v7.0 (chr-ID Gm17; pos 32029287 to 32030271)
caaaagactccaaaaaactggtcagtaccaaaacttcttcatttgctttttgcaccttcctagtttgaagtttctcttctttccaacgttgttttcctgagatctcttcattttttttttgtccctttatgtctttaatccctgtggattgctaaactttcgagtcccttgccagcaaattattagattgtctgagaaaaatgtggttcagccattattttaatttataaaaaattaatattttttttgggagggatcgaatttgggggctgtaattaatcgagggccgaatgtgattgagcattttgatgttttcactactcaaggaggtggaatagaggggttgtgttggctttgcatggttggtgttggtgatccatagattctattggaaaatgatgcacacatgttgtattctagtgagatgtagttatgtacaaaactcttgagtcttgatgattgaagcttaagacgtgctgttgcaatgttgtgattacatcacttttatgtaagtgatttgagtaaagagaattgtgggcgtgcattgatacgacttatggagtgggtatactgtaagtttgcaactcttattccatggggacgggcttggcatgatacaagtcactttgggattgtgctcctgcctctggcggcactatcctaatttcgacctcgaggacgaggtctattttaatgggagaggtgaggtaatgtgatgattgttgagttgtgtgctgactctgtcaagttggttacaaggacaggtggcaactatagctgaaaacaagggaaatggattggatttgcaggaattcctacttcatgcttgtgatttaatattatgaataagtttctgtgtgtcattgattgctttacattttatacatttgtcacttcactcagtagctacgattacagaatcaagtagaaagtttatgctttttgatattttatgggcagcactggcagaggaaagacttttgat

SEQ ID NO: 26942 - DNA, 469 bp, Glycine max
  Intron number 2 from transcript Glyma19g36040.1 (locus Gly ma19g36040) derived from phytozome v7.0 (chr-ID Gm19; pos 43439492 to 43439960)
gtttgtcagtgacaatcttttctgcaatttcaagagtatgttatgcccttaactttattatataagcatatgtgtatttattggaagtatagttgttttttatttctctctgatgcttttctaatgaattgaagactttgaaaagccatttatatattcttccttaacccatgtattcaaaactgtaaccattcacaaccaatactgtaaagtagcataattaggacaactagaccctatttttgacagtgaaaactgttactgattataagtataaagacctatttgaaaatcaaattgaaacaagtatcatgtaggaagacaaagttaaattaaaaacatggatgtttaagaaacttcctccataacaagcataatttcgttctctcattattaatatcatttgtggcgatgcaattttctgtgtgaaacagattttgcaggtgaacatcaaggcatatcggagaat

SEQ ID NO: 26943 - DNA, 612 bp, Glycine max
  Intron number 3 from transcript Glyma17g16040.2 (locus Gly ma17g16040) derived from phytozome v7.0 (chr-ID Gm17; pos 12723284 to 12723895 reverse strand)
caattcagtttgtgagacagggttggtatctcaaggtatgctcaacaaacaagccttcaataaaatcacatactctaattgccatttcaaattgcttccctgtcccatcttaaaattcaaagtaaaggaagaagtgacactaacaccagctctcttaatctcttttaagaatgaaatactagtcacattaatgataatccgtactgctgatgaacttttaaaaaaatgtgctaagtgttaggaatactttgtgatttaaatgattaatatatggattttaatgtttggacatgttttcctgtcgctggcattaggtggtcatttgactctagtattttgtgggaatttcttagtactatatggatgcatgattggatgggcaatttggttcgtatggcgctaaagccttcaaaagttatctatcatctatcttatatatatgttcattgacttaattgtgatttagtctaaaaggagcattaatagttccttcgcttcattaattaaagataccatgctagattttcatttctttctatacacgtttttgacaatgttgtaacaatacaatgatttgcttttgtattgattagtgtagaatccctcaaggtc

SEQ ID NO: 26944 - DNA, 229 bp, Glycine max
  Intron number 2 from transcript Glyma17g16040.2 (locus Gly ma17g16040) derived from phytozome v7.0 (chr-ID Gm17; pos 12723911 to 12724139 reverse strand)
ggaggtaattactcttttatcagctagattgcttgtcttcctattttctgtgcatgttaataagtttcattatccatagatttgaatttgaaagacagtgctttgatgtcatgcgtgttgtgagaaattttggctctctagctaaccttatttattaatattttgcatttttatctggctataaactgctgcaggcaagtcagagcacatatcaacgcactttaactgt

SEQ ID NO: 26945 - DNA, 730 bp, Glycine max
  Intron number 2 from transcript Glyma18g02650.1 (locus Gly ma18g02650) derived from phytozome v7.0 (chr-ID Gm18; pos 1681789 to 1682518)
tctgctctaatttcatccaaatttttgctactgaggtaggttaatatcctttgtcaatacccatcaatcacgaaagaagaaagaatcatttttttttttttttattgggccagtttaattatgttaatcaagaagaaagaaacagagagggtggaagctaagtaacttcagacgtttgcatttgataaatcaagatacaagataaatctatgttgtaaaaaatgtaaagtctcagtcccacatctaacagaggtaaggattaccatcaccttacccttataagttatttgttgatttgagttaggcctaaatttaaacttacaaagtatcaaaggttatcttggatctattaataggtcacttatcatattacctacacacaaaacccaataatgtggaccgtgagagggtgtattgagaaatatcaacacgttgattttgtgaggttaagctaggccaagtccaaattgaaagaatctaagcatacaatcctacagccaaggttatagaacctcaacgtcattattgaaaacaaatgcatattaaacaattcaatcttcaattctcccctggactgagtttgaactaattcttcataagtttggaccattgttgcttggtttacaaaagaatcacaaaaatcagttgtgaatgccttacatttatgattcatccggggtacatctatttcactgtgttttgttacttttgtattacgcagggttgcaag

SEQ ID NO: 26946 - DNA, 635 bp, Glycine max; identical to SEQ ID NO: 20023
  Intron number 1 from transcript Glyma17g08560.2 (locus Gly ma17g08560) derived from phytozome v7.0 (chr-ID Gm17; pos 6339662 to 6340296)

SEQ ID NO: 26947 - DNA, 478 bp, Glycine max
  Intron number 1 from transcript Glyma19g37960.1 (locus Gly ma19g37960) derived from phytozome v7.0 (chr-ID Gm19; pos 45028753 to 45029230 reverse strand)
ttggtggtgattttgagtgcgtttctactttggaggtaggttactgctaaatacatgtactcattaccaaacctggaagaaaattaataatctctatgtcatgtcccattgcttgcttgcttgctgttgtctcacatttccccagtcaccttaaactcaactatgtattggaatatcaaatttcgatacaggatcctttgatgtcatttaatattctgatttaactgcacttcaagtcattgttggtttggaatagattgaagtgccattgttggtttctttcaattataatgaaatcaattgcataggtttgggttaataatctattatttactacaacacttctgaaaaatgagggatagatcatttaattttgaatgcatatttaattattaatcctttcctttccagatattataaaattatttcttttcttattggaatttcaggagacatctttgcactcttacaggttatc

SEQ ID NO: 26948 - DNA, 522 bp, Glycine max
  Intron number 1 from transcript Glyma19g41310.1 (locus Gly ma19g41310) derived from phytozome v7.0 (chr-ID Gm19; pos 47617501 to 47618022)
ttgccagaatttgcgctcttcttactatcatcaaggttccttactccctcagactctaatctttccccaatcgcggttttattctcttcttagactgtttaagctaaggttttctggatctgatttttttcattaaaaaaaaacaaatccctgaggaatttccttgtttggttttagataaatttcaaaagggtagttgaaaaatcctctttttcttagtgggtcgctcggttacgttggcgaatttgattagcttacccataacttgtgttttcagatggctctatactaatgttgtgaataagtttaatttttctgagtgtcttgtcctgtgtttaataagttttcatgagagtattttatcatcacggattatttttaattttgtatttatctatgttgtgtgaacttcctttagctcgttttttggcacctgaagctttttatatctcccgatggtgttatttatttctttacactttactgactttacatcttatgcatgattcttgtagatactaa

SEQ ID NO: 26949 - DNA, 882 bp, Glycine max
  Intron number 3 from transcript Glyma19g41310.1 (locus Gly ma19g41310) derived from phytozome v7.0 (chr-ID Gm19; pos 47618468 to 47619349)
aacaaggtttgtactgtattatccctttattcgatatttatcaatttgtttctctctttatgaagatccgcacaatgcattttcccattgttctagtttctgctatactgcatgagttgtccctactccttgattcttcttgaacatcttctcttccccctctgtgcacccttttttgtacctcctttatagtgttgttacaacctgccttttatgtctgcttttccccctttatttctacggagtgggtggaaaggaagaacaactctatcgcttgacttcaatctcattaatgctgctgataaactggcagaattttttttcccaagccattattgctgtgacatctaatacttgcaaacatttaaaactttagactttgaagctttctgtttttgatctttaaggctacttcattccattaatctacacatagtagtttgttgtaagcatggcaaagattattgtaatttttgttattttgttccagtatttaaattgattttatatttgtatacagtaaggatcatcacaaatgtgacctttagcaccctagttaatgctatgcagcgtgcaaagtattaactcaagcttttttttttaccttccaggagaagagttatatttttcttcatttattgaatcacctgtgtatttgctcttatctcattgaaacaaggattttggaaatgagttcatttttttacttactttctcagtattaattttgtatgttcctaattgtgggattctttacctggaagtgatttgattctggtcattggtgttgtccttgattttaaatgctttatctttgttttccaaattgacctgggcttgcgtgcaggaatcattgagccaataaaatctggaattagagat

SEQ ID NO: 26950 - DNA, 705 bp, Glycine max
  Intron number 2 from transcript Glyma20g35260.1 (locus Gly ma20g35260) derived from phytozome v7.0 (chr-ID Gm20; pos 43511235 to 43511939 reverse strand)
ttcagcatattaaggcaattatcaccgctgaagaggttagttagtcacctttttatccttaaatatgttacgtgtctgcttccatctctgaaggagcgggattagaaacattatggcttcctatttctgggaaagaaagtgaataagaacatcatgaaattagtatgtggacacaagctttgaatttttatttttggctattcataattgaaaagcttaaactgattgagaaattaggattagtggaatggtggtagatggggcgttctcttagcatattatcctactattgcattaaatggcacgactagtcttaggatggattgaatttcggctctggaattttgttttcattgtcaagtttattgaataaaatgggtaggaagacaatgaactacatgttggatcaggaccataaccgtcttgtacaagaatatacctacatgattttgtttctgactttagttatgatgcctggcaaaggacatattttcatataactagaatattgtagaggcagcttcagtaggctaatcaactatgctctctgacctagtttgtatatttgtgaattcctgtatccaacctttcgtcctttgtagaatgcaaaattttttctagagattgagatggcatttgcttccacatcctgaattcctgattgtatctaaattgtgggataggtattgctgagagatccaacag

SEQ ID NO: 26951 - DNA, 814 bp, Glycine max
  Intron number 1 from transcript Glyma19g31600.1 (locus Gly ma19g31600) derived from phytozome v7.0 (chr-ID Gm19; pos 39392769 to 39393582 reverse strand)
tcttagctaggcctttactctcccccttctgccaggtcctctctctctctctctacactttcattatcattgtttttgttttctttttccaaaaccccttcctctctcttccatatttttttgcaacaactacttacccatagactgaacataacgtttttttattaaatgtgaaacctggttgcgtctcatttattaaagttttttatttatttatttaatgtactgtgttaaattagaagagaaatttgaagtgtggtaatgctcctgatggaaccgatttgtggatttggtttgatagttcaattgagctggctaatgttcctctaatgttgttaattcaaagcattgttatatttgtttaggttctgtttggatgaacttctgcataagtacttatgaaagaagaaagaaaaaagggtaaaattagcttatgcttgagctaatttgtagaagttctctcatattagcttatctgaaagcgtatttttacttgtgcattattttatgtgagaagcttatttcattttcttttcctgtaagggcttatggaaaagtttatacaaacatggctttagtctgatgtgagttttcattttgggattagatgttctttcataatgttaataggttttaatcaagttaaacctatagttactgattgaatacacgtcaagtgtggtaattcattttattttcctttctgaccctttctattgtgtttgtttgtttccatttcccctaaatgagtattgtctaaaccattgtcttctcctttgtgacaaattatgtcgtttttttttttcttcccaga

SEQ ID NO: 26952 - DNA, 820 bp, Glycine max
  Intron number 1 from transcript Glyma17g05710.1 (locus Gly ma17g05710) derived from phytozome v7.0 (chr-ID Gm17; pos 4024362 to 4025181)
gaggttcttttctattctacttcatcgctagctactaactctttctattggacccattcaaatttaacctttttttcctcttttattaatattctcgcatctaagttaaggtttctataataacttgcttgaaattggtaagcaattagctagatacatgctgtcaagtaattattatttttttttatcatgaaggatagtttgaactgaaaaacctactggtggttatatgctaagggctaataaagcaaagcttagggggaatttgtccttttaaaccacagggagacagactctaatttattcttatttgtgtgtattttgttagtgtaacagttagttgttttgcatatgaagatatcaggtaggagatccatatttgttactcttgtctctttcctcagaatcaatgtactgagaattaccttgtataagaataccacacttcaattcatgcactctgacaacttaagacttataagtttgtaaagtggtttgaaaaccagctaattatttcctttattggttcatcaatatcatgcatggtacgggatttagattattctttgttccctaatttgaccaatgtttactattgtttttaatcctggcaacatggttaaacccatctgttgtgagcatacaagaagtgcctaacagaactctagaatttgtagtattgatgctctatgaaatttaactattagaatacatatgatgactactgaggttaatgttgtggagtttttgtttactagtcaatcatttacatgtgatgactacttattcaggtcatccttttttttggtgcagttctata

SEQ ID NO: 26953 - DNA, 791 bp, Glycine max
  Intron number 1 from transcript Glyma18g01240.1 (locus Gly ma18g01240) derived from phytozome v7.0 (chr-ID Gm18; pos 638990 to 639780)
gggtcttgttctcactattcttctcacaaaattaggttgactctaaaaggttaaagcattcctattgattaataccaactgcttgttttggatgccatagtggtagatctgacattgaagtgtttggaatttgtgttcatattaatatatttccaagtagcattgcctactgaagttttcttgtcatgcatgcgtggtacaacaaatatgataggaaaaatcatggtttcagtttggaatgacagtaatttctatttctccattgtttatactttgtatatttgttgtaagaattatctgtaataagataatgctataacactgagaatgctattacactgataatatgaataatgttttaaaatgagctgtggagtctcctttgttaatttgttgtagcttatctgagaatgctataacagtggtaatatgaataatgttttcagtttataacttggttatggaaagtaacttcttcttctccattgtttatattctcacctagcgggataagactttgttgttgttgtttatatacttggcataagaaattgtttgaacaaataatattttatttgagtttctttcaatctttttgatgtgcaggtcatattacttttgtagatttattaaaaatgtgcttaatgatgtgccccactttgtaattttttcttcttaaagcatcaaattattcctacggtttcatttctgttgaatattgcccatgatatatgtattttttttgttttattataggcattaattgcacagttttggagagaaacaaggca

SEQ ID NO: 26954 - DNA, 740 bp, Glycine max
  Intron number 2 from transcript Glyma17g34720.1 (locus Gly ma17g34720) derived from phytozome v7.0 (chr-ID Gm17; pos 38701564 to 38702303)
aggctcagctggcttgtcctaacaaatcttctgaggttagttgttttgtcctaacaacttgctttctcttctcttgagacatttttttgggtttacaacaactcactcaccctattcaatcaattgaactagacgcctttgacattttcatgagacataaacatatatgttgcttgattgttggattggaatagattttaaatgtaaatgtagtgtgtgtttaaattcgcgttgaattgattttgaggttaagaaaatgttcaaaaattgattttgagattaagcaaatttgagtggtttttgggttggataaaaaagattatattgaattttactgctaacttgcttttagaataaaaaaataatttcatttgaaatcaattttgcaaatgctcctctaaacacagttaatgtgatgtgaacacggtgaatatacaaattataagagatgcttcattactagtggcactttgtttgacttaattaattactaggaatttaaattatttaagcaatgcttcattacctaatgcactctgactcattactcaacatttcatattccaaatttcttttgctcattgatttgttttggttgcatatacttatctttttttgtattttagtttcagcaataattttctaaaattataagggtgaacctttctttagtttggttgatttaccttttctttttgtgatcagagtgacgttgttgccaaaattaaagccgaggcatc

SEQ ID NO: 26955 - DNA, 401 bp, Glycine max
  Intron number 4 from transcript Glyma18g36840.1 (locus Gly ma18g36840) derived from phytozome v7.0 (chr-ID Gm18; pos 43490899 to 43491299 reverse strand)
ggagcccttattgagttatcacctctaacccttcaagttctattccgaatgtggatagttttttttaaagtatgtcaaatatttttgacacagtgaaagtataatatataaaattagtgaaagcttgtaatagaactacttcatagcaaaaacgctttgtcttctaaatttggatctacttgagtgttgatagcaattcaatctaactttgcatcagcatctacattttccttcattcgttggttttcattttcattctacatttattgttgtaaatgataaaagatttctccttctgagttaacaaacttttgagcttatctaagtacctatttaagagtaatcttgcggcatttatgctcattgcttatttatcttaccactttcattttgcagtgcct

SEQ ID NO: 26956 - DNA, 707 bp, Glycine max
  Intron number 1 from transcript Glyma18g36840.1 (locus Gly ma18g36840) derived from phytozome v7.0 (chr-ID Gm18; pos 43492241 to 43492947 reverse strand)
aattttctgtgtcgcttcgtggttcattcttctcgtaagttctctctttctctgtagggtatttttaggattcatgttgtgtgcgtggtttactaattgattcagatatttttgaagagtttattttgttccttaaggtagaatttggggtgccaattttgtgttggatctgtaaatgtttgaaagtttgaattttggatttgggtctaccccgttgtggaaaaaaactttttttttcttgggttgggggattcaaattgtgaaattttcaaggggtggttttttgaaaagggtctttgcgttttgtgttgcttctggatttggattttgaattgttgttttattgatttatttttatgaaatattttcttattcggttgctccatgttgagatgtttttctgtttatcaatgtttagtttttgttttgaagcctactttgtgggagatttgagtgatttggacgaggcttgcggttaaaatttcgtttgttgtcattgtacacacacacacaaaaaaaaaatgattatgataacaaatgatggatctacttgtttcctagtaggacacttttctcgtgattttgtggtttttgttacatgtttagttcatgagggtgtttctcttttatggttgttttggtatgattcttaccgagtttcgctgtttcaggttcttgtgatctgttctattttggagtacttacaa

SEQ ID NO: 26957 - DNA, 796 bp, Glycine max
  Intron number 1 from transcript Glyma20g37580.1 (locus Gly ma20g37580) derived from phytozome v7.0 (chr-ID Gm20; pos 45435838 to 45436633 reverse strand)
agggtaagcaaggggagcgtgccttcagaatagcggtgagtgactctgcttcatttaatgatctacttattatatcctcttcttttttggtacgcaaaagatttaattatttcttgttgttacttgctccatctctctctatgtctcctttccttgtattagatccagtttgttcagagactttgtttttgtcttttggtaagctgaaacttgtattggttgcctatgaaaatttataagtcgtaacgaacggttttatattaatgtgaaaggaacctatcacgtgaaaaccttaatatgccttcatggcatgacatttgactcgagtattggtattccttaggggtataaattattaacttttcagcatcttctaacctagaatattttttaaactgtgaaagcatgttaatgattaaaagaatcctccataaaactaaaaaataaagttatccaagtttagtttttttgttggtgaatgttatcaagaattaatgaattatgcactgctattgaatcaaaatattaataaaacttattcctaggtcattaaaatacagacagtaagacatttcctgtcaattttattttttttaaaaaaaaaagcctctggccttttgcaaccaaaattgggaccatgaagaattggaatgcaaatctcttttatctttcaatgagtccatcccacttgccaactcacattgtgagctttattcaaatccagcacatggggtgtgaagactaaatgacatttattgcaggtcgatctcctgagtcgcttgcactctcctcattc

SEQ ID NO: 26958 - DNA, 619 bp, Glycine max
  Intron number 1 from transcript Glyma17g35980.1 (locus Gly ma17g35980) derived from phytozome v7.0 (chr-ID Gm17; pos 39961182 to 39961800)
acttctccagcttcgttcgccaactcaacacctatgtatgtatcatacacccatcatgtctctcttctttttcttaatttctactcatacgttcttccgagacaatcttattcaatacattatgaaacactaaatataagagacagaacttagataccgttttttagatgttttttgtttgttgttctattagaattggagtttcttcgataatgtgtctcttccttttgtttttcacattttcttctctgtgaagaggattctgtccgaaacatcattaagagacaattgtaacttagatataattattatatacttttgatgttgttctactattagtgttggaattttattaggaatttgcataataaagatttacattagagattaatatactaaagcaaaactccaattcctattaaaaaaacaactcataaaacatttaaggaagtacatcttagttttatccaaatattggcagcgcactcctaactcccatttaacatacccatgttaatctcactttcaagatgttacatttttgcatgctcctattaattaactaacatggttttacattttttcttaaatagggttttagaaagattgtgcctgatag

SEQ ID NO: 26959 - DNA, 859 bp, Glycine max
  Intron number 1 from transcript Glyma18g46480.1 (locus Gly ma18g46480) derived from phytozome v7.0 (chr-ID Gm18; pos 56207993 to 56208851 reverse strand)
gcaggttttgacactttgattgctcttttcttgttactttgcttaatttgtattagcttttgttgaaatcactttagtttttgttaagtatgttaatatgttacataactttgtttaaattcggctttattccttgcttccaagtgacttggatgattttattttggtccctttaatgttagtgacatagttccattgcactgagttattagaagtttacaacaatattgggttgaagaataagaaagttgtgctgtctttggctatattcacattcatggaatgatgctatgataacattaacacatgacataccaatttaacagctattgaacaagtgaagtgaagctttacctcttaactcctctcgaccttttcccctactcttctttttcaagttcttaaaagttaaaaggcaggaatatgaaaagcaaagtaatttaaagtagaagacaaatttaatgccgtacttggaggttggagcattatatattacgtttgcattactcttttttcatgttaagctatgagcctatgatcttattttgctctatttcttttcttctgtctgtatcctaatcttaaccaaaatttgagcttcattttcttttcattagatttctattgcagacaaacttgtcaagtgccccatgactcctccactttggacacttaatcacaaaatttttgttcttttatttccttcaaacctttgtcaaacaaataaaagaatacttgaccatttattctgtttttttttttttaacttaatattcatgacctctacgtttccatagatttataagattaattttcactttcaggtcttcttcgttgtggcaagagttgcaggcttagg

SEQ ID NO: 26960 - DNA, 809 bp, Glycine max
  Intron number 1 from transcript Glyma18g01500.1 (locus Gly ma18g01500) derived from phytozome v7.0 (chr-ID Gm18; pos 809286 to 810094)
ctgctacaaaagcgtaagtggtccataattaagtttgttccgttttccaacatttcaatgtatgcttttctaggtggggacttttttctttttaaggatcttgcttttattgatcgactatacccagaaatatgctaacattaatgctttgctttgttggggaaatttgttcagttttatgccttttttttcttttgatatgtactagtagtttttatgtctttcttatatctatctaaactatgcttagaacagaaaactgaagtgacttcatttcatttgctcagaggagtcaagactttaatgggggaaatctcctctacgttttcttcttgtccttaactacaaaatttaatagtttcactgcattgaattgtgttcatataactataagatctgctgcgatcaaattactgtgtgcctggggaagtgtttctatacaaaattgattttacaaaaccaattttgataattttggagtgaagtgatttctatttagtgtttttattctattattatttttactcaacgcaaaaactacctaaatttgcttacactcaaaatcaattttcggttcaaagtaaattcttcaatggggactaaacatataaacatttacctacttgttgcattatcttgtccttttcctaccaaatcaactgaaaaatagaaagaaaaaatagctaaaaaagttttgatgtttataaaagaaatcattttgttttctgggttattattttagttttaattgaggaaaacaaatctgatccagactgagatctacttgctatttttatagataccttgca

SEQ ID NO: 26961 - DNA, 951 bp, Glycine max
  Intron number 2 from transcript Glyma18g52070.1 (locus Gly ma18g52070) derived from phytozome v7.0 (chr-ID Gm18; pos 60788076 to 60789026)
ccgaaaaacaaaaggtcaggttcagtgtaattctctgttgaattagattcgactgaactttggttttttgtctcgtgaatggagtcaacttcgcatgcatgcctttgtttctttcatcgaactctgattttgtttgttgttattttatttgagtggtggcaatcagtttgatttgattctcggagatcgaatatgcaatttgcatgttcctttttattaaaatagtggttagtttggtttttggaattgcagaaattttgagatgagagaacttgaaccagtctatgctattttggttacaagacccagttatctagaattgtattattgcattacaatgagtcaatcactaaatagaagagacaaggtaacattagacaggaacaggataaatatgaaaaccaagtttttgaaaggattcactggctctcacagtctcactcaatattttcctgcgatggaatatcaactcagacttttgtttggtatcctcttaaagtttggggtgaaaaataggtttttcacattgcttaaccttcatccttagggtaagtttggtatgagggtaaaaatcgaaatgaaataaagttgtgaataagtttcattagcaacattgtattgagaactaatcagtgaattaagggtgcacgaggtaaagaaacctcttggatttgtccaataacattatttgtcaattccaaaaagagttcaattcatggtatccttcttgttcctcaagaggtagatcagtgctatgatttgtttctggacctgagtgtcaaaaataacattggggattcctttttgtaacatgttaataactgggtcatcagggtgtacacataattttaacaattttctgctttctttaaaccatagatcactgatgctgactaatttgcttattaatctggtcactgagcatgtaggttgtggataagttgcaatctg

SEQ ID NO: 26962 - DNA, 894 bp, Glycine max
  Intron number 1 from transcript Glyma17g17430.1 (locus Gly ma17g17430) derived from phytozome v7.0 (chr-ID Gm17; pos 14253526 to 14254419 reverse strand)
ttctaacgcagaggaccgtacatcttcgttttctggtactgcgattttagttttcaattcacaaacaagatctggaatctggaatctggaattgatgtgttttctgaaatgcaaatgtttaagtgtcgttattatgggtaattttcaacgagcttctttataccatagaagaccgtgcagggaggaattttgatacattcggaatctttaatcttaaatcttttttttattatatataaaaatgcgtctgtttcatttggtcacgcgcaaacaaattcaacgatataataattattggaaaagacagcgaagtaagagattcgtgttgaaccatttaaaatttgtacacctcagctacgtgagtcataatcataattcagtgccgtgtagatatagcaagcaacttttttttcatttctgttgtgccgaatcttcaatttgaaatctgatgcatctgtttgcccaaaagaaaaaacgaacagattcttgttgagtggttcttgatagctgataaagcctactaaggtgacttttctggtaagcatcttcatcgtgctcttaaaaaataggaagaaaaatggtgatttttactttttttatcctattcgtctttaaaggcttggaatgttaatttgagtcttcttgaggttaactgaaacagaagatttctttgtggaattttgtgtgagtggaactggaagtctcgttgattttgttgaattattgtgtgaggattgaatcttgatgcatatgtacgaatagttgacatttttttgcctcttcatttaatgtctacctttgaagcgaatgaatatatgattcttgagggaattagggctcaaattgttcaaagttaaccaatctattatctaactaggtaaaaatctcacccag

SEQ ID NO: 26963 - DNA, 779 bp, Glycine max
  Intron number 1 from transcript Glyma17g34870.1 (locus Gly ma17g34870) derived from phytozome v7.0 (chr-ID Gm17; pos 38851923 to 38852701)
tgtggaagcagctgcaactgtggcagcaactgcgggtatggaatcatttttctttcttcttttagtatgcttgattaacctttaaaacttgtattagaaataaaataaattttgtattggaaattaattttaacatgacttttaaatattttattgctttctcaaaaatgggattttcatgtgaatcttgttaatttatttttcttattgcacaagtttataagggataggattttctgtgactattctgattggattttttagtatcctttattttatgaaattagattctttgttatccccgaccaaaaaaagatgctttattttcctacctacatgcatgggtttatagggatagaaatatagaatttttctatttttttgggtagtttgattggctttgtgggttccctttttggttgaaatttatgaaattcgatgctttattcttctttcaacatcaattattaagaggctaaaactatgctctctttgagactgttttgctttcagtgtcatttttgtgcgaggaaaaaaaatcatgtggtatttgaattacttttttcattggagcgttcttcataaaattgttcaaaaaacaaaatgtctattttcagttttttatatttcttgggtacgttcttcttatatgatgatctttaccaaactcgattttttttttaaattttgttttgccacatgttttcgtgaacctgatgtttgttgatttttcttgtatttcagttgcaacaagtactcttttgacttgagttacgttg

SEQ ID NO: 26964 - DNA, 353 bp, Glycine max
  Intron number 2 from transcript Glyma19g34780.1 (locus Gly ma19g34780) derived from phytozome v7.0 (chr-ID Gm19; pos 42367879 to 42368231 reverse strand)
cctagggtacgtgagccacatatatagcattagatattagaattctttaaagatttaaatatctttttggtttgtttgcagttgcactttttaatttagtatctatagattaaatgtcaattttatcttcataattgtgtttttttatgcaatttggtcctcgtggtgaaatcactttaaataactggaaaaaattgtagctgataaaaaaaagaaattggacaacgttgtaacatgcattaagattagaactcttaagttctaatactggttacagaattaacaagtatttgttttgataaaatatacacttggcagagattctatcttgctgggaaccaagagcaagagtt

SEQ ID NO: 26965 - DNA, 986 bp, Glycine max
  Intron number 5 from transcript Glyma20g34470.1 (locus Gly ma20g34470) derived from phytozome v7.0 (chr-ID Gm20; pos 42865401 to 42866386 reverse strand)
aaggtcccggtaactctttcccccgtaaggtatgtggaatgtttattcagttacaattcaaatgaatgaactcataactgtttgtttgtatgatctgattttgttgtttgttgtgttactgtaattttgttgtaataatgtttggacctgtccagactttctttggatctgtttaagcatgggactaatattcccctttcaaaccatcgcatttctagtagtgtgaaatctgtggcaattatgttgtacttgatttgataaagattttgagctgaagataagtgatgagctgcagaagacagacatgcagacagacaaatatattattcattaaagatattgtaatttgattaacccttttgggaataatcacatttctatgaaggtcactgctatttttgtccttaatataaataaacaatgcttaactgagcttttattacttatatgatttgaagacatattcaattcatgtccttatgatctcatgaagtttgtcacttcactcatgtatcacctagacaattcttatttccatggttgttttcttctaataaaagtcattttaaatgaaaatagagtaaaatctagcatgtaaagctggtttaaataaaaatagagcaaaatctagcatgtaaagctggagagctactgaagacaaaagaagcaaaataacaggttatccattgagagagtatgatagataagttttgggaatgattctagtagctagttattcattgattctatgaacatgttaacaaggatgaattctatgatttctgaaaagtgaaaagtcgatttcctactctcaggatcaggcaaaactaatctatttggaaaattctatcaaatatttatgaagttgttattggttttttctaggattactatttgacaatacaacttaagcccaagtaactttttttcttaattaatagtattaattaattaatactatgactttcaatgtacctgatgtgcag

SEQ ID NO: 26966 - DNA, 650 bp, Glycine max
  Intron number 1 from transcript Glyma19g32290.2 (locus Gly ma19g32290) derived from phytozome v7.0 (chr-ID Gm19; pos 40059690 to 40060339)
cctctcgcccccaacacacacctcttctttttaaggttgttaactgctcttccctttctcgaggtttatttaaggttgtcggtctctagctgttccagatttcggattttgtcgcattgcgatctgggttttgctctgtttgatccacttcttcgactttgcttcatctccttctctgggttttttaaatatttttcttttatgtgccttttttgtttgaattttcaagctggtttttttctacacctgctggaaattctgaatggttttttgcttttaaaaaatattaaaatttgtggtccaaatttttaggttgagggatcagggagagataaataataataataataatataaaaaaaaacaagagtggtgaattcctgtcatgtttttctataggtcttgttttgctggatgttgatgatatccgggtttgtctctatttaaatttcattaggatattttggctgttatttttaatgttccaacttgtaatgtgttctaatttcaatggagtttctgcactctattttctttacatggaagtttgcatgtattgttggatcccttgggaatttacatggtactcatctctatttatgtttttttggttcagggtttatcttaaaccaggatttttggcactaattt

SEQ ID NO: 26967 - DNA, 365 bp, Glycine max
  Intron number 4 from transcript Glyma18g38690.1 (locus Gly ma18g38690) derived from phytozome v7.0 (chr-ID Gm18; pos 46362363 to 46362727)
acttccagggccattgtataactgctctgacaaaggtatcaagagtttggacactattaatcaacatgactgctttaggaatagtcactagatgctagaagattaaagaaaataattaatttacaaaaatcaaaacatcacaatagctgatatgagacaacaaatggcacacaagaactgccttaaggaaagcatatattattttaagcacaaatttggacattagcatagtacttagtacagactacaagaaattatagacttgctatgaaatgttaactatcagtaatatgtgtttgttgattcaatgtatgatgacattgttcacagatacattcaagctgaaggtgaagccagggaagatt

SEQ ID NO: 26968 - DNA, 435 bp, Glycine max
  Intron number 1 from transcript Glyma18g10030.1 (locus Gly ma18g10030) derived from phytozome v7.0 (chr-ID Gm18; pos 8830560 to 8830994 reverse strand)
atcggttgcggattgcacgtgagtttttcttttcccatttgcatttactcaatatctgttagtcggttatttatgaacaatgtgagattgtgtgataactttggtgggtttgtttttatgggatatgtttcttttttgggtaaaatgtgcattaggtttctcaatttattcaaaactggttagtacgtacattttttgaaatgtgatgaacttggtctggtcaaaatgaagtataaggtgggacaaaattccccaaatttcagaaatacgaggaccatggtttttaaaatatagaggctaaaaccaattttaaccaaatatcgaggggtctatcatagttacaaattggattcaataaggtatactttatatttttgttaatgttgtattgtattgtgctttattattattttttcaatcagggtgtagaatttt

SEQ ID NO: 26969 - DNA, 847 bp, Glycine max
  Intron number 1 from transcript Glyma17g26620.1 (locus Gly ma17g26620) derived from phytozome v7.0 (chr-ID Gm17; pos 27974635 to 27975481 reverse strand)
caccaattcacctctctgcctttctccatcttctggtcacttcttttctttccttttacaccttaattaccgatcatcatcatcatttttatgatatttatctaacttttgttttgagtatatgataattttttcattgtttagagtttctgatatgttaaaaattttgttcctgtttcttgacgttaatcaagtgatgatataacaccatctcaactgctgatatatattggaaaagcagttgaactggatggtgctatgtcatcacttacaaaaatcggatatatatgaggatctcaaacatacttaaacctttttcttcttattattattgttattggcacaatttattcttcagaaacaatcattttatatctaaatagagaggaaatagtgtatgcaattaaccaagggcatctagctcatttgtttgagcaatggacatgaattgttttaaacctcttggtacttgagtaggattgctacgaataaaacaaaaagggtgtatgcacttacttaatgtaaagagtttttacattatcatcattgaatcataaattgtcatctatgataaatttgttgactcttacagtcagtaacttaaaagtcatatgaatgatttttgatcagttgatagatatatgacaatacatgtaaattaaactaaaagaaaaaggcttaacaaacgttatggtaaattcataattagttttttttttttaaaattagaaggttaataacatggccatacttcattagtgtgtttctatttcttttctattgttttcaattttgggttaaatatggtgcagctggagtcagggaaacttgtttcaacttcacgagg

SEQ ID NO: 26970 - DNA, 476 bp, Glycine max
  Intron number 1 from transcript Glyma19g41810.1 (locus Gly ma19g41810) derived from phytozome v7.0 (chr-ID Gm19; pos 47981561 to 47982036)
gaccgctagtgcccctgcttttgccggtgtgcaatgtacttcgttctcgttcctcgatctactgcattttcacctctctttagcttttcctcaattttccatttctcgattaaattgttcaatgttttgtgtgaatcggtttttttcccctcttttgcctaccgacgaaatgtttctctttgaactgcattatcgtaattgctgatatattggctcgtaattaattcctttggcggtgattttgatatttcacttttccggattaaagtagctttatttttatttattttttgtctgaaacttaggctttggtttgtttcacggtaatgcttattcgatccgttcttctagattaattgcttcatgctagatcttattttggatataaataagtcacgttgactgatgtgtcacacgtagatctagtagatgacagctagtcttttggatttttattaatttttcttcgaataggt

SEQ ID NO: 26971 - DNA, 541 bp, Glycine max
  Intron number 2 from transcript Glyma19g41810.1 (locus Gly ma19g41810) derived from phytozome v7.0 (chr-ID Gm19; pos 47982271 to 47982811)
catcaacggcgttttctgtctttgcggtattatttttcttcttggtttacgcctatatttacttaagtttattaatatcgttttattagactttaaggaactgtctgaaagaaaatttgaatactattaggaaatgagaatatgatctaaatctaaggtcctatgtagataaatttcttcataacttataggagaagagaagtaggtaaaataaattaaacttgtctcataaattaaaatcaacttatagcagttctttcataagttgattttaacttaagaaagaagtttgattcattttgttttttattttattttattttcttttataagtgcttatgaagaaatttacctaacaagacctaagactgagttggtagttagttttgcatggtggtttctcagggttagtaggtttctaatgggaattgaagtgcattttttttctctttgttgcatttctcagtgatcaaatggagcgtcaatttattcccacaatggttgtgatattcataaggaattcttgattggcaggtctttg

SEQ ID NO: 26972 - DNA, 833 bp, Glycine max
  Intron number 1 from transcript Glyma19g00950.1 (locus Gly ma19g00950) derived from phytozome v7.0 (chr-ID Gm19; pos 626592 to 627424 reverse strand)
aaggttctctttttctctcttttctttttaattgttctttgttgattgtttcaagaatatcgccattagtggcgtttcgattttgttttgcattgggtgcagttttttttatccgtaagaatcaaagacagtgtcaggttttacaataactctctcgctctgcgcaaccaaattgagttagtgctttttggtttctctgaaaaatagtggaaagaaaacggaaaaaggggagaaaattagttgatccctagaatgcatagttgtatacatggattgttgcctaaatactcatttttatctctgaaagtgtgaggcgggtgacagattggtcctgaaagatgaaaatttccaattcagtcccctagtgtacgaattagtttcgaattttccatctttcagggactaatctgtcaccctagattgttaatcataccacgaagtaggcacaagtttgctttagcttgatcagtgatttcgagttcgagtcccgagtattcagaggaagagctttgccgcttcccattgaagtcctctgtctagctcgaataagattactgtggtggtttcttacataagaagatagatgttaattcatgaaatgttgattttaatgttcaaaagaaagaaaaaaaaaagattgcctctttgattcactgagtatagattaagtttgagaaacattgttatgatacttggagttgatattgttttgtgattttatttttttaatataatgaaggaattagcatttatgttatgttatgctaggcagaattaaaggaacatgaattctgatggttgttgtgcttattttttgtttttgctaggttttg

SEQ ID NO: 26973 - DNA, 701 bp, Glycine max
  Intron number 3 from transcript Glyma19g38520.1 (locus Gly ma19g38520) derived from phytozome v7.0 (chr-ID Gm19; pos 45427426 to 45428126)
atacagagatattgggtgtttcagtggacagtgaggtgagtttgtttcaatcatttttaaaaactattttgtcagttataggctcttatataattttttccgatgcttttttatatgatattgtatgagccatgattccatgtaaccgacggcagtaattggggataaggctatgattgttgtatacttttcttgattcttgagatggcatgcttcttgctggcatatataagctgctcaagaagatgaagggtgtgcaaagacttggtccacttacagtctccacatagtttacagccgtaatgattcattttgtagaaataagctatgactgagagttcttagcataattggcaaaactgcatggattctgtatttttatttttctctgaaacttgctagaaagaattagaatgtattgaagagtatggttagaggaaattacttcattaactatagaaagtcaaatattgggcaatgatttcatttgaacttcattgataattgaaatgggacacaatattgccacttatacctgtgcacatgccctagaaaacacagctttttatgatatgatctattactattcttttctttacattcacagttacctttttatagccttatccaaaggtaattctgaagtttgcttcttcttgattagtggtgctattgttattattgtagttctcgcaccttgc

SEQ ID NO: 26974 - DNA, 564 bp, Glycine max
  Intron number 3 from transcript Glyma18g00300.2 (locus Gly ma18g00300) derived from phytozome v7.0 (chr-ID Gm18; pos 48537 to 49100 reverse strand)
tgctgctgtttctctttcattttttttttgctaaggtgataattctctctccctctctctctctctctctctctctctctctctctctctatatatatatatatatatatatataatttcttttcctttatttcttcacctagtgattggtccgtggggatctagatttgcttagattagtgtttgggtcttggggcctgttttttaccatctggtgattggtgccactgcatatctgtctggaatacagaaacttgcttaatactctttttaacagtgaatgaaaggaaataaatattaccctttctgttttctggtttaagggtttcgttcaatcattcattgccctcgattgctagaataaatatagaaaaacgcaggttttgttttgggtttagttcagaaatggcaagatttgatcatttctggaatctggatgaattcatcgtgtcgactctgacaactgtgagtcttcagttttttgtttttctggcttttggttcaaagttgtactggcttgatgtttcaggactcaaggaatacaacatcctgatatttggagga

SEQ ID NO: 26975 - DNA, 352 bp, Glycine max
  Intron number 3 from transcript Glyma18g46080.1 (locus Gly ma18g46080) derived from phytozome v7.0 (chr-ID Gm18; pos 55843145 to 55843496 reverse strand)
attttttctcgtcaaataaagatttttacaaaatagtaagttagacttcagcatgaatatatattgtgaaacaaatagttataagagtcataagtttatgccaatgggaaaaaaacattaggggactataatgagtgttttgtgctagaaagttcagatacattgaattcaagacatttttctgacctgcatttaccactgtgtgaaactgataacctagcttcctcgagttccttagcttgtaaaactgataatcttccttgtttaatgaattataacttcagaatttgaattgttttctgttttctttttctcaggtatttagcatactaaaccaagcattaacctccaa

SEQ ID NO: 26976 - DNA, 670 bp, Glycine max
  Intron number 1 from transcript Glyma18g04680.1 (locus Gly ma18g04680) derived from phytozome v7.0 (chr-ID Gm18; pos 3457137 to 3457806)
cattttccggtacgcaaaaccatttaaattttgatgacaccccttacattcattcaattattactagtctcttttgggtttgtttgtttttcacttgtttattaaaatcttatgatgattggggtcacaccttttatttttatttttttgaattttagatgatggattgtgtataaatgagtggcatattatgcacaagaaatagttgtgaaggttgcactcttatagcatgatgatgttaattgccagggaaaacttgtggcaaatcaaaatgggaactttggtacatgacattgcatctttctagtttatactaattcctaaaaaggagttcccttctttagtgtccattctgagtctggtgtttattggaattgaaaatggaacagaaaattgttacttcagatttcccacaaaacaccttgtacccacttcccaattttaagcaatggaacttttttttgtctcccttcgacattgaaatttctatatatttacaggttttgcacccatcattgttgacttttgctccataggcagattcgtggttgattaattgtgcatggacaatgattttattatcctgcaaggaagatgatatttacctattcttactttctttttatgttattccaggtaaactcaaactttcccgttggtatcaagctgg

SEQ ID NO: 26977 - DNA, 964 bp, Glycine max
  Intron number 1 from transcript Glyma19g31250.1 (locus Gly ma19g31250) derived from phytozome v7.0 (chr-ID Gm19; pos 39012758 to 39013721 reverse strand)
ccaccaactcttccaaaagggtatctctttttcttcttcattttcgttatttcaatgtctttcccgtagaatcttgagaaaaattcagtttttatatagcgcatgtttaggtgagcggttgtaagattgattttgaaagaaagtgaatttagtttaaattgatttgggggtgaagtgatttaatattatcatttttttttactctgggagcaaagtttgatgaaaaacttatgtgaattttctaaactaaggcaaaagaacatctgtaactgtactgaaatcacgtccagcacagttggtaaatgtctgggtagcgtgttgttaggggtttgatttgtgactatttgaatggacaggactttgttggaagaggcagaattcacttcaatggtgtctacgatctctaaaggaattagtctcccattattggttgggagatatccttggtgtaaaccaaaaacaaaaatcaatcctgatatttttgtaaaactaaacagatacttggaccgcattgggattaagtgtgtgtttggcttcctgttgaattacccaaaaccaatttgaatttgaaataccagctaatgtgattttaggtagatttcacatgtttgggttcatgttgaaaaattgattcttggtccatgattaatgttgagttgaagcaactttggttaatttttgctttatataaaaaaaattcactgaattttactattaacttatttttaggataaaaaaatccaaatcgcattacgttagaatcaattttaaccgaaatcaatttcatccaaaatcaattttgttaatgctcactcaacacacaccagttcatgggcactgctactgaaatttttcacatgttttgtgcttgtttttgtgtaaaagtaatgtaatatggagtcctcgtccttgattgttgatgatttcagattttagtcatattctgtgagccaggtgttgtgaa

SEQ ID NO: 26978 - DNA, 908 bp, Glycine max
  Intron number 1 from transcript Glyma18g47630.1 (locus Gly ma18g47630) derived from phytozome v7.0 (chr-ID Gm18; pos 57229736 to 57230643)
tgtgattggcatttcctgggctttcatatccaacaggtatacttgtttcatagtgtatattaatcagcatacactcactttctttgccatctcatttttacttcatttctttctatctcttctattatatcatttatctacccccacctcctcaaacgggatatatacaatcacaacttttccataattacacggacaaaattctaaatatatattcattttctctcatttagttttcgtcaatttttttttatttctatttctttcttcattttcctatcgcatcatttattaaatttatcgatttgttactatatcttttctctacctctatcattttttcatctatacacctatatacattattgctctttcacaagattttaaatatcggtcaccattacaatatgcttttgtcctgtttattgataccacaacaaatcacaaataaatacggttctaattccaatcgcgaataataaaaaagttttaatgttatggtccaaattaggacagtagattattttttaaaatccttctctttcacaaacaattttatatcgaataggatataattttgaccatcgtcatacaatcaaaataaataatcaatattaggattaagtaaatctattttaactattctagttatacatggtgaaaattatttctttcagttctaagcgatcacatgcttcccctagagagtagacacaatacacgtatgtacgcacatttaattaattatataatgcatgtttcattcatgcacattggccacttgaaattttatttatatatatatatatatatatatatatatatatatatatatatatatcaaacgatctttatgtgatgtactgtgatacgatgtgtgtacatatatatataggtggaatttggag

SEQ ID NO: 26979 - DNA, 845 bp, Glycine max
  Intron number 2 from transcript Glyma18g45060.1 (locus Gly ma18g45060) derived from phytozome v7.0 (chr-ID Gm18; pos 54811718 to 54812562 reverse strand)
acttgctcctgagttttttcatagcaaaattaaggttagaacaatataccctatggtcggcataaattaatatacatatagtatcatttaatatatttttattgtcaatgtgggtatatagagacaagtagttaaggttctagaattaactcgtatcttattcatgggttaaagttataaactcacttagtgttaaacctttctctaggagaaccccctaatgtctcatgaactagttgagtataattgtaactacataaaactgtatgtcgtaggctagtgcagtaatttttcaagtgagactttgctggaaactccaacatgtcatttgcgtctgctcgttagtattacaactccaagtgtatctttcttctactttttttataaaaaaaaaatataaatttcttaccaaatctcacattggattaactgaaaattaatattgtatacttgatgcatataaaattaaaagtttagcataccccgtttcaattatatatagctgatactaagaaggaaaaaaacatgcaggtcacatggggaaatggattccttttaatcatataccatacaataagtatactttagctttttttttttaccaacagtatacttaagtttttatacttctcttaacagatactactaaaaaggccctacttatttaatccaagtaattttttatcatataactttcataccaaacttttaattgaattgaaagttcgtgttgccggagatgatttaaaacacatcatattgaaagtcccttgtgtacatacagacgtataatgtattaattttgttttgattttgggtttaacctgtagaattgggtggatata

SEQ ID NO: 26980 - DNA, 673 bp, Glycine max
  Intron number 3 from transcript Glyma20g21550.1 (locus Gly ma20g21550) derived from phytozome v7.0 (chr-ID Gm20; pos 30877067 to 30877739 reverse strand)
gaagcttaaccttaatcagattcctcgaaacaaaggtttgttttccttaacaaacaacttgcagcatggttgccacccttccactctacttaataataatataatgtttggctatctagttttccttctatttaagaattaactagtgaattcaaagtaaatgttcctcacaatttttttcatgaactgagcataactgatatttgatacatgttacatttggattcaagccacatacttcctttatatttaaacatatgtccaacaaggaaagcataatttgaataatttagcagctacaggaatcctaagagaatctagtcagcaaagggagaaacaaaacttcagaatatcagcatatgctacacaaactaaatacacagcttgtgactttctaaatactcaagtatgacatagattatcaaactggaaagaagaattataatagtccaaggacatttaaatgatgaaaaaaaatctaaagatgttatcaatattcagacagtccagaaaatcaaatatagtctagaaagaaacttcttggtgtgtaatctgtgtaaaagaaatagaaataaacactgtatgcatcttgtcagtaaatggactaacagtctcacataatctaacttgaaattttgaactatctgatgatgccaaattcttgttctagact

SEQ ID NO: 26981 - DNA, 989 bp, Glycine max
  Intron number 2 from transcript Glyma19g30360.1 (locus Gly ma19g30360) derived from phytozome v7.0 (chr-ID Gm19; pos 37966438 to 37967426 reverse strand)
ctgtattgattgtgggttcaattctcactgttttggtaaatacccttggcaatttattcttggagagtttactttaactagtcttcaactatgcattttttctatcattttcccttgtgtttcatctttttccggttacaaagttgttgaccaatttttcaatatgcatagttatatacacatggggttatctaatgcatatgtaagatatgattaaggtaataggcagtaagaaattataatattgaatgttataaaaagaaaaataatttttcaaaatttacagattctcttattttctgacctgtaatgtcattttaagcagtgtgcgtctgctttatataaagaaaaaatgaatatatttcaaactgttagttttgacaaaatatctagcttttcccccaaactcaatacttttttcaatgacgaaagaccaactttcctaaaaatttaagccatttggtaaaagcccaatagtgtttcatatctctaacatgcctcctcatgcaccatggattatatacgtgctcacttgatgcgatactgaaattaaaatttgattatggagaataggggcaacaatgatcagactcttgatcactgagtcatataaaggctttaataccattttgagattataaggaaagaagagagaaaagaacactctgactaatgctaatgtgtcagcaagttttgtagaaaacgttaaaacaatatcctaatactcctacttatttttttcaaggtcaaattttaatatagttcaactagtacaagtccatcgcaagagtacccatatcatgataagtcatatggtgacattatttcaatttcatactcatgattagttgatcattaatcccttatcatcttattctttcatcatagcttatgatgagcgcctctttcttattttgaaaataaaagctgatatgtttaacaactcatgtgcaggatttaatattcctccttttgacttctgggagaga

SEQ ID NO: 26982 - DNA, 774 bp, Glycine max
  Intron number 1 from transcript Glyma19g30360.1 (locus Gly ma19g30360) derived from phytozome v7.0 (chr-ID Gm19; pos 37967546 to 37968319 reverse strand)
aaagaaggctttatcaagtttggaggggaggcaacgtgagattttatctcaacttttgttttgaattggttttcatgtctcaatattggattttgatggtgatttgattgaatgtttggtcacaattcaatctttgttttaattctttgtacttgattgtctatgtttcaattatgttttgttgaaaaagttgtggtttttggacctcccttttctgtcattatatatttttgtttcctagttgtgaaatcgaggccttttgttggcttgttaaggatgtttctttcaatgtgatgaatgttgctttgtgattgagaacttcacgtgtactgatgattgcttgcttgagagggttaatggtaaactggcttttctggtaaattacgataaaaaattaatgcttgcgaatgtgtggttaatcttgcatgcttgttgcttcccttcccatatgcccattttcctgcggatgtgaatgtaaatccttgatgttgtgaagctgttgagttactggtgccacttcaattggaacacttttcttatggttaattattcattttaatagataatttttcacatggcagtggattttttgagtctgtaaatgtcaaccgtctgaaagtttttaccttgttgtgttgggttggaaataaacatatattatttagaaatgattagatatcttgaagcaataacaagcatgttatacttcactaattcttctttgtttgacttctttcagaagtttttctgtggtgggaggctggtttttggtcc

SEQ ID NO: 26983 - DNA, 429 bp, Glycine max
  Intron number 1 from transcript Glyma18g53490.1 (locus Gly ma18g53490) derived from phytozome v7.0 (chr-ID Gm18; pos 61796125 to 61796553 reverse strand)
gagaaacaatcggaggatctgttctgttccataaggtaatgcaaattccctctctatccctttttctttggcttcttcatttcatattatgtcatcatttctgaaattttgatggtgctaatgctgtctgcttcatatcatagaaacttaattgaaaggttttctttgtagcaatattagtagtacccatcaaaactgtttctgtttgatgaaacaatttaatcacctctcaatacgtttcgttttaccactctttcaattgtgttgtgttaggattgccttgccctcaatctgtttgtggaaatgtctactcattattttcttacagatttgaattatttgttttgtgatcttttgtgctttctgcaattgaagggtaattgtaattgtgtgaaattgtgctaacccttttttcccccattgatcaag

SEQ ID NO: 26984 - DNA, 1027 bp, Glycine max
  Intron number 1 from transcript Glyma20g23220.1 (locus Gly ma20g23220) derived from phytozome v7.0 (chr-ID Gm20; pos 33119387 to 33120413 reverse strand)
gcacagaacactctcagctcaacaggatcttgcaggtaggtacctcaacctcatctttcttttctctttttattgttttcttttttggttaattatgagctacaataagtttgttctccctaccatttatctcaacgtgtgagagttgattgagctaagttactctaaagtcctatttatctcctctcctctatattcccattggtatcttgttacttacccatgttggttgttaaatcaaagccttcacctgtaaggttttgaactctctttaccatttttctcagtaagattcatctaaatcatgtttcatggcattcaaactatataccaacctattgatttctatatttttgtctgtgtgcgtttcaactttcaactatttaagccagcctgtttctacaaaccagaaaatgacagggcaaaaatatcgacaataccttttccctgatatacaaggcatattaatttcaaaattgtgatcattaaccaataagtatcttaatgatttatcttatttaatatcttttttttataaaatatttgaataatgttataattaagaagatatagaattacttatatccttcattttaaggaattaattacaatttcatttgattatattttcatttcatttcaataatattatctcaatacacataatagaaatattcatggtgacaattgttttaaaatcaaacctagttggttttttcattgcattttgctttgacagcttttgtgtgccacataagcatatatagccttcaggttgtgcagtaaactttcaactaatttgttcgtttgttttattttcaaataagagtgacagattacagatcatattgcttgattgaatttgaatatcaaacctttctgaacctcacaattaaatgtgctcttaaaattggcatataagaaaatgacatatgtaatttgtttattaagatccagcattctctgaagaaaatatttgtgttttctttcaggggttaggttaggaaacatatactgtgaccaattg

SEQ ID NO: 26985 - DNA, 930 bp, Glycine max
  Intron number 1 from transcript Glyma19g42640.1 (locus Gly ma19g42640) derived from phytozome v7.0 (chr-ID Gm19; pos 48556830 to 48557759 reverse strand)
agaatccgccgccgacgtcttcgatcgcgtttccagtacgcactttttcttcaattattgcaatggttagggctgattgtcttagtatttaaagaatacccaaagcatttcaaaggctgtgtttggattgatcaaaagagctgaaatggatccgaattgagcgaacatgagtttaatttctatgcattaatagtgtagaaaccaaatcttggtaggtaggcatcacagggtgagtacatagactatttactcagaacataaccaaatccagttcctttgttaagatgaaatggaacaaaattcttgacgcactcaaattagaggaaaattaaattgaaggtaaacaatggaatccgataaaatactcactaccatatttcgtctccattctatcaatccaaataatgtaacaaatgagttggtccagagttgtggtgccgcactcactgaataattttactaataaaatgcatattttaaaggactgctatatgtttattgattgtagattaaattttaaactaacattgtgttgttagttcagattgtgactaatttttcttatgtataattttggttcaaagttcaaacactgtatttaaaggaaaagctcaagaagatttagcttcattatgctgtaatatttctgacttggagaggattgtctctttttgaagctactttctgtcctagaccaaaaagactagagtttaaactagcgaataaattaaacaaccagaggtttttagctagaattgtcaacggattgagttggtgttgctaatgattcgctctgcacagctttagcttatttaacaattactgttgacaaatttggactaattaaagttaaaatttcatttttgtctgtggtgttaatttaagaccccttgttttgttttgcaggtttccttgaatctctgtggaggg

SEQ ID NO: 26986 - DNA, 626 bp, Glycine max
  Intron number 1 from transcript Glyma18g00720.2 (locus Gly ma18g00720) derived from phytozome v7.0 (chr-ID Gm18; pos 320826 to 321451)
tgattttcctgaagttcttccctccccattgagtaagatgtaagacctattgtatgtgtgtatatttatatacctaactgaagttggatgtctctataaaaagtacattgaatgcctttatctttggaaatcctacaatgcagaatttgtagttgtctgccataaaatgtgtaatactatctagttattatcctgcctattttatgagtagtgctcgaaaaccagaattcagatgaagaaaattttagtttccttgaaaattttaacacgatttgctagtcaaattttgattttgaatatatctcaatgcatttgataatcattgaatcaaggtgtgttaaattgtttccattttatataaattaaaaattacaaacccaaacatagaagaagcattttggagtttagcttggtttctatattcttttctatttctttcttcactaatctggtttgcaggtcaggaacatattctcttctgaaaagaaccaactgatgcttaaattctccaattttatttttacatctgcatcattccccttttaagattctgttttattatgctttacgttttaaatgttaaccagtatttacaagttgcatgccatgaatgtgaatacaggaat

SEQ ID NO: 26987 - DNA, 812 bp, Glycine max
  Intron number 1 from transcript Glyma20g02420.1 (locus Gly ma20g02420) derived from phytozome v7.0 (chr-ID Gm20; pos 2058430 to 2059241)
tgctagcaaatcctggaaccactacccctggcaaggttagtgatcaaactatattcaatctgagaagaaagaagaaaagaaacctactaggcacatctttacttgcatgtttcattttcatttttgtttgcttttctgggactgtatcttacttctgcttagttagttactatgatatatatatatgttaatgttttttttttttatcggaaaatgttagttgttaatctgctaatgtaaagttgaaatcccttcaattttgctcaagagaacaactatatatacaacccttgattcagttgttagtactgatcactatcaagtctcaagttgataattgattacattaagtgaagatttttgctttttatcgtcaaaaattagtttactagaatgttaattttgttagcagaggaaattgaacccatgggccacgacctttccccccttcccttctcccttaaccatctaacccaccttatatctcctacattaagtgaagatgatgaaaaattgcttctaagtcaatggtaaatgaaaggaggatgcctgcactatatttttcttccacgggtctgaaacttttgatatttggaaagttactttgagcaaggggaaaagactgaacccaaaactctggttaagaggaactaagttccttaccactcagaccaacaataggcattggttagctcaatcttgttaatgatgtaaaaaccataagcagtcatttattcattgccatgattggaaattctttattgttgcctttttctttctcattcttataccggagaattgtcaggtctatt

SEQ ID NO: 26988 - DNA, 875 bp, Glycine max
  Intron number 2 from transcript Glyma19g34740.1 (locus Gly ma19g34740) derived from phytozome v7.0 (chr-ID Gm19; pos 42344698 to 42345572)
ttgggaaacaggtaattaaactaattatatattttccctagctggcatagcatttcacattagtatagataatttaatccaagttaacttcaacttaatgaaagaaattaatcctttcaccgaaaaccaagaggttgaaatttgaaaaaccaatagtactcaggctcaaacagtgaaacaaagattcccggaatatcttcattaatttctatatgttgggtccttttctattctgttccatgaagctgatggaggagcagatgcatatggcttcataaacttctactcttggtagtatacaaattcatatcaaaatcttaatttatcggcagcctcgtgttttcttttattattactactattttaaagaaagggaatagtttagttactgctctttttttcagataattgtttcattgtttgggcccatgagcactttggttttttcttagtttttaagggaagcaaaatcataatcagtgggatatatgtcgctctgcaaagattctctcttttgctgcaacatttcacgtgctttcttaacataatatatttaagcacatcatcattcaatatcccatgacattattactactgtattattatggtgacttggagcagcaagctataccctattttattaatgaaaaatgttaacccaggggtactgaaggtattgattaaaaaaatttaaatagaaatatttttatcaagagaaagaacattctacacaataaatatttttctttcttaatttcttacataatattctaaagatactgattaatgtatcctttattaatttatttaatttaatgaatatttcctccatcattatcgatcttgtccactaatcttgtgataaccttgtgcag

SEQ ID NO: 26989 - DNA, 699 bp, Glycine max
  Intron number 2 from transcript Glyma20g24110.1 (locus Gly ma20g24110) derived from phytozome v7.0 (chr-ID Gm20; pos 33823139 to 33823837)
tcaggcttgtggtgggtaaacctattacacatttgaattgaggctggtttggttgtttacttttctaatgttttaagagtaaattagtacatgcaccaatagtataaaggatttttatagggccattcaatcaccacctgtcatgcatggtacggttgttgatttttataataactaccttaataggcatatcaacgatgatttttgattggttgacaatgtaaaccttttaaactgatggtgcatacttcatagtattaaacttatgttttaatcctgattggtggcattgcataggtctatttagtattaactcattattctcttaagtgtttaaactgtggaatgttattgtggataaccgctagaacttaaagctatcaagctatttttgtgataaccttattacacttgcacatgattgtcagataattgttttctcctgcttaaaccaatgtaactaagataaactgcaatttagtctggggcgcttaggcgtaagcaacttgaagccactcaaagaaacacatgtaaatttgaaccatattaatattaattaatacattgtcttggaagatcagctttgtgtgttatttaccgtatagatgcacaggaagtttttcttgagctttgaatttcccattaaatgtacgagttcatgcagggcatcattcaatagtgccaaggtttgaagcattg

SEQ ID NO: 26990 - DNA, 611 bp, Glycine max
  Intron number 1 from transcript Glyma18g21010.1 (locus Gly ma18g21010) derived from phytozome v7.0 (chr-ID Gm18; pos 23808557 to 23809167)
taaggaggaacatagctctcaaccaaaaaaataaggtacttgttagtgttgatacaaagaaaagaaaattgagagaaaactttcaaatgacatttgctaaggctataacagttatgagcgaaacttctaaaagaaaagttgatattttggaaaagatcagcacaagtcaagttgtaggatcatcctctaatgccacagtggatgaattagttggacaaaaaaatgaggataataacaaattgataacttgtttaagcatcctttaaaaacttgaaggaattggtgttgttccttttacaaaggcaatcaaggcattgaaagatgaccttacttgaagagatgtgtttctagtaatatcagatgagtggaagaaagacctagtccttaatctttgaatttatgaatatgcttatggtttgattaaaacatgtgcacacttgaatctctgaatttttatattttgttttcattaagacttgtaattttccattctacgaccctatgttatggattgttggatttatgaatgttatttagtcttgctaattttcagtgtgaagtgaaatatttatattgttcatatattattgtaaatctgcaagaggattgtc

SEQ ID NO: 26991 - DNA, 738 bp, Glycine max
  Intron number 3 from transcript Glyma18g25840.1 (locus Gly ma18g25840) derived from phytozome v7.0 (chr-ID Gm18; pos 29712896 to 29713633 reverse strand)
gaagtacccttaggaattgcaacaacaatctcactgttattcaaaacttttccttaagtttattaattgtcaagccaatcgagttacccattgtttagaaagggtgtctagatcttatgcttgtagacatatttttaattttgccccttctggtattgactatattattacaaatgaaatgtcacgaagtatttccactcaaaaaaaaatcaaatggtcagagaaagaaataaaataaatgaagaaaaaagaaaaaataaggaaaggtgaaaaagaacaaatacctgaacaagtgaaatgagaaatgattaaaaaaaatatatttaagtagttattaaaaaataggtacgtctaaccataagagaggtgtatttagtaattgtaggttggttttttgtgcccaaaagattatcaggatctagagaaaagatgaggcccaatccttaataagaatagagtgctgctaggtgcacccagcagttttgctggtgcacctaacaattactgtgaaaaggccataatgcccttcattaatttaaaaaaaaaaaacgaaacctctctctctccctccccgcgtttgcgcttctgcttcttcttctttcggatcaactctcttcttcttcttcctgcttcttcatcttcttgcgccttcttcttcattgcttgcacatcttctttgtgcctcttcttcttcttcgttgaggaggttgccgaggcagcttgcggtggtgctgcgag

SEQ ID NO: 26992 - DNA, 702 bp, Glycine max
  Intron number 2 from transcript Glyma19g01160.1 (locus Gly ma19g01160) derived from phytozome v7.0 (chr-ID Gm19; pos 811858 to 812559 reverse strand)
ggggtgctggtggagttggatcccttgttattcaggtttgatatctttcttctccattggttaatttgtcaacaagtttcaattttttctttttgaggtgaacaagtttcaattaagtagtgtcttattgaaatagttgaggctttagactctgccactaattattaatttcactttatttctccaaataacataattatatattgaattatatttgactgttattctacccgttttatttatacaaagttctgtaacataattatattgtttgataagtaaaaactttattaaacaaacagagcaattgggtattctaatctatttacaaaagtcttgcatggctaattagaaagattaaataaagacaagttattatagaatcaatgtactaattagaaaaaaaaagagtatcgaatattgtttatcttagccttgaatcatgtccacgatttgatcttaattaagtccataacaccagtaaaatcaaaaggtactccttgaaataccatattgttagtttgtttcacataatctaaatagatcaattcacagcatgccaaatgagatggcaaatagagtgcaactttttccttttgaacagagaactagactgaataaggttgttaaatcaaattattttgttgtgtatttgttgatgatgtagctcgcgaagcacgtttttggcgcatcaaaggttgc

SEQ ID NO: 26993 - DNA, 987 bp, Glycine max
  Intron number 1 from transcript Glyma19g20320.1 (locus Gly ma19g20320) derived from phytozome v7.0 (chr-ID Gm19; pos 24329453 to 24330439)
ctcctaccatgtatgcttcgaagcttcctcctttaccaccccactcttctctcctttgttgctcttttgttctgaacaccatttcatcttcccctctttaatgggtatctctttgtttcacaaaattccttgccttccatctgtttgatgttctgattatcgttgttagtttgctaaaaccctaaaaagtttgcatttttatgttgccggggccattgggtattcaaaatttcaacctttttttttgttacacattgttggaaaataaatgtttaatatgggtgtacgcttactggtgcttttttatgctctgaagatgcatgcttgattgatgggatgatccatttccattttggagtggctgtttgcttagttttactggtttttgcatttgattgaatttgctcagcattattacattttatgtttgatgcaatttaaagtaatttttggtgcgattctgttatttcaatcaaatattgcatgttaagtaataaaacatccaatacactgcaaccataaattgtaggaatatgaccattacctaatatctcaagcataatttgtgcttttgactcaataataattgcttttttatgttgtttgggttaatgagtattcaaattttcatgattttttttttatatagcagtcagtttttttttttggaaaaaattgtttaaggggtgtgcttttgatgctgttcttctgccttgcttgattggatggtccatttccatttgaagttgtttgtttgcttagtttactggtttttgcatttggtggaatttgatcactgtttttaatatgtctatgatggagttggtgcacatatccacatttaaatgcaagaaccagaggttcttctacctctttgtgctgagaaggcatctcagtttttgtgatacttgtatgagtacctatcattaatgttgtattctttgatgtgcagatttgacaagatcatcaataaggagattccttcta

SEQ ID NO: 26994 - DNA, 308 bp, Glycine max
  Intron number 1 from transcript Glyma19g28920.1 (locus Gly ma19g28920) derived from phytozome v7.0 (chr-ID Gm19; pos 36479188 to 36479495)
gctgcttcaccccaatcctccgctccagtacctctcttttctccttcctttcaccactttttctttcacccaattgaaccatacttagcttgcacgcttcaaaatttgaactttgaatcacttgattggaatttggaatattttggtttttgcttgttttcttgtctttttttttttatcgtgtgattgaaattctgaattgctcgattatacaaagtctttgttcttttagtgacgattaattttcatgaataaataataatatttgtgccattggtggtttctgaatcagactgtgtcgcctggtg

SEQ ID NO: 26995 - DNA, 656 bp, Glycine max
  Intron number 2 from transcript Glyma18g52290.1 (locus Gly ma18g52290) derived from phytozome v7.0 (chr-ID Gm18; pos 60936148 to 60936803)
cccaaagccaaggaatcttcccaagtcacgattgaggtgaggtgcattgttgatttacgatttctgggttttggttttagttttttcttaattactaatgaatttggatattcaatgttacttttcttttttgtgatttggaaattggaattgaagttgcttgttacaatacgacctcttgagtcttgatcattaatgggctatgcaagttacgattgacttgagttttgatcattcacgggatgcgcaaattacaattgacaagcacttttctgagtgccaaaagctgaattgaagctggtttcggctttatttatttatttcctttttgaggaatcttcctacttcgccgtactagaaacaattcaatcatgtactttccttttctttctaagattatagtactacgcatatcttaacttgtattttacatattgcccttgtaatttactcaaacaattgttgcagaaaaggaaaacaaaaatattattattatttttaaaaaattagagaatgaggtaaagtagtgcttggctggttagttttggacttagaacaaataaagtaaattacgcgattcatttcttagtcattctgcatggttgtaagtcatcctattctgtgattttgttttttattgtaggcaaatacagttt

SEQ ID NO: 26996 - DNA, 540 bp, Glycine max
  Intron number 1 from transcript Glyma17g20280.1 (locus Gly ma17g20280) derived from phytozome v7.0 (chr-ID Gm17; pos 18865381 to 18865920)
gcggtggtacttaaagacatgtgtttcttcaacaacaaggtgctactgtgtggtcctcacttctaataataaaaccacttgtcctttctgctgtgagcaacatagtgcttcttttttttgctaccctcccaagttaccatcattcctctttcttgtttttgttttcgttttttaaccaaaaagtttcaaacacactgcaagtgggtcttccctcttttttttttttttttcttcacacttatttttgaaactcattgcttccaaaccagagaagaaaaaaaaaatgaatactttgagctccctctacatgtttcgatccaacccattattcataaatgtaactttttcttttgcagcttgtgtagctagaacaagtgcttctaaagtttctgtctttcatcctttgcagcaccaaatttgatgataccccaatttgcttttttttttaaaaagattttgttggctttgacatgtttgtgatgtttttctctcacttgggttgcaggacattctggttataaagcctcagaagaaatcacc

SEQ ID NO: 26997 - DNA, 479 bp, Glycine max
  Intron number 1 from transcript Glyma17g32240.1 (locus Gly ma17g32240) derived from phytozome v7.0 (chr-ID Gm17; pos 35570042 to 35570520)
tttaacgttgaaacacgctactctaattacctagtgtattgagctcaattatttgcctgtcatttgatatttgtttatcatgcagccaaataaactgaacaaaatatatatgagactgagctggacctgaatcttcactagtttttaatgttaactagactattgttgggaagactatgttttagaatggagattttattctttaataaatgtttttattttaataatttgtttaagtgaaataagtaaaagtaataaattagtagaatttaatgttttaggttttttgtttattcttattaatattatatcttcatttaaaaataaatagaaatcactttttttcgtaacacattgaagtctttctgatgttcttctacaatcattttagctaaacatagatatactttaaatgaactacaataataataactataatgtctaattatatttattgttagtttaggttataaagggac

SEQ ID NO: 26998 - DNA, 943 bp, Glycine max
  Intron number 2 from transcript Glyma18g53620.1 (locus Gly ma18g53620) derived from phytozome v7.0 (chr-ID Gm18; pos 61889765 to 61890707)
tcttcttcaagaaacatcgtctgagcttgtggaacgttgatctgtgcgagcgtagggggacacgtagaactgcacccgtcaggggagcagctgtcactacggtggaggtgctcgccgacacggaggacctaggtcatgccttgtgtcgttaactgaatgttgttgttgggtatggttggtgtacgctatcgtttgaaagcataccaaccatatcttctcttctctttgcattcattttctttcaccctcacaattttaattttttttatccaaatacaaaattttgaaaataaaagaatttcaattaaagtatttgaaattcttagaattttaaatttctcagaattttaaattttgtcatccagacacactcttaagataattattgttgtagtctttgtgattgcattatcttcatctatatcattgcataatctttaaagtaattattacaaaagtcaaacatttttaatcatatgataatttttagaaaaaaatacataaacaccccttgagattttttttttaatttacatatagtcctccttgtttaatgtttacaacaacccttcaaagggatcttgatgttttttctctgcgaatactaattgttagattgttaatttttgttagtgggaggaattcaagcccacgatctctctctcttcttctcccttcaactatcaaggtaatcttataaggaatgttaatgtaatgttttcaaacatcaaggggttagttaatgtaatatacatgaggtttcatgttctcaaacattaaggggctagtgtaggaataaaaaaagagtgatattgtatgtaaatcgaaaaaaccttaaggttgtgagtgtaatttgcttttatttgagaaatgaattgggtttgatttggttatgtttgtctgtttagatatctccacggcaaggtcttcttgagagtgtgag

SEQ ID NO: 26999 - DNA, 986 bp, Glycine max
  Intron number 3 from transcript Glyma20g03220.1 (locus Gly ma20g03220) derived from phytozome v7.0 (chr-ID Gm20; pos 2917035 to 2918020)
aaagggagtcaagccaaggagaaaagacacacaaagtctcagaacactctcactactacccaaagcctgagaactcctcttctcctctctttttatcattttttccaattctttcttccatccctcccattataaagccctcatgaccatgagtggttaatcccttagttagggcctgataggcctaaaaagccaaacgatgtatagtacacttcaaatttatcaatgtaaaaggagtcccttacaagtttcttttttattctattatcttttctgtttctatcttgcatatttcatcttattatcctgttaggggttaggtgctcgagagagggcaacctttaattaagatataaggagagtatgcatgtatcgattttagggattagatgttcgagagagggtaacctttaatagaacaagaagaaagaatatcttaataaaatcattgctagacataaaatgattacattatgcttatgcgtcaaagcaagcatctagaattaaaccttcatgcattttatttattgaatcttttcaaagacatttgggagataggtaagtaacatagacttgtcatcatgagacatcaagggtaagtattttaacagatgcgggtagaataaaatcaattgcattggtaaagaaaatcattaattcatacatcctagcgcgataaaggcatgctaggtcttgacattcccatccatttgaattttactttgtatcactttgctttctcttttattgtttatttacaattttgaattcatgttttccaacccttaaatctttataaattcattacacttataaattgaaaaagtatttaaaataagtacaacacgagatccctgtgaaaatcgacactcagactttcgagattttactacttagacaaattgatacacttgccaatcggttaacaaattcctgaaacgaatttgtggtctactgaactctcaaagcttgcagccagtaccttt

SEQ ID NO: 27000 - DNA, 707 bp, Glycine max
  Intron number 2 from transcript Glyma17g05620.1 (locus Gly ma17g05620) derived from phytozome v7.0 (chr-ID Gm17; pos 3940243 to 3940949)
gctcgcggacgccgcgtgttctcctgtgttccttggataattggtttaccctctgccttgcttaagtgctatgcattttgctgagcttctttgtgggtgtcctaatcttgaggatttgaatgcggagaatttaggctgtatttacgatgaacatggcgatgaattttatgatgatatggaaggaattcaagctcggtttaaaacattgcccaagttggtcagagcccatatccataaacccgatgctgtggttccattagaagttgttaacaatgttgagtttatgagcatagattggatacgatgtgtgagatttctatgtcattactttccgctttttcaagaataacaggggattctgatactgacagattattgttttgatgtaacccttgcaggtatatcttcaatactacatgcctgaatttcacaatttaactcacattgaatttggctatttggatttggagcgtgctagcgagcggcttaaattgttgaaagtactgtagcattgccccaagcttcaaattcttgtcattgataaggtttgattagtttaagcacgatttctattttcatcctttcttcacatacttctatcaattttattttattctaggcttgttgtttgttaacagaaggatctaggactacatgctaacgagggagcagattggtcatacccacagtctattcccacgtgcgtt

SEQ ID NO: 27001 - DNA, 813 bp, Glycine max
  Intron number 2 from transcript Glyma18g48610.1 (locus Gly ma18g48610) derived from phytozome v7.0 (chr-ID Gm18; pos 58018006 to 58018818)
aatcccgagtagtacgttcctctattccctttccttcgaatcatgtctgatttcagcgaagttcgttcctttttcgctttttttatgttccctgccaaaaggttatgtggggttgcagttaaattggtgaatatgggttgggttatgttagcatcaaatctttattggtgtgtaaccctagattgattggttttcttagattttgacccacttggctttttttccttttattttttggggatattgaaatttattgtttttcaatcacgggttcaccagcgaataccgatcgtttgtgtttgtgtttttgtgattggttttaaagtgaagagttaccctgatcttgtcccttgttgatttcaaagagttgaactgcacatactgtatggtagtttgatttgtggtttgcatgatttgagcaggagttcattgggagaatatcaaactattctaaacatgagattagaggaaacatgagaggttgtttgcaaggttgttacagtgatgtgggagttgacttcccccattggaagtatgggatttggatttggtgattatatggtgttgggctattctacttagatcaagcaataagagaaaaagctaatgatgtcttgtgttatattggtttatagatcttaatgaattgagactttatgattggttttctatttaactgttatcttaatgtttgtgtgtgaaagagaaatggttgcttctgtgtctgattcagtctattataagagacagagttgatatactgtggttattctttgcagtgattatctgttcaagctccttcttattggagac

SEQ ID NO: 27002 - DNA, 503 bp, Glycine max
  Intron number 1 from transcript Glyma18g39880.1 (locus Gly ma18g39880) derived from phytozome v7.0 (chr-ID Gm18; pos 48154245 to 48154747)
tccaaatccgttaggtatgaatcctttggagttgaattttgaaagttgttaaatttatcatttttgatgtttttctctaggggtgtcccaagatcatcgattttccccttttatcaaaatttttaacactgctagatgatgcttcctttggaaattcatctttctcaattggttttgtttgtttattgattggatttattatgatatatggtcttcactgttgtgtgtgttagcttgtggctgtttcacacttattgatgcatggtttaatttatgagattcttgattattttaatgtattctgatcatgttcagaattgtggtttcgtattcatttttcagtttcagcatcacttgaaacatggcttgtaattgattgatttatttcttgaagcttgtgttactctcattcagtttcatgagctggtaaggtttatttttgttgaccatttctgatgttgttactcagtttggtgggctacgaggggctggaggttattaat

SEQ ID NO: 27003 - DNA, 1010 bp, Glycine max
  Intron number 1 from transcript Glyma18g38060.1 (locus Gly ma18g38060) derived from phytozome v7.0 (chr-ID Gm18; pos 45351151 to 45352160 reverse strand)
ttcttcttgacctttacaaggtattaaaatttatatgcttcataatatatatatatataaaatttttatttagttttttatgaaaaaatgttaatggttagaaggttagtttttttgttagaaaaggaaatagaactactcatcttttccttctttcttctcttttaatcattcaactcaccttatatctccataatttttatttagtgttattctatacttatttttttctagtttcattccttactataattgagttagattgggtaaagtattggtttatgtggtttaggtttaattactcatttgatttctatagtttcacaattggtactttttagttcctatagtttgaaagtaatttttttaatatctataatttaaatttatttcttttttagtctctatagtttaaaagtaatatttttaattcttatagtttgtattttaattttttttagtccttataatttgaaagtgatctttttaatccttataatttatattttaattactttttagttcttattataaaaaaatataaaaataattaactacaaattaattataaattatcaactattttttattataaattatcttgcgataaattagttacgaattatttgttaatattcttgtagttaattgtaattaataatattactcatattttaatggtaaagattaagagaaaattaaaatataaattataagaactaaaaaaatcactatcaaactatatgaactaaaaaagaattaaaatgtaaatgataaagattaaaaagatcatttttaaactacaggaactaaaaaataattaaaatacaaattataaggattaaaagatacaaattatgaaattatagagatcaaataagtgttttttctgtgttgtttaataatagttaatatgataatgaatgtgttaatcaaacaattatatatatgatcaatagtttttctgaaagacagaagtgtggaaaaatagaggagcaaattgaattgtt

SEQ ID NO: 27004 - DNA, 508 bp, Glycine max
  Intron number 1 from transcript Glyma19g01880.1 (locus Gly ma19g01880) derived from phytozome v7.0 (chr-ID Gm19; pos 1503750 to 1504257 reverse strand)
cattctcctcataggtaaacatttttgtgtctcgtttcgtgttttcgacgatgttattgttgcacttgaatttgcttagtagttgttgttgtagagattagagaatcatgcttggatgagaagaagaaagtatactaatcccattgataattttgtctctatagttctaagtatatatgtaatcctaattgccattttttgagagtaagaataacattaaatgaatcttaataccttaaaagtttagtttttgactcttggctaggagatccttggttcaaacagaaaaaaccttttgagaatatgtgaaaatggaaaaaaaatcccatgaaaactcaaaagcataggaaagagccagattcaagaatctaaccaatattatacttctagtgttcttgccctttagattttctgttgtgccttttttgggattaaaatataactttgacttgtttctgggtatactttgacagccattgcaggaatagaaaggtttgcattcaagggg

SEQ ID NO: 27005 - DNA, 460 bp, Glycine max
  Intron number 1 from transcript Glyma18g02560.1 (locus Gly ma18g02560) derived from phytozome v7.0 (chr-ID Gm18; pos 1623797 to 1624256 reverse strand)
ctgtaattaattccctgcatttttttttcttatatatatctttcgtttcatttgattttctctatgaatactctcagggaaatcaatcatggcgattccatgttgagtcagcattgttatcctcccttctgttccacttcctacttttattctttattttttgtttgttgaaatattcgtatcatcgtttgtcttctatgtattgtatactatcattcccatatatctgggtagaaaattgaaacacaaactaattagaaatgaagattgttaaatatatattgttgatatattatattgtccttaattaatttaatacattaacttatgcacatatattcctgtacttatcaattgcatatatatatggtgcttaatttatttgagatagtaaattatctaatagttcttgttcttttgctgggttggtggcagctagacaaaacctcgatcataatag

SEQ ID NO: 27006 - DNA, 400 bp, Glycine max
  Intron number 1 from transcript Glyma19g01330.1 (locus Gly ma19g01330) derived from phytozome v7.0 (chr-ID Gm19; pos 966762 to 967161 reverse strand)
actccaaactgttacactcacggatctttcttcaggtaagttgaatacacaaactaaaaattgcattttttttagtacctcaaattaaaatttgcattttttttttagttcttcgaaaaatgttttttttgtccctcctacggttaaaataaaactgttccaaattgtgcaccaaactgccaaaaactcgatgggaggactaaaataagcatttttttttccaaattgaggactaaaaaaaacaaattaaaatttggggagccagaaacaaaagtgaccctaatttgagggatcaaaaacatgattaagccttatttcttgaatggttacgaatattaaaatgattgtaattgtattatcatttaaaaaaattctcttctattgtttgcagaagtggggg

SEQ ID NO: 27007 - DNA, 347 bp, Glycine max
  Intron number 1 from transcript Glyma17g37690.1 (locus Gly ma17g37690) derived from phytozome v7.0 (chr-ID Gm17; pos 41428100 to 41428446)
tttctctttctccaccgcaacacactcaccttcaggtatttccttctttctttttcttttaaatgttatttttgttgttcatttgcgatctgtaaatcaaatcagacggctttagtgcattactcaagattatcattgttctcggaactctgcacttgcatacggaaaaaaatgttttttttaaaaataggaaaatggactttaggatattgtcatgatgcaatttaatgagcgtggaattggaggatatttggtcttcaattgtaggaagttgcttgaatgttacttatgttatgctgtttggagtaaccgtttttatttttatttttcaatgtcagggatacaaa

SEQ ID NO: 27008 - DNA, 578 bp, Glycine max
  Intron number 1 from transcript Glyma18g05110.1 (locus Gly ma18g05110) derived from phytozome v7.0 (chr-ID Gm18; pos 3860073 to 3860650)
ttgtaagtgtaacatgcaatttcttctacaactacataatggtcttaattatacaacaaatttcagaatctgtgtaatatataacaaaatataaagtataacaacttcatgttatttaaacattatataattaaccccgtgtcacagtcttcggtcatctctttctcactctcactttctatcttttttcatgtaattcacatatatgatgttttcccaagatcaaatgaggctacaaaagctatcttgtttttactgtaccagatacatattcagaagtcagaacacaaacatcaaagtaaaaaagttgagtaaattccaataactaatgacgcatgcatattttatattaaaatttattaaaaatataaaaaaaaatccattagacaagaaatgatgagatctaaaattttttataatttttaataaatttcagttaataatactaaaggattaattaattaattgtctggtatatatatatatatatatatatatatatatatacacactaataattggtataacttttttggtttatgcaacaggtatcagtgctggcccctaacatcccagca

SEQ ID NO: 27009 - DNA, 836 bp, Glycine max
  Intron number 2 from transcript Glyma18g20600.1 (locus Gly ma18g20600) derived from phytozome v7.0 (chr-ID Gm18; pos 22611148 to 22611983)
ccacgcgctgttttaaccaccaatctggcttctgaggtatgtatgatcatcataacgtcgtttcaatccaatcactattataattataattgtaagtattactgagaatgattaatttactccgagagttacttcctgtctccgtccttcattttccttaatctaacaatttaatctaatgattaaagtaagttacttcgatcattagattaaaaaaacaatgaaagatgacgagtcagaatgaaaagtaactcctcgagtccctctcaattttattattattattattattattattattattattattattattattattattattattattattattatttaatgctgctgataaaatcgtattggatgtctgttagcggtaggtaaccttgaatgcagctctgtaacaaagttgcaaagaattagtaattttaatggaaatggtgaagcatgttcactcttgagccttgacagtgtctagagcggaacattgaaaatataacgttaattcgcctgaggcattgaatacttgtacatgagaatatagcttgtgtatgttataccaaggggtttagctcagttggtaaagtaaggtcagggtgcatgagtgttataaattacctggtacatgtcttcaatttctacggataaaaaagaagttaatttgggctcgaaattaacgtattgtgtgtttgtctgcgtaaattttaatcaatcattcaatgtgcttctctgcttgtctgtctttatcaacttgaatttgagtgttgtgttgactgtatttttggcaatggagcagctttctgggaagttcaaccttgacggaaatattg

SEQ ID NO: 27010 - DNA, 877 bp, Glycine max
  Intron number 1 from transcript Glyma18g45300.1 (locus Gly ma18g45300) derived from phytozome v7.0 (chr-ID Gm18; pos 55066151 to 55067027 reverse strand)
ttggtatgtaaaaaccaagttttttttatatatatatttttgtgtacttaatttttccttgagtttcagcttcctgtcttttaaaagtttaggtaaatgctggatacaaagcaggtttatgcaaaagggtggtgtttttattttttgtttttttgtttttttttgctcctttagaaaaacctttggtatttttggttgcttttgctctgttcagagttcagggtcaagaaatatttgaagtaaatgagtggttttttttgacaaaatttatgatactgagtttgaattttctatttttaagcatttttcaaaattttcctaccaaagtatgttttgaggttgtaataatatggcaaaacatttttctatttttgtatttatttgaatgtctttttttttattcctttttgttacgaatcaaatttctggtttcagtaccagaaagttgaaaacttgataactgagcaagtacccatttttcagagatggaaacagaaggaaaaaaaattaactttgttggaagataactgcattttttcctcatgattttctactcaaaccctagagtgctgtgatcagtgatttttgcaatttaattaaaagttttagatggatcagctaattcagctaaacaacttaaaaaatccaaagtttgcgtctttgttttctttgttcctagtttctgggaatcctttgatgagttttcattttggtttccttgcatgtttaagaagattcaaatttttggttttgctaaaatactcaaatttttgttatggcatgttttctaatgaatcattttgctttctgagtacattgtttgttgatctcttgcttgtagatgttggtttgattgtgtggacttaggagtgaatag

SEQ ID NO: 27011 - DNA, 671 bp, Glycine max
  Intron number 1 from transcript Glyma19g44670.2 (locus Gly ma19g44670) derived from phytozome v7.0 (chr-ID Gm19; pos 50031792 to 50032462)
tttcttgcactaaagagcagctgcagacaaacaaggtgaattttctctctctctctctcatatccatctttgttgcttttgtctgtcttttctactccgaaattaatattcatggctactaccgctcactgagcaaacatggtgttcgattttttctcttgtcttttctttgatgcacaacttctaaggtttcgtttggtttgtttaaaagctgacacaaacatgaagttccactagatttaagatttgtttgtatctttgttttaattttctagctatatcaaggatatgattttcatggcatatatagttgcaaactccaccgtatattggcctcctatatcttctccttttctaaaaaaaaaaagttttaaccttaatttgctctttatcttcttgctcgtgtgatgattattgtcaaatatatagcaggaaaaataaaaggattattaatttgttattattgttgattctttaagtttactcatttctcttgttttgaatgtcttgtaaattagctccttaatctattcgcgtaatgaagttaattattaccaagtcatgctcttgaaattttttgtctgtgtgaattcttatcacatgtgaacattacgtaattatagcatcttttggggttcgttagtaggttggattagcgagtgagatcctcc

SEQ ID NO: 27012 - DNA, 974 bp, Glycine max
  Intron number 1 from transcript Glyma19g06110.1 (locus Gly ma19g06110) derived from phytozome v7.0 (chr-ID Gm19; pos 6816303 to 6817276 reverse strand)
ggaaaacgtgtcaccaggtacttttctttcttttttgagattttgagaatacccatttcgttttttatctgttttgatgttgtggggtgtgccggtgtgtggagagggctaaatctgaatgtgggtatgtgagggaatgtggcaattacgttaaaaatgggaactttggttgatgtgtgtggggttatatagtaatgattgttgttagtgttgaacgtgtggattagcttgtatgaagttgtttcagctgaacgagtagtcttaagtttgagttttgagtgtgtagttgggttaattttttggacggagaactttgttactcagtgaagtaagtaggattttttttttttgtagaggatatatgtagttttgtactgagaaaacaatggcgatgcttgcgatgttgtagatttgcttttactttgtgttttgttccgttttatgttgtggggtgtggtggtttgtagagaggcctagagggctcgaagttctgaaactccattgaatatcagcaaaaactagagttgaagagagaagagaaaaaccagagaaaactttgaactattgaagtctatcaagatgattcattccaaaatgaattattacactgtgtttggtatttataccaagtctaatcggtaactccttaaactgaatagcaaatttgttgagcaggaaaactaacttgatgtcatggataactgattctgttgaaccagttgttagacactggatattgagggtgaaatccgtatgtggggattgtgcgaaaatatggactttgattgatggggttgtatggtgatgatgatgttttatgacgttgtgattttgcttttactttgtgtgtattgttcagtttctgcttgtttttgtttctagattttgaggtttgtttggatgataacatttttgtttgcttggttttccatattgaagtgtcggcaaaaaaccagggattttgctgtttcttg

SEQ ID NO: 27013 - DNA, 720 bp, Glycine max
  Intron number 3 from transcript Glyma17g10630.1 (locus Gly ma17g10630) derived from phytozome v7.0 (chr-ID Gm17; pos 7979144 to 7979863)
cccagttagaaaacaggtatctatatttgggagtttatacactccattgagtaaaagagttaagaaaaagataaaaaagaagaataagaaaaattataatctatttcttgtttttcattatagctagtgctataacttttttttatatttttttctcttctcatttatctctccatttcgtcccaacctacccaaaaataaagtgaacttttattataattcaaaatgaaaaaagagaaaagtaaaaaattgtaataaagtgacaataaaaaaaagaaagatataaaaataagcagaattgtaaaagatatattaagagagaaaaaaaaactaaaacaataagaaaattataacactggatcaactaacttacgattgttctcatttaatccgtaatattgatttcaagttcctagttagttaaatacttaactaaagaatatttatatacaattgtgttaaggaaaatatttgatgaaaaaaataaaaaataatcataaaaatatataaaataaaaataatttatatatcattactattgtattaaatacttaaaaaaaatttatatcacctataatagttgtacccacattacctataaatgtctgtggtttagtcacacaaaaaatactagaatataattttttttatatagaaatactactatttatattattaattaaaatgtacctgactcatttacatatttcaggtgcaaag

SEQ ID NO: 27014 - DNA, 1017 bp, Glycine max
  Intron number 1 from transcript Glyma19g39280.1 (locus Gly ma19g39280) derived from phytozome v7.0 (chr-ID Gm19; pos 46018196 to 46019212)
tccccgctcccgttcccagtgctaggtacttcttctttcttcacttttttcaaatgggcttcgctaaaaatctcaaagtttgtttttttttttttaatttcttttttggtgtttagagattttatcgttggtgggtctgtttccctgtgagtgagtgggtgggaagtaaggggacttgaagactaaggaggtagaatttttttttttttttttactttttgtacgaggttacaagtattttttacaagagaaaatcttgttcgaagcgacaaattttaaaactgtatattaggacccaaactcgagacaagtggttaaactgaaaaattatattctgtgttgggattttgtgaagtagagaactgaatgtgttgacgctcgatggaggaatggacgttattcttagatgaggactttcagcctttgcgtgggagaaaagtgaaagaagagggatgcaaaactaaaaagttagacagttgcgttcaaaaggaaattaagctttaacctttatgatagttgcattaaaaagctaattaatgtttgcctttatttgctgaaaaaatacctgacggtaatgtaggatttaaaagttatcttatttttcttaggtttgcctttatttgctgaaaaaaaatgcctaacggtaatgtaggatttaaaagttatcttatgttcttaggcttttgcataaacagtaatacttcgtaaaatggaagctagacattttatgcgactagtttgagtcaagttttctttgatttgtgtaattgcagagtgaggaagcttgtgaatgtgtttgggtttgggattcatgtggattatgtgttttgttagccaccgaatgaacttagaaataggattaaggacctttccaaaaaatcataaatagaaatttcatcgaactatgtacttattctatctgtatttaccatttcttatgagttatgagccatatgctaatgtgattttcccatcatcaattgcagtgttagtgtgtttggcgtctcagcagaatca

SEQ ID NO: 27015 - DNA, 760 bp, Glycine max
  Intron number 1 from transcript Glyma19g11100.1 (locus Gly ma19g11100) derived from phytozome v7.0 (chr-ID Gm19; pos 13863203 to 13863962 reverse strand)
tgtcattcaaccttggtataaattccttcaagaaagtgatttcagccacggagacgaactgttgttctactataggcgtgacgacaaaatctggaaaattgttattagaagccaaaaagattgggacgacatcgacataaattaggttttattgttgttattcaatctattttttttattttgacagacaattttagttatctttgtttggaactatctttatgcttatgttttatcaatttgtcaatcaatatactgcactatgtaaaactctttaatatgaatgttaatctttttcctttttttacaatatcttttctttaattctttcataaaaaattaattgacacccatgcatatgcacgataaagatgataagattaatagagtataattgttacattttttattcatgcgataaattaaatattttattcgttgaaagactaaattattctccttttatatgtccaaggatcaaaatgtttatttattatttattttgagaggagagatactttggttccctcgtatgaaaagtttagaaagcgggtcctacgcaatcaccacgtgcaccttgcattttcttaccctgccccgtgccctctcttccgcaaacctttctagattctttctttaacgaaaaaaaaaaaaaaacaagaccaagaaagaacacttcacatgctctgtttccatagccagaaatagccataaaacaatcttagtttcaattccataatctcctcctccatagccacaa

SEQ ID NO: 27016 - DNA, 520 bp, Glycine max
  Intron number 4 from transcript Glyma17g35090.1 (locus Gly ma17g35090) derived from phytozome v7.0 (chr-ID Gm17; pos 39078443 to 39078962)
agtggtctctgtttgtgagtcatgtcaccagaaagtaaaacaaaaaaaattctccctcagatgtaaaataaaaccttattgttgttgttgttcttcttcccgttttaggaagatggttttggtaaaaaagaaattgtacagtaaattagagtgtaccaaatgagaaaaatatataaagagctgttacatgaaaagagaaaataaagttccaaaattttgattggtcatgtagtatggtctctttctctaaaatctctgttccacttttcttatcaaagttgacttgtgactgctgtttcttgaaatcaaaggggataaaaatcattaaaacgccattgattgaacatctgccacccctcttttgcttttttcttttttattttttaaaatcgtcaattttgttaagaaactggtttaggcctttgtgtgtatgtgttgcatgcttttttttttttttttttttttacttttatcttatggaacatgtgtatggataggttacaattcaggaagcataagc

SEQ ID NO: 27017 - DNA, 1008 bp, Glycine max
  Intron number 1 from transcript Glyma20g27390.1 (locus Gly ma20g27390) derived from phytozome v7.0 (chr-ID Gm20; pos 36565437 to 36566444)
agtcggaaggttgcaccacaccaggccgtcgcgttgtaaggttccaagtcagtgtctttcttctttatcaattttattacgacttgtttccaaataggcatcaactgagtgcaacctgcacttaactctacaatggctgggaaattgacatgtgtttttgaacttttgaagtattggaatttgaattaattagtgagttcggaagtattgtattttgtaagagtgagtgttcgacattgcattctgtgactttttattactgtttttgcttgaagtttctggtattgggaatgaaattgaaatgagaaggtgttcaacacttttgtaattagtgatgctgattgaggttcaatcctttaagcttttcttacttgttaccgattgtcactttttggacggaaggatggactgatacaatttcagattgatataggaatgggtaacagattgctggatctaaatacgagaaatgccatggcaagtgttgtaggataaaagatgtaatgggaattgttacatgggttgggggaagttactgttattattttaaagtctgtattttttagaaacaggcactggttgcttacttgatttttaattgctaaaacattgtatgtaagcaagtgaactgtcttttgtatcaaaatagggtaccacttttacctaatgctgtttttacttgaagtttctgtcattgtagattctaaatttgttctgctgaaactttttttttgtgcatattaatttgtgatatgtttgtctttttttggcctttttattaattcaaggtataaagttttcaatttttttaatatagaccaagtcatgtgggtcaataagtgacccactagtttgaccactgacccaatgccttgaccggttcgatcactttttggtttttaaaactatgcttcgtagttcctaggccaatgtttgcattcacttccttatatgctctttggaaccatcacaggctttttagacagctgacaagagacaacaagatat

SEQ ID NO: 27018 - DNA, 428 bp, Glycine max
  Intron number 1 from transcript Glyma18g44570.1 (locus Gly ma18g44570) derived from phytozome v7.0 (chr-ID Gm18; pos 54301867 to 54302294 reverse strand)
tagaaggacagattggagtctcaacttaaatcaggtaattgcatagatcagttgtatatgtaatatgcttatacatggaatagattctcagagtgtttgatttcatttttcaaatatgatttttcacgggtcagaacgtgatcttcagaaattaataattatagctttcacatctcatgcataattttttcattctcatcgagttttcaaacacgcaatactagacattgattctcatcttatcaagttaaaaaaaattgtttatctttttcttgatgaatatttacaaattttgataattaaagacacagcaatttaaagcttataaagagagtaatagatataaaactttcactcacttattcatgaattgggcaattggagcttcaatgtttctcagatatttgcctttgtcatagtgcagggtg

SEQ ID NO: 27019 - DNA, 412 bp, Glycine max
  Intron number 1 from transcript Glyma18g49740.1 (locus Gly ma18g49740) derived from phytozome v7.0 (chr-ID Gm18; pos 59083329 to 59083740)
ggaacaacactgccaccggaattgatcaccaccaagtacgcaccttctcttctctttgtctttttccctcagataccctttctgggtatgtgtcaaaattgtttatttttaaaatgttctcgtcttttgggctaatgggtatgtgccaaaattgatcatttcttcacttgaattggtgggtatgtgtcaaaattgttcattttttaaatgctctcgtcctttgcgttaatgggtatgtgtcaaaattgttcattttttaaatgctctcgtcctttgcgttaatgggtatgtgtcaaaattgttaatttcttcatttgaattggtgggtatgtgtcaaaaaaacaattttattttttgtgttggattttttgttgcagcctgcgagggtgatagggactgggacgtttggttg

SEQ ID NO: 27020 - DNA, 866 bp, Glycine max
  Intron number 1 from transcript Glyma18g53700.1 (locus Gly ma18g53700) derived from phytozome v7.0 (chr-ID Gm18; pos 61964788 to 61965653)
atccattcactcgctccctcttaaaacctccttacggtaagttttctctgatctcttaatacacttttctcagatcgcgatccattcctgcatgtttcctttgttatctctcaacttcgcttgatctactattacatcacatgcaccgctttttttttttctcattaacctcgaagttgaaaggaacaacgatcgatcgccatcgtaactatcggagtgtctcgtgatggcgtgtttggtaggatgtgacctgagtatcggaaagtttatttttacggaagagtgaaaatggaatgtgttttgctttttttttttttttactaaaattttcaatttgaaaatttgcatgaggttcatttttatcctaaagcttgttagaataatgcttcactgcagaatttttcttttcagtttttgtgcgagttgtgttactatgaactcgtcattgcatgctaagtatgatgcacagatattgtgtatctgatacaattccttattattctaaaaatatataggacatgatacgaggaagatacatatctagatttttataaaaaaaaatcataaaacataataaatatatagttgcaattttgcaaattcaaattaagaaaacattactaaaagcaataaaaattattaatcattcgctttctattgtctacaaataggaagagtgtcattctgattcctttgtaagctgcaaagagcatgtaagagtcataataagtctatatatgctttctataagctcttcgaaatgcccacttaagtgacaattagtttgaaggtgtagtattgtttcttaaacatctctcatatagaaggcaaatatttgatgcttgattgtgttcattcaggatcaa

SEQ ID NO: 27021 - DNA, 621 bp, Glycine max
  Intron number 1 from transcript Glyma18g45960.1 (locus Gly ma18g45960) derived from phytozome v7.0 (chr-ID Gm18; pos 55648511 to 55649131 reverse strand)
ttgcttctgggaggacttccgtttcatcagatcctgtaagcttaatatctcttttttattttcccatatcaaagttttaatttttggagaaagttctttttttttttcgttgttggaaaaatggaaaaactaagggtgatcatgaagtcaaacatgttcattgtttagattattgggaaatgtggaatgttgctttttgttaggcataagattttcttctttatttttttaagatggtcatgaatttggtttagcaccctttgttgatgcatttattataaatgtgaatgatttcccttttgtctagttgattgtgattttgatcgttattttttgtttttgtttttttattttgattttgagatataactttatttgattttaaaaaggtttataatctgattgtttgtgttctgcttctcaaaatttgccatttgttgttgttatatttatacacttgtgtcttgggattcacctgattttctaagctaatgagggcacaagctttgtgttactttgatatgattgtattggttttttggtcattaccatattacttctaatttaattcaaactattttttcagggaggggattgtaccacaaaaagagtaaagtttga

SEQ ID NO: 27022 - DNA, 1040 bp, Glycine max
  Intron number 2 from transcript Glyma20g26670.5 (locus Gly ma20g26670) derived from phytozome v7.0 (chr-ID Gm20; pos 36041945 to 36042984)
tgtcagtgcgcgtgcttgctgcgagctgtcccgtaccttccgtcgttcttgtcaagatcgctagtagtctcgttgtgagtcttgctggtttggttctaggacgcatcaaaaatgtttttttttttttttttttaacagctacatgagaaatgttcttcaaatgcgttttgaaaaaaaattattactaatgttctggatgatagaaaaccttaaattgtgggcctgatagatgttaaaattaggtagtcgtagtcctgtttgtgtgtgttgttctatgtgaagagatgagatgggtagaatttgtgagtttgtctagcttggttcataagaaggtattaagattcaaatttatagggatgaatggaaaagatgggtgatgcacaaggacattgatcatccaatggcaagagaagaatgctgcatagtaggttccctttttttttcctttgtttaaaattataaattcaataatgttttcagttaattcatacataagtaagtaattggttattcttggagatgaactgaagcagtaatcagatttcctggacattcattgttccttttcccctgcttgggcatacatttcgtcaatccattgcatgtgatactttattattaattttagcattgaaaaatctatgctttgagcggttagtgtattgtatccctgcttatgttgcttttgcatgtttttctttattaattttttaactgtatttatcttttgtttttaagtttctacatcaccctggaaatgctaatacctaaataaaaaataatttatggttcccaacaaacaagttttacagaggcattctacaaaaaatcacttgaatggaacaatttgagccttttttatcagcttattgaattccatacataaatttgcttagtttaccagaaataaaatccatgccagagtcatccttgaaagggctgtatgtacagtcctttcatcagttttctaatactactaatcagtaaactacattcctttcacaggtgatcctgattcctgaggtgaggttctaaatccc

SEQ ID NO: 27023 - DNA, 587 bp, Glycine max
  Intron number 2 from transcript Glyma18g06620.1 (locus Gly ma18g06620) derived from phytozome v7.0 (chr-ID Gm18; pos 5196090 to 5196676)
ctcagctgactaaagaacacctttccaatttccaagtacctaattcctctgtctaatcttcccttccttttaaaatgaatttcatgttattttctcttacaatgtatttatatttagggctgctatgtcattctttgtcagtaactagtaagtactagtcacttcacttctgtcataacagaaattatttgttaattatttaattcttatatccctaggttttgaaatagctatgtagctgctgcaaatgaggtcactagtgatagtaattattgctgtatagcatttttcttatataaatttttacttgtaaattaatcagtgatagacttgtcattctacatgttctgtttcttgcccctttgcataaatgtgtccttgtttgatctgtaatataattctgaagtaatatattgctaagattttttcatttttgtttgtgatggtgtaatgaaatttggattcttgtctccttatttccaaccataaatgcatttgtatccaagtttattttgattatatatttacagttttttgtttactattttgtaggctgttgtttttactgatatcagtcttgagaaagc

SEQ ID NO: 27024 - DNA, 671 bp, Glycine max; identical to SEQ ID NO: 27011
  Intron number 1 from transcript Glyma19g44670.1 (locus Gly ma19g44670) derived from phytozome v7.0 (chr-ID Gm19; pos 50031792 to 50032462)

SEQ ID NO: 27025 - DNA, 849 bp, Glycine max
  Intron number 1 from transcript Glyma17g16830.1 (locus Gly ma17g16830) derived from phytozome v7.0 (chr-ID Gm17; pos 13624999 to 13625847)
gctgggagctctactgcctcgaacacggcattcaggtctattttctcaaccctaaatctctgtaaaaaaatttagcctgcatttttcccgatttgatttgttcgcgtttttgagatgttaaatctggatctgtttacgctgttagttctctttctgcatctgaaccgtttcttcgcgacttttttgtcgtatgtgcgtattgtttgtgtttcgttctgtattgcttcggtgatttaccgatctgtgtgtgctttatgttttacgtgaacttttctttcgtttttgttccgattggttctcagatttacacgctatgtattttgcgaacttttggatctggttctctgttgttcgagtgatttgtaatatagatttgatgatgatgccttctttgttgaatatatttagtttacaattttgttcatgtttatcgttgtatttcaaatggacgaaaaacctagatgcatttctctaagtgttttttgtgttgttttccaactggaatttgagttttgtcttaataatttatgtttattatgctgatattgagatgaaactcgagttttaattgaaaaatacaccaaaaatgccttgggaatctcagatttgttcatttcggatctgtgttaattgttatggtctatggatatgaatgcggccaggatttgactctggtagtactttctggaggaaaaccacctagtttcgtcattcaaattattattattatatcttggtttggaaatcttaatgtattctggttgaggaaaactagtaaaactttttcaatatattttgataatggataaattctaatgtgagctatgttgtatgtgttgtttcagcctg

SEQ ID NO: 27026 - DNA, 760 bp, Glycine max
  Intron number 2 from transcript Glyma19g28780.1 (locus Gly ma19g28780) derived from phytozome v7.0 (chr-ID Gm19; pos 36370448 to 36371207 reverse strand)
acaaagcacccttctgggattgtgcctacccttcagtgagtatcacttttctttgaagtgaaagcttctttggattgtaattgcgagcatgagatgggtaactgtgttgtttgcaacaatgtgttgtagtttgaagttgtggtctgtgggttttttgttcatgagtaataaagaagtgttatccaaatccaagtgatcccccgtgtatgatattgagtttgagattactacttccaaattaacctcgtggttttatgtcgagtggatcagatgggtttacaagtatttgggctaaagatgttttcttggtcaacgtaccatttacttgtattccaatagcaactattgcttcaaaacagaaactgttttgcttaagaattacctgtaaatgatcagtcagtccttttttctgtatgtcagcattcaaattcgaatatgatacatatctcgttatgggaattcttagctcaattcagaatttcagccatcagaactaggtgaatgaggtttgagaggcacgtccataatagatgggggttatactctaatgtggaaatccttgtagagttgtagtgtattccatatctcttctaagattagctcaaaatatatacagattatgctgattgcattcatgtaaattttatgttaattacttagactggataatgatttcttatatttgcattggaatatctaaaattgtttactatttatactgccagaaatattgtgtcaacggtcaatttggactgtaaat

SEQ ID NO: 27027 - DNA, 895 bp, Glycine max
  Intron number 3 from transcript Glyma20g16880.1 (locus Gly ma20g16880) derived from phytozome v7.0 (chr-ID Gm20; pos 23676560 to 23677454)
ttgcactaccggataaaggcaaagcacaagaagaggtaaaagttaccacatatggccttccttctccaacttgctctctttaacagatttacatcagttatatgccatatgtccatgtattcatatatgctaagttcagtctaaagataaatagaaagattttgagtcatatctctgtgttttgactgttgaaatgaacattttgggattcagatagatacatatatttaataccatatgtaaaacgtgggaatggagaaacaaaataaatgtgtattttcttggtactatcataaaatttgtggcaacttaggtctcttatatgaagaagaggtgtggacttagttgaatgaactagtttctaaattcacactttgatgtttggttttttgcggttctagaatgaaattgaattaagattatcaaatcaaatcgttcttgcagtcttataaaatcagtcctcaacgacttatttattaatctagttcttttgtcttgatggatttctaaatttacactttgatgtttggtttttgttgcggttctaaaatgaattagaattaagattatcaaatcaaatagttcttgcagacttatgattataaaatcaatcctcaacctcaacaacatatttagtaagaagaaaggataaatcttgttctatttgagatgatgaagattaatgttgtcatccttgcaaattcctttttcttgctgtatggtggtgtttgtttattctttatataagcttgaacttgctgtaatttctacttttctagtgatttcatatgagacattgtgttcattctgttttatctgaatataatttagtatatacacaaatattgattttgatatgctaatgagatatgctatttgcatatttagaatccat

SEQ ID NO: 27028 - DNA, 635 bp, Glycine max
  Intron number 3 from transcript Glyma20g21190.1 (locus Gly ma20g21190) derived from phytozome v7.0 (chr-ID Gm20; pos 30240221 to 30240855)
cgctacaagctccttggtggcctagctgtgcgcaggtatatgcattcttgtttttattgttgtttttactaaaatgatatacctattcatttcttagttgtttacattgtagacaaatcttgatagctgttggaattgtggatgcgggcttttttttcttttcattcttgattgcttcctaatctattgcaagaaattgtagacaaatctggtgcagctgcaattccagttggagatttcagaagccttgatgttgctgatggaattgtggttgtggaccatgttttaaaatcttgattgcttcctaacctaattgatgaacataatttctactagtaacattgtttttcttttgatttgataacttattatttgtgaatgttattttgctttcttcttgtatctatgtttttaattattgaaaaatgtgcggagatgcatttatttttgtaaggaaaattttactttttcttaattgcatccgtgagactaaccattgattagtatcttgacaatttatttaactgctaaccctctgtattgatgtccttttttccccctttccatgaatgcaattcttgtgtgggtttgtagtgacattgcagactgttgaactttctgtttcagggcttgct

SEQ ID NO: 27029 - DNA, 561 bp, Glycine max
  Intron number 2 from transcript Glyma18g44030.1 (locus Gly ma18g44030) derived from phytozome v7.0 (chr-ID Gm18; pos 53616293 to 53616853 reverse strand)
tttcaagtggtgagtgagcactgttttttttttttttgtcaccatttgagttaaacaattatattttttgtgtctttttggttattatttgatcaacaaagacacttggaggccggttcttatttgctgttatttacatatttggacttgtttctgttattagcttcttctgtcttgtatgtcttgtggggtcagtttcttatttacttgtttttaatggtcctttgaattttctttttctacttctgctttgttcatcttctttttctattttaattttgttggtataaacacggtttgaatggttaaaacaaggttcatatcttgcctaacatattctaagttgaaaaagtctaacccaaaaagtatgccaatgtatgtttctatgttttgacaaacaataaacttcattgtaatgatataatcaagatgtataatcatagtaaacaaggtttgatttattgatggcttgaaacatgttattcttgtcattatttggatttgtattctaaatacttgtttgttctacttggacagcaggaaccgcttaagaaacaagac

SEQ ID NO: 27030 - DNA, 943 bp, Glycine max
  Intron number 1 from transcript Glyma20g29710.1 (locus Gly ma20g29710) derived from phytozome v7.0 (chr-ID Gm20; pos 38555254 to 38556196)
gctgttggagttctgtccccattaaggcaggttggtttctttcttcttccctgtttgtgacctttttgtcaatcataccacagtgagcatattcttgatatgtacttgacaaaggggcattattccatactcttgataccgttatattattaaatggagacatccttggtcttcttgaagaaaggtttctcttccttgatttgaaagtacgcctactatttatttgaactcagattatgttatcaaatggaaatgtggacatgtttaactgattttaacatctataaatttgagatgtcttaataagcttttcttttcactttatttgaattaattcttatacatttgtccaatcaattctgggtatgaaaacattatatatttgttttattaccatattattgataagaaaaataatacttgtacgaaggggtgtttgtggcaacataagaaaattctcaaataagcacgtacaatataaaaatcttctaactaaaatattagtttaaaaatatataaatttttggttcgatttaagtatgattgacttttaaatttgaatttgaaaatcaatccaattccattatcttttgtttgattttgttattatcagtcaagtaatactctgttaattaaactaatttcatccatttttttattctgacttagttaaaaatacttgtgaaatgcatgacttggtacttattagaatttcataattcttgaggggagttacttcgtactaatacgattaaaagaaaaacaaaataatttgacaattctttttacaccttttggcagactagaccagcattttgactcagtaaattcagctggtaataaacaaaagtgttatagtcaaccatcgggcatttatatcattttttaaatttttacctgacattgttggggcaaatacatttgtgtacaggcttgcaaagga

SEQ ID NO: 27031 - DNA, 666 bp, Glycine max
  Intron number 2 from transcript Glyma17g15350.1 (locus Gly ma17g15350) derived from phytozome v7.0 (chr-ID Gm17; pos 12057633 to 12058298 reverse strand)
ttctgagactcttgatcctacttcactctccaacggtatattcttcttttctttcttcctataatcctattgttttgaaggaaatatctataaagccaaatatataatcaagaatgaaaatgttgagcctaaaaggaaaaagtattcatcttttggcactgtgtgtgtttggattcaggttggatcatcctaaatcacatcaaaataccagtgattttagggaaaatattcatgcttttggtttcacgttgaaaagttgactttggatctaaaactaattttgacttgaagcgactttattagcttttgcattatatatataaaaaaatctatactgaattttgtaagtaacttgcttttaaaataaaaatatttgccaaaatgggttgacacatccgagtgagtcttattcttacacaaatcacattactttaaaatcaatttggtttaaaattaattatgcaaactccacgaacacacactaagtgatgaggttttctccaacactattgaataaatagcagtgatgtatggtatgtgtatggtcaatgctgaaagaaaaccgtgtatgtccttatgcaactgtttattttctacaatggcaaaaactttgatcgttctttattaataggtgatccaaaagagacctattacattggtcctata

SEQ ID NO: 27032 - DNA, 794 bp, Glycine max
  Intron number 1 from transcript Glyma18g51590.1 (locus Gly ma18g51590) derived from phytozome v7.0 (chr-ID Gm18; pos 60462905 to 60463698 reverse strand)
ggtaaataccaaattaaattagctctagaccattactatagggtacattaattaggataagtaaaaaaaacctatttattataaataattgcataaaaatatgatcacaattacagttataattgtattgcggtgactcaaaatactttaatccataatattaatgttgtataacactatttttttaaaatcatgtgtacatgcaacatattttacccgtgttaaaaaaaaaaaactataagctcaaacatagaaataataaaggtcacaaatcattataaacttaattataagttagaatgtattcaaataagttagaagttctttcaaatgattcattgattaaattttgaagagggaaatttcacacggatataggtgtcacaaataattggagaatatagtcaaaacgacatgacaaggaaacttcaatattgtttctaggcctaattatgaggttcttattattatcgcgaaaccatggaatggaaagctcaaaaatctaagataacattggctttttacttagcatcacctaaacattactattatttgttaattttgcttaattcaatggccgaccacttatcttggtggttgatgccacataaatgttggtgcagagagagagagagagagagaatgggagcatgaaatctgaattggggggtcctatagacattttctttaggaaccttggaccacacatttcgctctataagaagccctttggagccccatttgtatcattgcttcaagggtttcaagtttcaacacacacactgtctctgtac

SEQ ID NO: 27033 - DNA, 400 bp, Glycine max
  Intron number 1 from transcript Glyma19g28070.1 (locus Gly ma19g28070) derived from phytozome v7.0 (chr-ID Gm19; pos 35426221 to 35426620)
ggtttttagctcctccaaattcttcgcccaacgtgagtccctctttcatcgtttcagatctgaacatgttttgcctttgttcccatcttctattttcctatgtttatttgttagagaaaacttgttataaagatagaagaagctgttgcaattttttttttttaattttacgttatattttgttgctatattttgttgctgcgtttcgcatcagaatgaaaggtcggaactttttgtttttctgtgacgatgatgcgatttattgagttgtattttgattttctgtgactacgatggaatttagtttttacatttgttgctgcgtttcgcttatatgagcggctacgtttgatgaataacgattattttttgtgcttatgggtttgctaggttcttcaaa

SEQ ID NO: 27034 - DNA, 998 bp, Glycine max
  Intron number 4 from transcript Glyma19g29460.2 (locus Gly ma19g29460) derived from phytozome v7.0 (chr-ID Gm19; pos 37022735 to 37023732 reverse strand)
ggtatgttattaatttatgttcttcattttttgctttatgtgtttggtgttagtgagcgactaagtgggtttgtagaactttccaggttggaatgaaggtgggtagggagtttgaggtatatgtatattgattgggaatgggaatgtaggcataataagttttagggtccgtccatttggaagagctgagttataacttaactgcatttttcttatataaacacttgtgcaagtgtttgagagagcttttaaaaatagcttatgatttgtccataggcactttccggcttatttcaatgggttttccaggataacttatgaaagcaacttacatgaagattgtttaacccaatttcctcttttattatagaaacaactttacataagtgcttatatgataagcacttaggctctgttaggatagaatttttaatcagcacttacatgagaaaaaaaaggtaaaatgcattgtctataagataaaattagcttatgcaccttggcttctgcaaaagttaaatgaaaaagacttctatgttaagtgcataagttgattttagcttatgtgagaagctaattcgatttaccttattttctcttcgatacatatttagggagaaatttattcaaatagagccttattcaataagcctttaatgaagttgtttacccaaatggacccttgttaattgaagttaaaggaacctatactagatgccttcaagttatttaggaaaggaaaatgctaagcacgttgattatgtataccaatccaacgaataacactgttgctttgctgcctgcacacatcaactgtatttcacccagtgtggacaatgctttcaatgcattgggtggaatagcactgcctttatatattgcgttccttacaaaagaaaaagagatcatatgtcactagctaagtattgttcttaattttgtgaatatatgtttctttcgtagatatcctaatcttaaaagcataaaggagctaattt

SEQ ID NO: 27035 - DNA, 403 bp, Glycine max
  Intron number 1 from transcript Glyma17g14970.3 (locus Gly ma17g14970) derived from phytozome v7.0 (chr-ID Gm17; pos 11710278 to 11710680 reverse strand)
cctgttttttaaggaaagattgtctgcaatcagaggtttttcttttttccttgattccgttgcttggaagagttgatcggaaattccataataaaattttctttttaattttatataacgaagattaatgttctgttgcatactctttttgttaaataagaattttaggtgtaggtccatcttcaatcttcatcttgtttttttgtgattattgctgggtacttgttttttttttttttttttgctgtttctcaatgatgcccccctttttttttatttctaaaacttagtattttttattttatttcgagtgattaacgaattatttgtcctttgttggaagaatggacgatgcatcatcttagttttgattgacttttgttttatgctaattccaggaaga

SEQ ID NO: 27036 - DNA, 669 bp, Glycine max
  Intron number 1 from transcript Glyma17g37640.1 (locus Gly ma17g37640) derived from phytozome v7.0 (chr-ID Gm17; pos 41373033 to 41373701)
aattggactctgctgcgggtgctgctgcaactcaggtatgtgtattcactgtcgtttcactaaagctaagaactggtttcatctaaaaagagataagaactagtttctaacattttgtgctgcaggaaattagtctattttttttttctctcaccttcttgatttccacgtgataatttcaagttctaacaagaggaaaatgtccaaattggtcccccccgaaacaatagggaacaatttgatccctaggaaaaataaaattccattttgtccttcaagattacaaacatgggatgttttagtccttttgtgcatttgagttaacttttttaaggaccaatttgggtcattgattattttgtcaaggactaaattagtacaggataaacttctttagggactgaccgggtatgcttacaatggagagaaaatgactggagaactaatgtgttgtgttccacatttgaaatcttgaagggctacatgattattattattattattttctagggactaaattgtctactgtaattttttcaaggctcaattaggaccttcaactattatttgtctttaatttttttgcacactttacataagatcattttttgttttttgtttttgggttaacaagaagccgagctacatccaaatctcggtagagtcata

SEQ ID NO: 27037 - DNA, 1006 bp, Glycine max
  Intron number 1 from transcript Glyma18g26190.1 (locus Gly ma18g26190) derived from phytozome v7.0 (chr-ID Gm18; pos 30312060 to 30313065)
cagaagaagctcgagatcgacgacgatcagaaactgtaatcacttcactctttctttctttctttttttggtgttaaatttttgagtatttctacttgttcttcgtggtgttcgtgtgttgtgctttgagagaaagtgattcattgaatttgtgaaactaagaaacgattgacgaatcagattacaagtaacgcattaacccttagattttttagccccatctattttaggatgtacttaactaatcgttggatttttcgatttttatgctttgttatttatttcatggtgccattttaattttgtttgaacatgaattctaacttttcactgtgagattgtgcttgttataagaagtgggaaagggggctgtagacagtttaaaatataattatattttatcatgctatatcataactttctctatgtaattttatgcgaaaaaaatcttaattttaaaccacactccctcttccacatttcaccatcacaatttccctccagccataagtacaacgccgtctatgaaaatagaaaaaagaaaatagaaatcaaggtacttaaattttcttcactaggaggtgtataaattatctaaaacaatatcatattaatcctccttatacttgtaacaaaatatttaaaagatgcatttaatttaatatttgtgaaacgtaaaatgtttaactatcttctacttcatatgataagtaggaaattagtggaaagctggttatgggggatttagaattattcataaattattatctctcttctatctgagatttagaagctttggaggagctacctgtctcaatattgctctgcctttgccttgcaacattctttaaacttttgattgactttgatattcatgaagattttataatttgttcctaagaagccaattttatgttcttttgggcaatgtaatttgtcttgttaaaaatattcctatctttgatttgcagacgagcattttgggacaagaggatctcacaggagg

SEQ ID NO: 27038 - DNA, 982 bp, Glycine max
  Intron number 1 from transcript Glyma18g08430.1 (locus Gly ma18g08430) derived from phytozome v7.0 (chr-ID Gm18; pos 7182875 to 7183856)
ctccaaccactccttcgtcgcgtatccgtacgaatgttctttcgctaattcgatttttattggaaataataatttataatatgagtttcgtagttgcttcttgcgtgggagattagtaataggattaattcactagttcctgaatttacgaataacagttaatttaatcactgaacttaggaaaatgtcaaacaacgttcattttggccataataatgaaattacatttcttataatttcaggaactaaattggctggagctcatgatattaggaaccaatttgataattactctaatatatagtctagttttaggggagagagtgtgtgtgtgtgtgacggtgtgtttttataatgaactggattttgttggtgttaggtcaaatttaatttctatggaaaattaaagggtgtgctaagaaatttttatgctggatggatggtattctgaaaccattttttaattgtgaagatatttgccaatgaaatggaagtgataagtgacgatattgcaggtttttaccagtttgataatgtggcttggttttgtagttatttcttgttggttttcataatgtgttggatttataaaatggaatgcaacagcataacttggatttgttcaaaggctggtttgaattgactttctaagtatatttgtataatatttcaatttccaagtaatagaaaaaaaaaaactttttttagtaatttatgtggaattatgagtatgcaaatacagtttattaggttgttgcatttttcttcccctttttatttggatttttttttttttttgggggggggggggggggggggaggggaggattcttggatttccttgacagtttggttctgattactattattgctagatatggtgtcattttatttattcttctttgtttcctttatttatttatttttatgaatgttctgctgttctgagttgaagaattgctccttggcaggcacaatttct

SEQ ID NO: 27039 - DNA, 868 bp, Glycine max
  Intron number 1 from transcript Glyma19g02370.2 (locus Gly ma19g02370) derived from phytozome v7.0 (chr-ID Gm19; pos 2089181 to 2090048)
aaatatattcaattttgcgtttctctgcctaaaaggtgaacttcttctctgcttcttccgtgagtcgcgcgttatgatttgaattttgtactttcaatcttttttgtggatggggttgttttcatttttgtgttttgctttctgggatcagctcaaaattttcatttttttttttttgtggggggtttgatttttctttgcagttttttataatttggggaacttttaggtttcttggatccgaagttttggttgataattccggtttcactgtttctgacttttagggttccgttttagtttttctggaatctcgatgcttttcttttcctgcataattcttaggaaaacaaaaggagaatgtagaatttctaattcaaatgagtatttgtgaaaagttgaaaactgagtttttgttcttggattggtaattgagtgttattttgctgctgtttcgttagtcttttgttttggttttttattccctttcaaaagtcagatatattggataaactcaattataaagttttactgtagtgttgtaataaattcaatattttatttggtatgaaatttcttgttgagtatttctttatcttatatttaggtttttggctatgagtcttttgttcttgttgacttcttaccaactgtttcgttgtaattacatttatgaagttttgaaactgctagtccattcctggtggcacagttttcagattttactatatcactttattggtaaaggggtgatgtgaattcttgaagttaaaactgattcgtgggaggaaaatacaaattttcaccaagtttaatctagtttgatgagtagtgactagtgagtggtattctattgcaggattgaaag

SEQ ID NO: 27040 - DNA, 890 bp, Glycine max
  Intron number 1 from transcript Glyma18g36130.1 (locus Gly ma18g36130) derived from phytozome v7.0 (chr-ID Gm18; pos 42465610 to 42466499 reverse strand)
tgccactgttgaaaccattgccaatctcttgcaggtcctgattttttgtttgtttgtttaaattgggtgatttcatttgatttgattgcttcatcttgtttaattgggtgattgattgggattttgagcatcttggtgtttctggaatgggaaatgggatttcttttttctgtttcttaagtgaaaaatgaatttttttttttggcaactggggttgttttgctttgactaaaactgttttgaagtttacaaattgaagatttgtaccattcgaggttgttttgtgtactatgtttttatagctttatggttttgctgttttgtgccaattttagtagtccagatttggaggcactgagttccatgcatggagtgttggagtttgtagtataagattttggagaagtgtgctttgttttcttcttcgtgcttcttttttgtattagtactaaatttgtttccttgattttaactctctgattcagaataattgtcatattaaaaattcgtactcttatttctagtcttgatcttgtgaaaatgctataaacttctttttattatattatcttcttggtatttctttaatgctctcttaatgatttgctcattgtaataccattgttgcatcccaggtttgagacaaggcagtcccttgactcatcaaaaccaaaagatgaaaatcagtaggaaaatataattgattttttttattttctaaagtatcaaataaatttggatgtcttttagagactgttgaataaacaaaaaagaagatagatctcaccttaggaactgaatttatctaatgtgaagagcatgtgctattgtattcttcaaactcaaatgaattttgaaatgtttggcgactttgtgttataggaggttgg

SEQ ID NO: 27041 - DNA, 749 bp, Glycine max
  Intron number 1 from transcript Glyma20g30160.1 (locus Gly ma20g30160) derived from phytozome v7.0 (chr-ID Gm20; pos 38879143 to 38879891)
gcaaaacaacggtaagaaatagggtgagtattaaagtaattgtatttctttacgagggacaataatgtaaaagactaatagttaccgttgaaacccattgcgttcatttaaagatgcggcttgtgccaaagccaattttcaaagcgatcaacgaatagagaaagaaagaaagcgaaatcaaattgttagagaaacgcgagttaatccagaaatcaaagaaagcgttacttgtaagttttcgttttcttgtgttacgagatttttttattttatttacttgcatgcgtgttgggtttatctgcttctctgtagtgtaaaggaagattttgtttcattttttttcgttcagtcaggttggaagaagaaaaactgagagggttttgtggttcttggaatctagggtttcgttttggtttggaaaattgaaatcttgaatgattatagtgtttgtctggttcatttaattgagcatttgcaaccaagaatcacaggaaatatgtgatgttcaatattagggttttatgattttggggcttcttttagatttacctttttacttactccagtttgatgagatgaaggatctagtgaaaatttaaaatcttgaatttggttccaagtgatgattttgggatttattgatttttcttttgaaatgagagagaggtctagaagtacaaagtttatggtttaaccctttcacaatatatgcaggacgttcgtttgaacattaacaacattaacacaaa

SEQ ID NO: 27042 - DNA, 698 bp, Glycine max
  Intron number 3 from transcript Glyma18g48830.1 (locus Gly ma18g48830) derived from phytozome v7.0 (chr-ID Gm18; pos 58239262 to 58239959)
gcctaaggtgagtatcctaattcctctttctaagtattgaatttcacagaactcaatgaggggttgttcatttaacttgattcatatttttgtataataattaccaataatgaaactttgtcacctttttctcactaatcatttaatatgataaatttattaatttttataataattatcttaaaaattatactgagaatgatttacataaataatatataatcattaaactctttctgaatgaaaactacatacactttaattctaaattttttgattgattaattcaataatataataaaagtctatgtaagactacaatgaaatatatgcaaatgaatcaatgataaacaatggcttgatgatcacatataatatcatggaaaatgttctttagtactgcgaaaaacatttcctgaaaaagttacgaagagatgtgattagttaaaaacttaaaaagagaaatatgcaattatgtaaaaatcttttcacaacaaccccaccttgtatggttatgaatctctacttttcgtactctagttcttcacatgtttctcgtactaaatagcattgcttaaatatcattagggatgtattgtctttctaattattctttgctgtcgctgtatatatttatggttagtgtgttcttatgattaagtagttgctgaagacgccaagataaagagtcatcacct

SEQ ID NO: 27043 - DNA, 1011 bp, Glycine max
  Intron number 1 from transcript Glyma19g44620.1 (locus Gly ma19g44620) derived from phytozome v7.0 (chr-ID Gm19; pos 49995335 to 49996345 reverse strand)
agttgtcgccgcttcctgtctcatcgctggcttcggtattcccaaaaccctaacattagccctttcccttttgctaataatttcgtgtgatggtgctgattgttttagctttacaactgcatttagttattgggattcagtcttgtgagattgatggaatgctccactcaattttcggaaatgatagaaatttgtaattttagtatttcaaaggttcggaagcagattttatcttagattcgattttatctgataacctgcacgttcagcatgtacattgttaactgcatgagtgtcacttacaccttgctaattatgtcccgagctcgtgcaatctgttttcatttacttgtttctgtttgtttgcgtgtgattttagtgtgaattctgctacatttgcacttcttgaaattgtgaatgtggatcttaattatcctttaatccagccacattgttataccattttgatcacaatcatgaaaataattcttcttgttatagccagaaatttgcttgagcttttatttgctgatgcttggcatgctcatttagaacacaatcatggaaacaatctttcttgctctaacctgaattttttgtgcacctaactgcctgaaccttctatgccttttacctgataagacaacatgaccaatacgactgaattgaaattgctcttcaaatatccttttgtaaaattaaggctaaaagtaaaaacgtagaattctgttttctgtgatcctagttcctttcttgtagtttccctctttatgcgttaggaagagcagaatgctagtaagagaggtttgcttctggttttaaattttcttttgattaattaatgttctctataaccagtgtatgctgtgtcacgagcctactcaagtttagatttagtttaaaattgaacgtatttctctttggatatagtcattttctactgacaagctattcacttagtatgctgtgtaatcctcctcaggtctttttcttcctgcttttgtgaggccc

SEQ ID NO: 27044 - DNA, 932 bp, Glycine max
  Intron number 1 from transcript Glyma20g01740.1 (locus Gly ma20g01740) derived from phytozome v7.0 (chr-ID Gm20; pos 1258411 to 1259342 reverse strand)
aactttcaggttgttgttttttcatacacttgttgattttaacatggatctattgttttcattaatagttacaaagttccagcttccaatcatgcttactcctgttttggttagtttagttaatgaattatgattgccgttttcataactccatctcaattcattggcagaagattagaaagtatattttttttatatgtttctgtaattttcatttaacataggttggttctgtgtgaatagttcttgtggttaatgataatatatagggatacaacaacaactaagctttatcccactagatgaggtcagttacatgaatatgatttttcatagccctgatagccgttctcaagcccggattacggaggagggttttgttaggccctcagcagccaatataaaactcactgttatacctaacatagatagtgatatataggatggacgaccataatttgctagaagagtgatcttcttcagtgattgttgcttagtcagacatataatggtcttgatctgaatttagttgaacaagtagagcatggtaaagaagattgactggagttagacagtgttatgcttttcctatttgatgttccctttggtttactatgatgattcattctcatcagggttttcctaatttgcatggattttgttcagtgctaattttaagatttgtatcttatagaaatctattcatttatgtgatttattataattccacacaaaatatgttcactttacatgtaactattcctccaaaaaagaccctgaaaaaggaactcaatattatgagtattgactagattgaataccgttaatactaaaaagatgaaacagtgttgatatttaactctgactgctgtgctttgattcttgccgaaaatgcaggtagattctatacattccggttctatctcatttgg

SEQ ID NO: 27045 - DNA, 672 bp, Glycine max
  Intron number 5 from transcript Glyma20g11980.1 (locus Gly ma20g11980) derived from phytozome v7.0 (chr-ID Gm20; pos 16847582 to 16848253)
gggtatgacctagtctgtgtctagaaatgttaatcaaaatttatatttgaggcctagtttttatcttttgatctgtgggaatcgaagataggtactcatgcctagtttaatgtaatccataagttattagtcaaagtgttaaaatgaagtaattttataatctcattatcaatagataatatggaatacgtttaatctattttgcaacatagttaatctcatataggatttaatcaatttttctaaacttattttaatattttatatgcgatacatctagaaaaacacggtaaacattgatcatgatagtccctgattttataagacccccctcctaaaatgtcattctctttagtgtttttctactatttaaaatatcttagtcaaatagaaataaagtatatattctaaattttgttcaaattgactctcaatagaagaaataaattaacgtaatatgtatataaaataaaaaaatatgaaaagaatcttctattgaatttgtgatgtgttacacttatcagacatactaacatgcaagttgttgtaacctgaatataagagatactaacatgcaggttgcttaaacatggattgtttgctctaatttgattattggtttcctaaatataagagatactaacatgcaggttgttgtaaccatttggtatc

SEQ ID NO: 27046 - DNA, 627 bp, Glycine max
  Intron number 1 from transcript Glyma20g26770.1 (locus Gly ma20g26770) derived from phytozome v7.0 (chr-ID Gm20; pos 36119521 to 36120147 reverse strand)
attcgtcaacaagcgtctcttcccttatttgcacagtaattccatcgttcctattccttttcgtttcttttaagatccaaaaccacttcacccttactcatttgttttctgggttatatgattattatgatattgatatattagtctggtatatagtattttttttattaattattaatataatattaaatgtcttttatgatttttgagataatagaatatttttttaaaaatttctttattaagtacgaagaatattactgtaacatatgaattatgatattgatattctggtattgattgactggtttgtttttctatgctctatgatatataaaaaatgaaatgccaactgttgttgtcttctcggttatacttcctcaaatagaggcacgtggttttgttcgctcgttagtaggaagaggaatcattccaaagaggcatttgtagtcaattgtacaattgctatcaataaatttcccttttttgcccaatttttacataagccatgttaattcgtactaaatttgtgaacaaagaatttgaactaaataagcaccatgctcatttgtttgttgtttttgatttgtagaattcgccactgagcaagggggtttgtcagtggat

SEQ ID NO: 27047 - DNA, 539 bp, Glycine max
  Intron number 2 from transcript Glyma20g24740.1 (locus Gly ma20g24740) derived from phytozome v7.0 (chr-ID Gm20; pos 34393193 to 34393731 reverse strand)
ggacctcctggagttggcaaaacaaccttaatcaggttaacattttcactctctcaattcattatcaacttaaaattagttgattatattattagcctacttcaattagattgtcaatgcattcacagtatacaagttcatttaccttgttaatacattaggcgctcaaaataagttgattatattattagcatactttaattaattagaatgtcaatgcattctcagtatacaagttcatttaccttgttaatacattaggtggtcaaaatgagttgattattattagtctgttttttagaccgttgtcgaataattgtttgctatgtgtgatttgtttatgggtttttataataattaactcgatgttatacttagatgatttctgattgattaacggtgtaaagctttttcattgacattgcatgaaaatcaaatccaattttatctggacatctttagccattttttttaggtgccttttacttgattggcttgtctgaagaaaaagctttttcttgtgcagagagattgctagg

SEQ ID NO: 27048 - DNA, 795 bp, Glycine max
  Intron number 1 from transcript Glyma20g31510.1 (locus Gly ma20g31510) derived from phytozome v7.0 (chr-ID Gm20; pos 40136653 to 40137447)
caccgattttggcctctctgtcttctacaagccaggttcttttgtcttttctctattcaaattcaaattttgtatacacaacttatatgatatatgcccttcctcatgatgtgactttggtgatgttgttctctaatcagaaatggatttttacttgtgtgaaggtagttttaaattgcggtcgtggttgtcgttgtggttgtggttgatcctagatgttacgaaaaattgtggataaatgtgatcatgattgcagtgactccaaaaatcttggcgtttcggcgaaaattgtgctcgcaaaccatttttttgaaatcttcttgacttttatagcaaacttttattgctcagattatcaggagaaagtatagttctgaatggaaaagcagctcatataagttttgtccattttgtaattcatatacaggtcttaggtgatttttttaccaatgcttgtgaattgtgatacatagtatgctctacaaaaattttatgaattattaacatgttggtgcatatttttaccaccaaataaaatgaaaaattgacatgcaaagcgcaaggctattccatgaatcccttttggattgagaaaagtatattagcatagtttggatcaagggaatgaaattgaatgtttgaattgaagaacaatactctgcgccagatgcaattttattttattttgctgatgttgaacataacttttttccttggctatttaacagtatgtatttagtgtgcgtgtatgacttgccatttccttttcttgtttcttctcaggacaagcctttc

SEQ ID NO: 27049 - DNA, 796 bp, Glycine max; identical to SEQ ID NO: 19130
  Intron number 2 from transcript Glyma20g24070.1 (locus Gly ma20g24070) derived from phytozome v7.0 (chr-ID Gm20; pos 33775584 to 33776379 reverse strand)

SEQ ID NO: 27050 - DNA, 785 bp, Glycine max
  Intron number 1 from transcript Glyma20g24040.1 (locus Gly ma20g24040) derived from phytozome v7.0 (chr-ID Gm20; pos 33744627 to 33745411 reverse strand)
acaattacctcgccttcatcttctcccgcgccgaggtattcattcgccaattcccactttcttctgctactgctacttctatctagaatagtgacgatcgccttgcgtttttttggtttgatttaagtctgtatgatgcggaacacttgtcgtagtgtatttgtgcttgatttgttgttctgaatgaaatctaatcaacttgatgaaggtaatgctgctcaagcgagaaagcgactatgttttattattctctgtttttgattctggtattttgtctgttactgttacttcatcaatttgcaccaacaggttaatgataatatggcactagtcaactctattgttttgatttgtttttagtttcctctaacttgttttgagataggttatatagtgtgtttggtttcgtgtcaagttttaggaaaatcgcatcacgttcatagctaagcaacttcatgtagctttcacttatcaacgtgtttttcgcgagttgtgttttcaatgcgaaaccaaacataatatttagtgtttggaataacatctaaaaagtttagtgtctctcagatgtcttgaattattctagtggtccatggaaataagtttaacctggatggttttgcctggaataacattttgagacttctatttgtttatttattttcaaaagtgcatcagttgtggcggttatggttcaagtgatactgatgttgcattgatactaatgctgctgtggtgatttatattgaacagggaaagtcggtggaggttcggcaggctgcagggtt

SEQ ID NO: 27051 - DNA, 130 bp, Glycine max
  Intron number 3 from transcript Glyma20g36200.1 (locus Gly ma20g36200) derived from phytozome v7.0 (chr-ID Gm20; pos 44407587 to 44407716 reverse strand)
gcgtcaagctcaaattggaaattaaagtccaagaggtttttctttttctttttgcctcttcaatttgatttctattatttttttcagtttttctctgaaggcgattttgttttatactagcttgctgatt

SEQ ID NO: 27052 - DNA, 1032 bp, Glycine max
  Intron number 1 from transcript Glyma19g06730.1 (locus Gly ma19g06730) derived from phytozome v7.0 (chr-ID Gm19; pos 7895594 to 7896625)
gctgaagcagaagggttcctcactctcttcatctggtattcaactattttctctcgctttgcttgttccccattttctctcttcaatttttccatcgcttaatttgcttctgattatcaccagttttaatttataatgattttgaaccaatccacaattttcctgacaatcccttaaaatttgtgttttaaatttcagattttgattggtttgaattgatttctgatagttgttttttattggaactacgggcttgatcatttgttcatacatcattgttggagcaatgtaatgtttgcatcgggaatgtgttggtgagagcataataggaattaatcttagtcatgattatatattccttcgagtttattgttcagtttctggatttgggaatgctgatcttttgtctgttagctcagcaagtgagagttaaaggtgtgtgtgtgtgtgtgtgtgtgtgagagagagagagagagagagagagagagagaaaactgtttcagttgttgacattgtttcatatggtgaaaattctaagattggtggtgatcttttccttttggtttgtgatttctatattcttaattatgcagcttttaaatttctctacccttgtaaccctatgagttttgtttgggttgccactttctcattcacaatattcttaattatgcagcttttaaatttctctatccactctgactcagtaagttagaattaaagataagaaacaagagagaggaagcggggaggtggaaaactgttttagttgttacactgtttcatttatatgtcttctttaatgaaaattatgaaattggtggtgattttttcctttttgttaatgatttctatattcttaattatgcaatttctaaatttccttgtccttgtaaccgtatgaatattgggttgggttgtcctttatcgtgtaataggattttggaaatcatgttcactgtgattcttatttttatttattaagcaaaggttctgatagtggcccttatgtcatgaaacagattgaacaaa

SEQ ID NO: 27053 - DNA, 731 bp, Glycine max
  Intron number 1 from transcript Glyma19g37610.1 (locus Gly ma19g37610) derived from phytozome v7.0 (chr-ID Gm19; pos 44713687 to 44714417)
ataatattctagaggtgaacaaaatgtgtagttgtttacgttaagtttgttgagttgaattgtaatggatttggaatgaagaaagagcaatccgagttaatctctctgactagtgaggagtggtgttattgtttgccatgctatacgttgatgaattgggttagtgttgtacctagatggaaatgaatgctagtcagaaaaagggcattcataatttgttgaaatttaatttcatctcatttcattggccctgtagatgtagattggttcttaaatggtacactctgccctgcaccttaaaagaacgaaaaacataattagttttccaatcagagttacaaagaaaaacaaatactgtcctttggccaaatgacggtagcttggtattttgactacgtgggtaactggtaattagcaccattggggagtggttttggtatgcacaggggattgagaatcctggaaaacatggattttttcatttgcaagagaaaagtgaaccctaacagtttccaatctcaatgctaaagtccacttttggtgaaatttgatactaacttttaattggattagatatcgttgattgcagttgtttcccttgttttcatatgtcagggcaatcttatttctctcattgtgtctttgtattatggaaataaggtcttgcttaattgaaatgtgttcttgactttccaggttccaagtgatcaaaaactgccatctctttatct

SEQ ID NO: 27054 - DNA, 633 bp, Glycine max
  Intron number 2 from transcript Glyma18g02280.3 (locus Gly ma18g02280) derived from phytozome v7.0 (chr-ID Gm18; pos 1432654 to 1433286 reverse strand)
gtgctccattgtcatcgagttactattccaatctggtatgaatatcatacctaatctatttttttctttgatttctcttactatgtagagtaaactatgattaagcataacgaggtgtcacattagttcttcaaactaaggaaaatttaaaattagtccagggagtttctagttgtttcatcttgagattttggtctcttaaacatatgataatattatcattaagtcacatatttttttataactttggattaatgcgattggcggattgcagcttcagggacttttttgaagtttcttagttttggggactaatgtttatgtgactaggctttatactttcaggaactaaaatgttggtttactctactatgtaacttgtagtctcaatatcttaaatgtaataaaaataataaaatatcggattatattagcttgttttattgattgtttaacaaatagttaatcatgcgaattgcaaatccttgattggataaggtttcaattcgagtttaatgtgacactaacacaaaacatggttcctttctgagtgtaatggttcaatgaggtttagaatctataacaggtttagcacttatttccagtaattgattggcaggtgctccttcacat

SEQ ID NO: 27055 - DNA, 872 bp, Glycine max
  Intron number 1 from transcript Glyma18g04530.1 (locus Gly ma18g04530) derived from phytozome v7.0 (chr-ID Gm18; pos 3312247 to 3313118)
ctattgccaaggcaagctcaaaaaacgtggatgcttatacatgtgcttgagaatctgatatgctaaataatacccaattatgagatgattcagcatcattgaaactcaaaagcaagtgaaatcctcgtctttagtatttgtttcatggagaagctcatgctcgatcattttttgcatcatcaatgcctttgtcatagttccataatgtcacaattaatatgcacctaagagttgtttgcttttgttttggggggctttgctacagatctctgatgtgtgcaggggttctttggtgattcctggcatattatgtgaaggagcttcattaggtgaatttcaaaatggagctcttaccagtagcacaaaaaacttataacaataagtggggttaaattctctaatccatgctaatccatttcattcacatgagatgactttaaatgtttggctggttttgtgtggaccggtgctttgttggatcctcttgccaagttgggttctacagtgcaagaattcagtatacttccctaattcatggtattttgcaaaggagcttttcgcttagaaccagaactggagctctcactagtagcatagcactggtttatatgcagtgggttgaattcttactcccatttaccatgttacacctagaacgttgatgtttgagtacaagttctcttttaaatatatgttactatggtccgatctacttcattaatagcgtgttttgtatttttatggggattttcctgctctgactaatcttgaagaatggtgaatatcttttttctggtcataatctgatgttttgccactttggaaactgttctgttctttggccagtctattcgcagagctaggccctttcc

SEQ ID NO: 27056 - DNA, 319 bp, Glycine max
  Intron number 1 from transcript Glyma19g29750.1 (locus Gly ma19g29750) derived from phytozome v7.0 (chr-ID Gm19; pos 37493114 to 37493432 reverse strand)
tccaggaaattggagatcagtgcctactaatactggtataacacctacttcaattatatatatcaaatccttttcttgttttgtttcttaattaactaagctgaggtgtgtgtatatatatatatatatatatatatatatatatatatatatatatatatatataatatatatatatatattatgaaagtgtcttcttcttgatctatctatgtgtatgtatattgtatacattttgctttggaatcaatcataacaatttgaatcaaatctttcttgaaaagggttatcaaggtgcagcaaaagttgcaggcttaga

SEQ ID NO: 27057 - DNA, 223 bp, Glycine max
  Intron number 4 from transcript Glyma20g27180.1 (locus Gly ma20g27180) derived from phytozome v7.0 (chr-ID Gm20; pos 36394395 to 36394617)
acagattaaacagtgtaagctaagtaaatgtttatttgatttggtttggtttaataataataataataataattggaaggtttaagaagcgtggaaagctgtgtgttacagtgttgggtgatgataagttgttttttttttctgtttggtttttgtttgtttgtttgtttattattattattattattttgacaaatgaatctttgttcttcggggacaggaa

SEQ ID NO: 27058 - DNA, 805 bp, Glycine max
  Intron number 1 from transcript Glyma19g24420.1 (locus Gly ma19g24420) derived from phytozome v7.0 (chr-ID Gm19; pos 30013475 to 30014279)
tcttgcattctgctgctggcagagggcaggttgaggtgagattttactcgttttattcatttttaggttgaggtttttaattaatgttccactttttttgcatctaatggttggtgctactttatctagtgtgttttttttttcctttaacttccttctgagttctcatgaggcatttagcagatgactattcttgtggagtagtaagagcctcttcaagaatctcagcatagttctgttagccaaataggaaaacatagagtaaacccttacttttatcccggatattatatgttatatagcattggtgttttagtccctaacatttctctatagtcacttccatgactttttcatttgttaatactttcttacttcctctttgactgatgttaaggactagtgaatgatgttttctaaagttagagacaactgaagttttagtaaaagtcaatgattaaaagaaatggcaaaaattatggaagggattaaagtgagggcttactataaaaagaatatgatgttcttttaggtgttgattgaatataagatgctttggatgcatgctgttacaaacacctggcatagaatactctctctgattacctgagtatgaaataacaaaagaataaggatcagatctaaactattacaatgtggtggtacacttggaggaagatacagttcactccagtatccctttgcctttaattcatatgtttggttgtggtggtttgactttatatctactcttcatggcacttgtgcaggtggtcaaatatctcacatcatcctttgatataat

SEQ ID NO: 27059 - DNA, 887 bp, Glycine max
  Intron number 2 from transcript Glyma20g35040.1 (locus Gly ma20g35040) derived from phytozome v7.0 (chr-ID Gm20; pos 43333864 to 43334750 reverse strand)
ttcttcacaaaaggtatgcttgttcattggcaccctttttgcctaagtttttaagctagcattattatatatttcaaatttataataaatgtgtcattcctctagagtttatatatcctttggttgtttactatatcatttaaagtgcaggttgtataacattgattgggatcaatggaagcaatcctacaaagcactagttcttctggaattcttgttgacccatggtactcgagagtttgctcaagaatttcaatgtgatgcagaaattattgaagaactaggaatttttactcatattgataaaaaagggtaaactttaaataaaaatccattaatttgtggtaaatcacattcaatggtgtataacaatttgtttatttttaaaaattgagagataatgaaaatgcatattaggatggaaactgaaagacaaaagttacaagtgtcagtgtaggaagaaaaatggcaacatgtaaggtttaaattgctgtagggaatttttttaatatacttaaatagtgattcgatgatgtttatatttcaaactaatctgaccatatagaagagaagaggtaacatttctgatgtagtagttggatttttttttccaaagccaaagtcaaaatttattaatcaagaaaactccagcacaagttgtgtccgagtatcaatataaagcagcaaatgatgctacatagttatcgcttatgtgtagttggattaccttgacatgaaataataaattgaaaacatgggagctagttgattttcatatattgctttatagtatactttaaatttcttataagtcatgatttcgattttcattttcattcctatacttgattaaacttatttatttcaggtttaactggggatcaaga

SEQ ID NO: 27060 - DNA, 1012 bp, Glycine max
  Intron number 1 from transcript Glyma18g15330.1 (locus Gly ma18g15330) derived from phytozome v7.0 (chr-ID Gm18; pos 15419580 to 15420591 reverse strand)
aggtacacatcattatctattgttgtttattgattgtttgtgagaaccataggtttcaagatcctgttgtttcctatcattgatagtctaggaaaccccttaagactttttacataattaattcacgagtcctactgtgctaaattaaacagctacggaaaaaaaaaaggaaaaagagagacttatttaatatagtgtgactttacctaagaacggaggggatttgaatattatctgtaaattttggaattattccaccatctgaacgcaaaattatctgtatagccaatgggcccaatacaaagttaaacaaaatattcaaatctgcttagcttttactctatggacagatgttaatagaaaggtattttgcttttggtgtttacttttattctatactaacatttattgagatgtgaaggggagttaaaaagtagctaataatatcaaaattaaatttccgacatgagctgccctgttgccagtgcggaagctcaaaactgataactatcaaagaaacaagctcatgaataatcagataacaagtaactaattcctgaatattatgatcactttaccgctgatatctataaaaaaatattaattttccagcatatatgcttcttacatttgactgctactttaatttatcattcataagagtgaagaatggtggaagaaatttaggaaaacacttaacaagagcaaatagaagatgttagaattgcaaagagattggtaaattggcacgttgcttccatgaactcggaatcaataattattatattaaccatgactgacaaggcacgctctaatgagcaaagctccaaagttaattttgaagagattaaaacataggaactttataaaagcagttcttccccagcagtgcttggcacagaagcagtctaaatctttaaccaccttaaaacatttattgcccttttcacaatggaattgaaatcagcaatctcagtcacattcttgtgcctagtcttgttagcactagcaa

SEQ ID NO: 27061 - DNA, 691 bp, Glycine max
  Intron number 1 from transcript Glyma20g36830.1 (locus Gly ma20g36830) derived from phytozome v7.0 (chr-ID Gm20; pos 44839070 to 44839760)
ccaccaccatctctctctgccttcacacctgttcgtctctctctctctgctctttcgatttcgatgctgcttctgattttttttctttctttctctcttttagattttgacgttgctcttgtttacctacccccgctaattgcaatgcattgttctttgtttgacccccccccccccccccccccccggtctcttgcttatcgttgttcttctctttaatttatattcaattgcctggattttcttgatttgggttttcaatgcggttccttaattgtttctgattggtgatttcaatgatccggtttcctatcattgctattgcgtgaagagaaggttaaaaaattgttttgttactgtggtagagcaataagattgacatgatacctgagcttacatgttttacttttctgtggggtttctgtgatttgacgggtaaggaatgaaatcatcttaatttgtgtcttgagctggtttactgttatgaagttctttttgaggatgcaatggactttcataatatgtttgttttgtaattcgagcagcgtgcgatatttataacattcctgaatcacgcacttgcaccttattgcttgcacatgtttttgagatcatttgttgacactttcaaggatcttctgtgcaatgcactgaactgtgaaccttacaccagtttgcaggaagtgcatat

SEQ ID NO: 27062 - DNA, 912 bp, Glycine max
  Intron number 1 from transcript Glyma19g30100.1 (locus Gly ma19g30100) derived from phytozome v7.0 (chr-ID Gm19; pos 37771371 to 37772282)
gcttcgggtacgtgttctttttctccattttcccccaacacttctttctcctgtagttaattttttcggttgctaaatcgtttcctttatttattcgctttgtcaatttgaagagacttgaaatttgaatcctgattcgattatgttcgtgatttatgctgcggaaaaatcttgatcgctacttcgggggtttcggaggtttttacttcgttgtagcgcaattgagcataaactttgtaaccctatgatgtgtatatgagtccgtaatcgacaacgatgtgttggtggcgtccatttgtgtgtggctggcaccacgaatcaatgttgagggcaattcataagagtccccaaaagaaactgtgaagctttgagtgaaacagggttttctgatgtttgcaatgttttaatgttctggtggattgtattaggagagaatggaattgattattttggtgcttaattccgcaaaatgcctaacaactacaaagtcttatcccacttggttgggcttttcctatatgttgtgctctgtgctaaactttgtgtagactgtagatggttccaagctcggataacagagggtctggtgttggaaagtttccagctgatttaaaacatgtttaatctttatgacatggattcattctacatgactgcttttagttcctgccccccttcatccctgatttttgtgaggtgatatttgtaaacattatatcataccacaaattccatgatttgaaactctccaattataaaaggaaggataatccctgaagctagctagatgggtgttctttgcctaagaagttttctagctattcttttttgatgtattcataatagttggtttcatttttaccaattgacttacaagacactaagtaagtgtttgcttcttttattttgtag

SEQ ID NO: 27063 - DNA, 399 bp, Glycine max
  Intron number 2 from transcript Glyma17g16870.1 (locus Gly ma17g16870) derived from phytozome v7.0 (chr-ID Gm17; pos 13668576 to 13668974 reverse strand)
gtgtaagagtggaataaaaaaaagtgggaaataggggtgtgaaaaatgaatagaaacttgaacaaatatatatagctaatgataaattcttcatttttctctttccaatttttcttgcatacctagcgcatcctaatccaaaactaattttgatttgtttgatatttgatattatataacctttcttcatttttaaattacgtatttataaattattctttttcagtcaacggaagtaatctatgacaatcaaagtgggaccagaacatattttaaatttctctttgtttttctattcttttctttctttctcacttcaatcaaattccatttgaatacttattcctctaaaatgtaattacagttaacaaactatcttattttcgacgcatcaagtta

SEQ ID NO: 27064 - DNA, 368 bp, Glycine max
  Intron number 1 from transcript Glyma18g41310.1 (locus Gly ma18g41310) derived from phytozome v7.0 (chr-ID Gm18; pos 50154648 to 50155015)
tttcctccaccgcctaaggtgtgatgtttgtttggtttgatttttcatagttcaattcagtttaatctctgtgtttgttatgtgcatttcatgttttacatgaaagtttctgttttgtatttttactggctttgttgttctgctgctaatggtctgtgatttaatgcttcatgtgtcatttagcaaatccaatttcagcttttcagcgagtttaatttatgtacaaaagaaacaaacagtgagcatcttcgtcatattgccgtttcatcatcatcattgcatatggacgtatgttgaaacagctctgaggtttttcttggttgtgatgattcaggtgttagggagaggttctctgtgctccgaagtga

SEQ ID NO: 27065 - DNA, 927 bp, Glycine max
  Intron number 3 from transcript Glyma20g10830.1 (locus Gly ma20g10830) derived from phytozome v7.0 (chr-ID Gm20; pos 15050357 to 15051283 reverse strand)
ctgaatttcaacatattaactagtatccaaagcgggtattattttaaattgaggttgtgaaatttgattctaaatccaacagaaatataaggatgataaaatttatgacataaataaggtatcaaattatatataaaagtgaatagtggcagatatagttgtcatccatgcaattgctgcttttggagtgaagtttatttgtccatgagtgtgtctaattgtgtgatgtaatatgtacagacaagcaatgattatttattgcagtttactcctctgctatgaaatttacttttgaaaaatattgcaaatctattttttctttaaagaaataaacattgatatctccattacaccttgacttctcttataaatttcgaaacttttatcctttccattaattgtcttctatgtgtgcttgctaacttctaatcctgttacatgcatgtgagcatatttggttgtgtaacaactttcacgttagttttcttaagttcgttgagtagaaagagaaaaaaaaaaacagagacattgattatcttctcttaatcattggattttcattccccaattaaataaatatatttttatgcactcataaaaaaataggaattgttgttacaagataatttttttaaaaaaaaggaacataaaaagttataaaataaatgaattaatactaattttatccttttaatttttttataagaagatgtattttttaaaagctcataatgtatttcatctatgaaaatattatagaatttattttttggtcccactaaagaaattttttggatccgtcgttcacaacactaccttattgagcatagattatgtataatcatttgtattcatgtataacaaatcgtttatttctttgttcttattttaggactgaatctgaacttcttaaggacattgttggag

SEQ ID NO: 27066 - DNA, 889 bp, Glycine max
  Intron number 1 from transcript Glyma20g10830.1 (locus Gly ma20g10830) derived from phytozome v7.0 (chr-ID Gm20; pos 15051973 to 15052861 reverse strand)
ttgtctcggttgcaagaagttggattgggtttgtggtaagtttttctctctattgtcaattttacttctggatggaaataattgaagatgaaatgatatatgtccaatttgatttcttgttgtttatggaaatcaagcacacattgtttataacttataacacctttcaggttttatttccaggctagtcaatataagcagtatataaattggagtgaattctaagtgtgttctctgtttgaggagtactctttgttttcaggtatacaaatgaaattcagacaccacttgatttataaagaagctgaaacataagattcatctgtcaataactcaaaccatattacattttctgctaatcaatacctgtttgtatttaaagttgagagtattttctaaacaatctgtctgttgaacagcttcaatctcttgatcatactacactgcataattttcaatcaacggtagatgccagatagtcaactgtatgttaaatgtcaaagaagttcttgccaaataaatatttatctgaatttcaagtttagattgattattcatgttattaggctttttttatatttaatagtttaatattagcttttccatgtcaaaagcaagccactaataaaggcaaaagaaatcttcaaggaacactagaaaacacctcaaaatcagactggcaatttggcaaacatatgtttgttcttttgttaagtgagaaacaatatgaactttgaagtttgaaactgtttgatcccatattagaaagatatatgaagtctaactaataatatttacgacaaatgtccagaacacattaaaatgtatttttttatttttttatttcatcaagtgtattattgcaggtgcagtactaggaattcataat

SEQ ID NO: 27067 - DNA, 971 bp, Glycine max
  Intron number 1 from transcript Glyma20g32850.1 (locus Gly ma20g32850) derived from phytozome v7.0 (chr-ID Gm20; pos 41449817 to 41450787)
tctcaggtgcaatttttgcatttattttcctcgtctttttcccctcaattttgcttttacaatttctgattccctgttctggatgattgacctggactttatagctaggaatttctgaattgtaattttttattggaataatttctttgatttttgaaaaaattaggaattcctgtattcggttgggaacccttaaaactagagcaatgattattagtacatgattgggcgaaaatggcatgcattatattttcttcaaccatcggtttctctgtcaactattgcagaattttttttacttttttagttaacatggtttttcttataacgcgcatcgctataactttcttttgaactctttattcctgattatatatgctctaacaattaagggatgtgattgcttcctctgctcaggaatagttaaattaaaacgttgtctgttattgttggtcaaagttcaaatccaatactagatatgattgattggtcctttattatttgctaagatttttcagattatggcgtggtgttgttcttttctgtcaattttgttattattactagccactaggtatagaggatctgtctgaaggatctaaaagacttggttagatgcaccactgttcaaacgtttgttttgtttttcttctaaagcttgtaggtgtagctttcagtttgtgtttgcagtctttatacctgagtaaacatgatttacatggctactttcacctttagtagcaatgatgaaccatattattgtagtagatttattatatatgtatctgatttcctgctttgctctcgtccatactttccctcccttccttttcttaaattcaaagtatgaatgtatttcttttatgtgtgcgtataggggtttaagaattaagatgattatttattcttatctcccccttaatatgaaatttttcgcattatgattgcagactgttgtcctcaaagttggt

SEQ ID NO: 27068 - DNA, 625 bp, Glycine max
  Intron number 1 from transcript Glyma18g47930.1 (locus Gly ma18g47930) derived from phytozome v7.0 (chr-ID Gm18; pos 57470695 to 57471319 reverse strand)
gtattgctgttttcttctctgttcttttttttatatatatacttattttttagttatatcatattcatgtgtttcaaccgttaccacatgtgggtagttagttagtttgagttggtgaataccgactagttagttaattggtacttaagtagatgattcattatatatttatatttatataagtcacgtatgtatgtatggttagtatgtaatgttttttttttcttatttagtgaatttcaatttcttagatcactcttctccaccaatgatttccagcacccacttccttaacaactattcctttgtttggttggatatggagaaggcaccagtttttcattttcaattcatactttttcactgataatttaagaatgccactttttttcccttttgtcttttgctttcactactttgcatcactactttatgcacaaaagcaaaatgaaacaaaacattcatggcatcactactaaaaatattaatttgaaaatgaaaaaacaaaccaaacagctccatatcaaaggaatccaacttgtagtttatagggggttttggtttttcactgatgataggaatatatgatatgagtatgataatgtgttggtttttgtatagatgg

SEQ ID NO: 27069 - DNA, 949 bp, Glycine max
  Intron number 2 from transcript Glyma17g08230.1 (locus Gly ma17g08230) derived from phytozome v7.0 (chr-ID Gm17; pos 6100577 to 6101525)
tccgggcctataagcaggtatgtgtatttacctcgctgtaaaatggattgctctgagttctcgagcctcttcttttaggattttcagttttgttgttgatgtttttttggagcctgtactttatacaaggcatgcacttattgcatttagcatgaaaaccattatcctgacattttggcaggcaagataattgcttttaggagataaaaggctatggtgttactgttattttgctcaaaattgttgaaatctctcagtagctatgtgcttgagataacttgcaacctcataaattttggcaaacaggctattagatgtaataggagaaaaatctctatttttattttcgtccttcaatgctggttccatttaaggccattttgacttgtagaatactttatattaattgtcatgtgcattttcagattgtttaaactttaaatagttataaaccattcaattgcagctcaaacttgtgtttcttgttattgagtcaagcttgaataattatattttggcagcttgaaccttgtagtgatactgatgaaccagcatgtggttatttatttctccttgacaaatacgggagcttcattttagatgagttttaattttgatccaagaggctgcacttggcaccaatatcccaaaaaatgcttaacaaaagaaaggggaaataagtttgtataatataatctatattcggcatataggagatcccaaccaaatttcaatacaccttatgcatttaggccttacaatatatcccagcagctgaaatcagattgagcccatgctctttaaattttaatacatgtttttgtatgatgaaatgttttctgttctaaaagatgcatctggaatctgatctaatttgtttaattattaagcactttcttgctattgtattgcagggagagtgtgaacttatcaaaatcgatatcaattg

SEQ ID NO: 27070 - DNA, 431 bp, Glycine max
  Intron number 2 from transcript Glyma18g48170.1 (locus Gly ma18g48170) derived from phytozome v7.0 (chr-ID Gm18; pos 57661619 to 57662049)
gggcaagaagtctaaagggaactaaaacaataaaggtaagctatattgatgcatggcttattactctacttggagctgatcttcatttttcttcttagattgatctgtgttttagaaaattgttcaattatggaaagtttcatgggtaatatgtttattgcaagttatctattttgataatattttcaacttcatttttttaactaatgatatatcttcttgactttgtttatcatattaacactgaaaaaaattcttttacttactgctgtgccaaatgcaagaaaactatattttctgtagcagatattagaaattctgacaatagtttctgtctgtttagtttcttctaaatttacagagcctcagttcatgtgatttgaactttcatttattatgcctaactattcttaattgtacatcaggtttct

SEQ ID NO: 27071 - DNA, 445 bp, Glycine max
  Intron number 1 from transcript Glyma19g39240.1 (locus Gly ma19g39240) derived from phytozome v7.0 (chr-ID Gm19; pos 45993326 to 45993770 reverse strand)
ccaaacgtgctgttggcgtcgaagtcaacaagcaggtctcacactcttccttaaccctagcaccacccttctttccttttctgcttttcgatctgttgtgttttctgtttcttattgtgatattctcgtgtcgaataataattaaatgtgtttgattgttgatttttgttgttcagatattttaccttcacatgtattgttgataccaatttaaaaatttataggcgttctttataagatattttatgttttcagcgcattcttattacacctaatggcattttctcgattaggtttctgcctttgtggctaattttagtttctagggtttttatgtcaaactcttgtgtatgccaaccttattgatttggggattatgttttgttgaaattactttgtgtgatgttcattcaggttggcaacagaattataaggaagaggattc

SEQ ID NO: 27072 - DNA, 869 bp, Glycine max
  Intron number 1 from transcript Glyma17g35460.1 (locus Gly ma17g35460) derived from phytozome v7.0 (chr-ID Gm17; pos 39439704 to 39440572 reverse strand)
gtttcccggtatatatatgtcttctttcctttattatcatttgttgtaactctttatttcatttgagaaaattagatctcttgcaataatgtaaatatcttcaacttctatgtcaaatgttttgttattatcaccgtgtaagacaaactcatcggtttaaaagacacatgggatgtctttaataatattgtatttccctctgatccattttttttattctactttagatttctttgaagagataaggatgcatgcatgcattagtgatggcagcttccaatccacaaactctaggaaaaaatcgcatttttttcccttttgtgtatgattttctgtagttgacaagttgtttatgttattattctgttgattgttttctcacagccaacactactatgttgagacttgagacaacttagtagtgttcaaccacaaacatgagttcttaaatattgtacgaatagtttatgatttgacatagcataaatgcatttttctacttctcaagtttgcctctattctaaaattattgctcaggagaaaaaggcgacatgcttttaagttttcaacatacacctgatacagttggcatttttttatcagctaatcatagcattcatccatgttagcctcttggaaagttagtagatttactctaaaaagttaaactcgatagttcatactagttagtaaaagtgactgatgattgatttccccttcagtttttccatgcatatttgataatgtgtatgatattcttcaaccaaaatattgctctattgtttagattgttaaattctgatgcctttatgtatttaacctgtcacactttttcaataccaaatcagatttcattgctaccaactgtg

SEQ ID NO: 27073 - DNA, 885 bp, Glycine max
  Intron number 3 from transcript Glyma18g12730.1 (locus Gly ma18g12730) derived from phytozome v7.0 (chr-ID Gm18; pos 11995382 to 11996266)
ttgaggactctgaattacgaacactatttgaggtattgaacatttgcctaatgcttcaataatattatatttgtttttaaacatggtatttaatgtgtatggtaatcatgcttttgcttcttaatgtgtatggaattgaagtctgataatatttgcatttttaaaggaggaagctatggataatacgttgtgatttcattttggctggaaaattgttttgaaaattatatttcccagatcattattagtgtgaatgtctctgccaagataaattaatgtgtaagttgcaatttctggttaggcactgggggcactacatgttacatggttagcctaaattctaaaaaataatatattttaagataatctgctagcacatttacttcgactgataaagagggaaataatgcttgattatcataaaatgaaactagaacatcaagaaagagaatggtgagaatataaaaatctgaaaaagaaccattacttgccatttgacctttgccagttagtgacaggaaaccacacagatgtgcctgggttctgtaggtgggatccagttgtccctttatgctcctagtattccctcccttatctcccacctcccaaaaataaattataagtcaaactggataaagaggcatatggttttgtacccaaaagataaagagaggtagacgtttatttggagagcctttatttacctttttgtactttagtggctttctgaatacctagtagaattggtgtgacaaaattctagttggagcttaaatagggtatgctttagttattcatttcttgtttgtgtacggcatgaaaagctcattcttctccctttatctatttttgttgttgattctattctttttatttgatagcaat

SEQ ID NO: 27074 - DNA, 370 bp, Glycine max
  Intron number 2 from transcript Glyma20g23660.1 (locus Gly ma20g23660) derived from phytozome v7.0 (chr-ID Gm20; pos 33452003 to 33452372 reverse strand)
gttcaaaaaaggtaattttggctttggtttttagttttactctgctgctgggttttgtgatcagtttattattgtacttgctatgtagttattcagttggacaaataacttaatttttctggaagaatgttcaaggaattgatatattttcttttatttaatggccaactgtggatgtactgtgctggggaaggaatgcattcctcattgctttgataagctgtttaaaatttttcaaaaggagataattgccatcaaagcaaatcagtcctttctttgctgagtttgtttgatctctctttaatgaaaattctttcttacttcggaagtttactatttcagaagcttcagtcctggcttcagctaccga

SEQ ID NO: 27075 - DNA, 771 bp, Glycine max
  Intron number 1 from transcript Glyma20g23660.1 (locus Gly ma20g23660) derived from phytozome v7.0 (chr-ID Gm20; pos 33452725 to 33453495 reverse strand)
ttcttcttcacaagtcatcttcttcgtcttctgaggttagtggatccgcttcacgagaatatgattaagttgctgatttcgttcgtgtttgtgttttgaccgttctttggctatgcttctggttctcggcacgcaaaaggaggagagcttgaagataatgaggactgttgtttgaaattttattatcttgattgttagtttctaagtaaggcatttcaacttagttgatttttgtgttttgttttttcttaaaaaatttccaatgctcatagttttttgctaacttagaaattgatgtttgagtagaagtgtagaacgaaagatccgtttctgtgtttttgttgcagtatttttaaaataaaaagaaagaaagattgaaggaggaagacgttttcaaccttgaagggagttcattaagtttgggtccattggattaggctgagtgggggcgtggttgtgttaggttcatgattttgaattttacagcttggaatgaggtttgacttgtcgattggatgactacttcaaagcctggagcaatggattagggagtagagagtagagtgtgtatgtggagctagggtcccctctccattatgttatgctgatgaagtcattcattggggccttgttttaaagttcgaaaggcccatttgtgtatggaaagttagcttttttgtttttgaaaaatgttattacttttcgcttttccgcaatgtgcaattcctgatggtaaccttttttggttatggcagaagtctataagggaag

SEQ ID NO: 27076 - DNA, 792 bp, Glycine max
  Intron number 2 from transcript Glyma19g22280.1 (locus Gly ma19g22280) derived from phytozome v7.0 (chr-ID Gm19; pos 26881434 to 26882225)
ttatactttcatgtaacaatttttaaatgtaacacattggagaacaaaaaactaataataaaaaaaaatcatactttctaattacatagcacattttaatttgaatatagaaaaaagaatcatgaaacaagataaatgatatcaattcatactaaaacaaacataaaacatgcttgtttctacctaaaagcctatttagagaaacaaaaatttaaaataatgatttaaatatgtttaaggtctctcgtaaataatcaaattttattttaggtccttaataaatttttcgttgttatgagttttcgatatattgaaacttttgttttgaatttttgtcatccgttaagtaatgacgtctcactttacaaattgatgtgtttaacattatcaacgattaggatgatgtcacatcattacttaattaatgatagagactcaaagtaaaaattatttattatgaacctaaaataaaattcagtcatttagcatgaactttaaatatatttaagtgtcaaatatttatcgagataaaaaatatatacatagatactcaaattaataacaatgtatgtgatagagatttggtttgaattattatatcatataagattttaaaaatgattcagcctgtatggaattatgactatgctttgaacatgttatgtgttatagagcgttggatgaagaagggtacacaagtgtttatgtaaagaacgaagacatcctgcatggagaacacaaaatagaaatatcccaggaatcacctattcatctgcttgatcagcttcgcag

SEQ ID NO: 27077 - DNA, 733 bp, Glycine max
  Intron number 2 from transcript Glyma18g08030.1 (locus Gly ma18g08030) derived from phytozome v7.0 (chr-ID Gm18; pos 6776333 to 6777065 reverse strand)
acttgtctgagacttgcaaggtgtgatctttctcccattctggcaacccctttgtaaaattcttttgaattttcaatagggttaggatttttaatttatcttaccgtaatttgtagtcaaataggagtttccttaccaacatgtctggtttgagtgatattgaactcagtccgcataagcaagatctcgaatcttgtgaatggaaaaaatgtacttgagagagaaaactccattaaaggtagtcagtcaaattcttctgcggagattagtcttcaacaaaagtggtggatactttgcaccaatgtcatgggtagcaaaaaaaataaaaatgagtttccgtagtttgttggtgtttatgaatgttttcttttgtttttgtaagaagagcttctctattttttatgtatttttgaatattctagttgtgtgacaatgcctataaatagtttgtgtttttcattagaaaaatgattgtttgtgaattatacttgttttctttcaaattcaagttcaataatatttgattgtaaattttcccctttttattttgtattagtgaatgttttccaccaaacattttgtaaatagtcaacttgtcagttgccaaacaaatgtattgttggaaatacttgtgtaaagatagtgctatgatgcaaaattcagtcaacgattcatctgaaatctagatcttgtccactgtttgtcacagatgggtactccaaacggaagagca

SEQ ID NO: 27078 - DNA, 607 bp, Glycine max
  Intron number 2 from transcript Glyma18g03240.1 (locus Gly ma18g03240) derived from phytozome v7.0 (chr-ID Gm18; pos 2157727 to 2158333 reverse strand)
actaccaaggtcagtgcagtttgttctttgcttatgcttgacttgacactctgctcagttctatattgctcatttttttttcttcacattatctaatttctatgcgtaagaaaatacttgaggcttaggttaagcagcctaatttttgcatcatgaagtgttgtagctatgtgacatactttggaactttatattcttcattgcaaatcaaaatggggcttgtgtgttcaatgttttcctctttgaagtgttgatgtgtgtgtttaaagaagtttaataaaaagcttcctaagtaagcttttaaaaaaattattattttccccccaaagaaatgttcctaactaaagtgatttttttttaattgaaatgatgatctttgcttcatggttcaatttttctctcccttctttcttggtcttcacattacataatgttccaaacttctgttcttggagagatgtatagcttttctcacttatatgttgtttaataaaactttgttttggtactctaaatggatttgctggtatgattttgttcagattaattcaatttcaatttatcttcttttgctagatcttcttgatcgtggctggagaaggtctgg

SEQ ID NO: 27079 - DNA, 848 bp, Glycine max
  Intron number 1 from transcript Glyma18g03240.1 (locus Gly ma18g03240) derived from phytozome v7.0 (chr-ID Gm18; pos 2158362 to 2159209 reverse strand)
gtcctttttctctttctctctctctctcttcaattcaattcttttctgaattttcacttctttcttttattatctcaactgagttttcggctctttattggattcggtgcgcttctcgttttccccgtcaatttgttgcgttttctgacagtttccttcccccaattgaagtcgttggtttggttgataggaacgaagaatcttctgcggaaaacgatggcgtttagtttttttttttttaatttaaacgtaattgcatccatcaaattcgctttgcatagttagttaatcacttaatcgtgccatgactatgtgaatgttagcttagactatgaatggttttcatttgttggtggactcataaggtggactaagcctgcaaaatcataaattcccctagcaattttttttttgtgttcactaaatttagttttatagtctactaatgtcatgtcattgactgtcacaactctcaaggaccttataacaacaagtcaacaacaataatagtcttatcccactaggaaagggaccctgaaacagctaattggattgttaatattttgtgttattaatatacattttgtgactgtgaacttgcacttgtgttatggccatcgtgctaaatggtcatgtggattgtaaatgaatgaggggacatatgatctacatgtggattgtaaatgtctgctaagcttaatgagagcagcaagttgttaatgcttaaatgggattaaatattgtttttctctatgttttgattgttttcttgctgaattcagacttgcattaatgtaatgtatcagttttctaattagtttgtgtttttttttcctcttgtcataggc

SEQ ID NO: 27080 - DNA, 377 bp, Glycine max
  Intron number 1 from transcript Glyma18g01680.1 (locus Gly ma18g01680) derived from phytozome v7.0 (chr-ID Gm18; pos 943976 to 944352)
gtttagtctcccttttcaccatcttcaataatctcgttagtcctcatctctctggctgcattttcagattcactactaaatcactaatgcattgcatccttcttcgcctttcggtgtgtggaaaacgaaattccttatctgtaatgtgtagtgttattctgtttatcttaaattgaattaaactacctattgttttgattttgatttggtaatgctcagctattgtataacttcagttatgagtagatgtgcaagtaatgcatgcaatttttttttttttttggatacagaaagaaacaattcagctgcagttatatttcttactattatttttagcaagttcttataattgaatgtgtgttcaatttttttgtaga

SEQ ID NO: 27081 - DNA, 735 bp, Glycine max
  Intron number 1 from transcript Glyma17g11860.1 (locus Gly ma17g11860) derived from phytozome v7.0 (chr-ID Gm17; pos 8903565 to 8904299)
cttttctccagttaagtaaactcaaaatttctgagccaccttcaattaatttatctttttattaatgactgtaattagtgctactacttaaccgtagaactagcaattaatgttaccacgtgctgtctttcatttaacagttactccgtagtactactagtatattattcatatctcatttatttaccgcatttattgtaatatttttttaaaaaaaacttaaatacagtttcttacgtgttgttgtgttgtttttcaattaaaattagaacacttgaataatctacataataaaaatctacattaaaggattaagtagattatagaattgaaaactatataattaaagaacaatgtaaacaacacttaactaaactatacctaagttttgttaaaaacaataataattaaaaagcatgttaataaacaacaagtgcccttaagacgccagagaagaaatcagaagttaattttttaattaaaaaatgtaattaactgtgtaactttccataatttttaatgaaactgtaacaataaaaacctttttactgaggcaactgatccacgagaccttttttttatcacattaattataaataaaaatattggacaaatatatcattacttcaaacgtattaattggagttagtgacagcaagaagaaaacgtacgtaatggggtttattgacaaattctattctaatataaaatgttggcaacaggagccacatagag

SEQ ID NO: 27082 - DNA, 542 bp, Glycine max
  Intron number 1 from transcript Glyma19g27670.1 (locus Gly ma19g27670) derived from phytozome v7.0 (chr-ID Gm19; pos 34985183 to 34985724)
ctggtattggccgagattgcaccctcgattacgaggtatgtaactttcatccctcttttaaacccattgtttaattataattttaaacccatttcactcagccaattagatgaccgaaattgatttctttttttcatttagaatttagaactgcaatggaatcaatcattttttaaattttgcatctttttttttgttgaaaaattgggtaggaaaggaagatatggatatattgaagaagtctattatgacggtgatggactaagattatatatgtaaatttcaaatacaacaaaacatgtggattaattggagcgggattttcaattgggacggtggtatttaagtttaataagttgttttatattattattattatttgtgtgagctcaaatcaagaatataacttgagagtactatgtttttttttcatttttgtgattcttgttgcgactaattgttactagtttttcatcctcaaagttgggattagtaaagaaaattgactgaatctcactttatgcaggaagaggaggatcaat

SEQ ID NO: 27083 - DNA, 814 bp, Glycine max
  Intron number 1 from transcript Glyma17g10530.1 (locus Gly ma17g10530) derived from phytozome v7.0 (chr-ID Gm17; pos 7922172 to 7922985 reverse strand)
ggggatatattttgatattggcaagaaggctaaaggtttcatcaattcgttattattattatgcatttttctttttaatctttcacaaaaatgaattataatccgtggatcttagagttgccttcccgatcatattgtaacacaaatttgtttacttttgtattagatgttcttcacacggactattcaaatctatctccaattcattttcactaccaattcatggactataatgtagacctctcttgtaaaggtaatgtgaatatcaactcaatctttttcttttctttttttcatttctacttctgcttgaaacaagttcatttttgttattattgtttaatgttattcagttggagaaggggtcattaatatagataacaaatgagtaaactgatatttcgatcatgaaaattatgctcattttgcaatttagttgtcatttaaattacatcatgatttagtccttaaaatttcagacttgtttctgagtctcttttctatccctggtagggattattcaattactaaatcatatacataatttagttcaaggttgaaattgcaagttacactttcaatgataaaaacaccattttactccataacaaataccaccaacagagatttaactcacatatacagtttttcttcaaccctcaattttttgttggtgaattttcagtcttcatttcatttgattagcatctaacttgcaccgagggaaccagtcagtgcctcataagtcatgaatcatatagtgatacccatataaaaaagcatcaattagtcctgaaagttttccataatcaat

SEQ ID NO: 27084 - DNA, 488 bp, Glycine max
  Intron number 1 from transcript Glyma18g02590.1 (locus Gly ma18g02590) derived from phytozome v7.0 (chr-ID Gm18; pos 1640872 to 1641359)
taaagccgccaattgcttcaagctcgccaaatcatgtttttcctctttctctctactttttttaaattccatttcgtgtctcctcaaaatgctgatttagtgtcataaatcataattattattctcttctattgttgttattttattgttattacttcaatcgacgagtgtgttgagttttgaggtgtccgatttcccgattaattgaagtatagttttaatctgattttactggaaaatattttttgcctgattttttttttttggaacaattactagcatataaattagaattgtggatgaagtacgacaatcaactctgtgttgtttgtgactgcgctcactttcaatttgacgactaatctctttattttgttgaaagtgacgaactttgaaattgatgttggaatagttctgtttattgttcttgatttgatctatgtggcattttaggggacaaggctggagcgacatacctgaagttggca

SEQ ID NO: 27085 - DNA, 610 bp, Glycine max
  Intron number 3 from transcript Glyma18g02590.1 (locus Gly ma18g02590) derived from phytozome v7.0 (chr-ID Gm18; pos 1641518 to 1642127)
tgctgcacattgctacaaaaagactaatataaacggtatgcatgtgtctcagttgttaccactacatgcactacaatactttctcatttatgatttgtgctttaaatgctgctcttgcttccatgcagcaaggccaattccttttagcctcaatgtttctctgtataactttaatgtaaatcatataaaacaattgctacctttttgcatgaacaaattatataaagcaaatctctttgtttaatctttacatatgtgtaaatcaaatactgggcttcatatcgataaggtctaagtaggggttcagtcttttatttggattagtttaagtcagaaattgaagttaatttgtgcttgcataagttgcttccatctgattgctttctttttatggctgtctgtatgtcatagccttattttgatttgttatttgctgactattattagattggaactcatgatcatatccctaagcaggagcaaattattttgctgtcttgcttgtcttagtatgtcccacttgcattaggaagaactaagacaattaaagttaccttttctttctttgaatacagagtctgtatcttgcttagaccgagctgtaaatctt

SEQ ID NO: 27086 - DNA, 557 bp, Glycine max
  Intron number 6 from transcript Glyma20g17250.1 (locus Gly ma20g17250) derived from phytozome v7.0 (chr-ID Gm20; pos 24333038 to 24333594 reverse strand)
gaattggaagcacagtagctagtatgcattgatgtattttatatacaatttttgttctttttataccaaagataaaattgcattcagaacttgcacaaccaaaggtgtgcaattgttgatatagctattagagtggagtcctgatcataatttttcacgtagaaagatacacattgcatgaagcacttgcaccttgcatagcacatctgagaccgtttcttatcaatattttgttattacactacacttaacatggacattaacatcaccatacattggagttcttaatgtatctatatatatataggtagaaaagctgtctgtctatctctcagtttcaaactttcaatatttgattttcaggtaggatcttttcatggtctgcctggaatctttgcattgcttaaggtgaaactatggttcattggctttgctttagatccttaactttgaaaaatataatgatgtgcttattatgtttgcttttgggggcaactgctatacattttcaagacttcaatgctgaggtcctacgttgcctacaattcctaatttaa

SEQ ID NO: 27087 - DNA, 803 bp, Glycine max
  Intron number 1 from transcript Glyma20g27510.1 (locus Gly ma20g27510) derived from phytozome v7.0 (chr-ID Gm20; pos 36662539 to 36663341 reverse strand)
acctccgttcgccgacacttccccagaaccagaaggtacttctcaatatacttaattgcctatagtgtaataactacagttgagcttcacaaactgaaacctcaacatgactttatgatctactttgatcattttcctctttgtggagttttgttttccttattcattctattcaggtaaaattattgccagtgtattagaggtgcttatatatgtatgttgtctattttctctgtaattagtcattaaattttttgatattttattatccttaatccttgaaatgtttaacccagcataggattcttgtttttttgcagaaagtggcaacacaatagtaattgtcatctccatagttgtgccaactgttgttgtcgttttgctcatttgtctctgcttatatttaaggaggaggaaggctaggaaaaatcttgtaggcaagtccaactatcaatttactatgacctttttatttccaacttcttcctcaatggtttcaaagaaatataaatatagagtaaaatctctgtagaaaaagtatatatgatgtatcataatttagagtaattcttccctatacgtaataattgaactacatacaatctattaaactgacaaaatatgaaatgtttttaataactcctagtacgagtaagtcactgccaagaaggtaagaaattgggagtagtatacactttatgttatggtttcaggaaattatacctcccaatattcaatttcagttatatcatatttgaagtactaaatagtttaaatttgcttcctatgtgaagttaaagaaa

SEQ ID NO: 27088 - DNA, 315 bp, Glycine max
  Intron number 5 from transcript Glyma18g04880.1 (locus Gly ma18g04880) derived from phytozome v7.0 (chr-ID Gm18; pos 3607658 to 3607972 reverse strand)
aaagtaattaaagataaattacttatctttttttccccctaacttttttccactgtttcttctttcctttcaaattccagtcccttctttttaaaaatactatataatttttattttttatttataaaacttttgactttagtttcacttgccatataatatcttcttttcttgtaatgaaagaatgtgcattagactgttgggtaggtttttttcttcttcttcttcttctttcttttcctcttttaggctttttggctaatcttatttagctgatgaattttaggagctacaccaaagtcagttcttgagctc

SEQ ID NO: 27089 - DNA, 522 bp, Glycine max
  Intron number 1 from transcript Glyma20g19200.1 (locus Gly ma20g19200) derived from phytozome v7.0 (chr-ID Gm20; pos 26831657 to 26832178)
gctacaccacagatctctgacctcaggttgagacacacgcacaaactctgtttcagtgtcgaaagcattttttttctttgttttctgtgttgagtttgttttcttttgtttctttgagctgcattgtggtgttttctgcttttgctttaagtgaggcttgcgagtcatttatatacactgttttggtcatattacttggcaatctgggatctccaaaatgaaaagtagtttttagagtgaaaagtagaaacaagttaagtacagtttctttgtctctggattaagaaccacattgtgacttgtttggtttctgaaagggaaaaatgaaaatctcaatttcacgtttcaaattgaaaacccatttttcattcttattcatttgactcaaacattcacttcattgacacattctatgcatattcatccactgaaacagaagagaaatcgaagatcttgctctgacccattttttttttttgggttataggaatcttgaagttgaaagacacaggttgccgagct

SEQ ID NO: 27090 - DNA, 548 bp, Glycine max
  Intron number 1 from transcript Glyma18g19100.1 (locus Gly ma18g19100) derived from phytozome v7.0 (chr-ID Gm18; pos 20859684 to 20860231)
taaaatcaggtaaatcatttgtagtcatttttcgtacttaggataaaagtataaaacctagattgttgtgcttctataaaaaggtggtcaagcaagaaccatcatagtcctaactaatctctgggtgacacctaatgaagtgttgttaattctttctaataacttgaaaaacttgaatacgtcgaatagagattgtctaggatcataaacgcacgatgctttgagattacctaataatttcttttttttaagataactccagtggttgaaaaatgcaggttttgattaaagaataatatcaactaccattatataaagttgtcattttagctctcagcaatactatttggtatgaatgagttttttttctggaaatttataacaaataattttttatcctgggagagaaattattgttgagagagagaaatttcactttcatacatgtctttcactaagttttcataccaatcagcatttctctttacttattcattgccttgctacatttgattttcttgtctaattgtgatggccaccaggtgcta

SEQ ID NO: 27091 - DNA, 696 bp, Glycine max
  Intron number 1 from transcript Glyma20g14390.1 (locus Gly ma20g14390) derived from phytozome v7.0 (chr-ID Gm20; pos 19668995 to 19669690)
tgacctttcctcaatctttcactcttttgtgtcaggtaacccaatcctcttcctgcttagtcgatgcaatttcaattctgatcatgtcaattttctcttttctctatactatttcctgttgctgtttttgttacaaaattgttgctttgtttttgttttttttgttttcattttatctgttttgtggttgatgtcggcgtcgaattacgaattctcgcttgggtttcttcaattttctagaattttgttatggaagttgtgaatctattttaaaacttgtcaaattactgatactcattttgaaataatttgttggtatgattaatttttgtcaaatttggctgcatatgcatatctacgtgaagttgttgactttactcgcttatgccttatggtttaatttgcattgttttgttgttgctgggatccgtagctgcattcagagtgtttgagattgcccttataagaattgttcaattttagttttccaaatattggcactcacatgagaaggggaattttttaaagcttgttttggttggggttaacttacacggcaagttcaccttaagggatatccctgtacacaaagatgtgttagttgtctctaatattccttttggggcactttttgtaccataaaaaatataatcactggaaaataacaagacttgttttggttcttgtaggtcaaat

SEQ ID NO: 27092 - DNA, 680 bp, Glycine max
  Intron number 1 from transcript Glyma18g19710.1 (locus Gly ma18g19710) derived from phytozome v7.0 (chr-ID Gm18; pos 21466606 to 21467285 reverse strand)
taagtcacagcaaagcagtggcgtgaattcccaggtgcccttcattctgtttggttttctctgttctttttgtttagcaagatacagttggtggtaggtgatgttcaactggaatgatcgtttcctacacaacatgcacttatgttattttgtatgtcatatttatgttttttattatttttctaaatcatattctatttttctttatttcaatgttatattatttttctagtattagtggaaggatagctgcttaggtaattgccctttttggaatggatgattatggtttgattaaaccggtttgaaaattaatctatacatgtattttattgcatatggctaaggaggagctatatgctattttgaggagtacaaggagcatgtttgtgaatgatttatttaagtcaacggaattggtaaatctgtggttttctacaatgattggtagttaggacttaagaacttcactgatagagattgaggagtttggctgttgattttgtgttgttatagaaattttgtttcatgatcatttatcaaccactatgctttgcttttgaagttttttttggcattcatcaattactggcatattttactgtaggcaattactgaatcatgtaaatggcatttctttgcaggggcaaacacaaaaaaaacaggtttgttattaagat

SEQ ID NO: 27093 - DNA, 1022 bp, Glycine max
  Intron number 1 from transcript Glyma19g39080.1 (locus Gly ma19g39080) derived from phytozome v7.0 (chr-ID Gm19; pos 45882814 to 45883835)
gtcctggccccaccattctcaatttcacttaccaggtgagatggtgcaaatgtaaatatgtagtgtctctttcaacccaaaagcctcatttatgcttttcagtgtttgagaaatgatttttgcttttctttttttttttttacattctatttatctggcacaacctatacttggaaaagatactactaagtaagggctaaggtctgccaaatgtgaaagtttttttttcctttggttaagccaaaacttttcacgtgtgaaacatatggtagacaaaacattttctattttgacgcaaactaagcaatgattgtaggcaacttctcttttctattttgtggcaaaccttgaagacattttctaatacactttttttgtatagaatttctattattagttgaaatttattgaaaaatacaaaaatttgtgggtctcaatgcttatattataatgagttcactaataattttatagtttttgataaattttaacgaaaatgggttagaaagtgtactgcgacttcttattatacgttttcatacagctgctgttaggatactaggctaagctactgcagaaagataaaaggaacaagagaattaatatattggttctgctttattccattgcctgaacgatatttatagaaggatacaagcaaaggaagtgctgttgccaaacattggccatctgcaataacactgaaaaatataggaataacagaatacgtgggtgtgttgttataagagaattcgttgataaggcagtgagaatattctgttgccttgtccttttcctgagctgggactaaacgtgatcactgaggtgtattggtagtatttctaacagctgctatgttattcatcatgcattcacgatatctaatttgatagaaatgaggtggggagttgaaaaggagaaatgggaacggttaaactgaagcttatagatagtgtttggtgtgtatgtttctgatttgctttctgtttttcagggtgaaaagaaggtggccaccattcaaa

SEQ ID NO: 27094 - DNA, 462 bp, Glycine max
  Intron number 1 from transcript Glyma19g43410.1 (locus Gly ma19g43410) derived from phytozome v7.0 (chr-ID Gm19; pos 49071544 to 49072005 reverse strand)
ctaaatcctaatcctttttcactttcagttctcaggtatctcctctcaaatcccctctcttttgactcttttgttcaaccttttaaagtagtaatgcctcactactgtctcattcatgcttcatgttttcctactttgtttttctttaatcttaatacctgattacctgccatgaccaccaatttaggtactaaatatttttgcaaaatttgtatcggcgagttaatatttttcatatgcaccctttaatttattttattgcatttttataatgttgttccattccatgtgccctcgtgtgggggtatgcatgtatgtgcttcttgtaatctctgtcggtaggattccgtatgtgtttttctgtctggttcttccttaaaacagcaacttgcatgttggaactgttgtttctggttatattttatgcgtttctgactaattcattcatgtggagtgtgcagc

SEQ ID NO: 27095 - DNA, 512 bp, Glycine max
  Intron number 3 from transcript Glyma18g10010.1 (locus Gly ma18g10010) derived from phytozome v7.0 (chr-ID Gm18; pos 8821726 to 8822237 reverse strand)
ctgcgctggtcttgctacaagttttcctggtatatcccttcttttaataattgatgaactatcatcctttacttgaaatttttattaacttgttggtctctgcaccaattgaaattaaggataaagctcacagtaatcttacctattttgaccaaaccttttctcaaacgtatgaattttaatttgtctttcattgttgaaatctcagaataaacatgatccttcatgccaaacacttgagacaattttgtctccaattgctggctggggaaaggttgaggtttattactatgttgaatggtctaacaaaacaaaacaaaaagctgctttagtgactcaggcatttcaatcaattcttttgtataagtctatctctatatgtatgaaatttattcaccaaaaagaaaaatatgtatttaattttcttctcttgtacgtttttattgttattatgactcatcctttaggattctccaggtacaccccaatcacttctacagtgctgcattgct

SEQ ID NO: 27096 - DNA, 1058 bp, Glycine max
  Intron number 2 from transcript Glyma17g33790.1 (locus Gly ma17g33790) derived from phytozome v7.0 (chr-ID Gm17; pos 37729932 to 37730989)
ggttggctctgcagaaataactcaggtttgtattatggttttcatgtttctattttttttttctttcttacctccccttcttttcctgcggtttttttttatgttattctacttttatgtcattggctgtgttttgaagatgttgtgcttttgtaagagaagggttggaaaacaaaatctgaacttaatagtaatatatatgaactgcatgtctgtcccttcagacatatctttctcgtataattgtgaaattgacatgcaaaacatggttggattttgcttgttaggacttcaatgtgagataaactcattgtgattatataatgcttgttaaggttttccaaaatgacaccactaccttgtagttcatatggtccaaaaattctcttcccccaagtccttctttctctctttgaattgcctcttgaaagaagcactaatatgtttttgttgcaagcaatatgcaataggaggacatacactcctttttgcagagcaaatgttgctactatttgcatcaatccttgaatagcttaaccatttcaatcaatttattgcttttttttaatttatgattgttgtattgggtttatgttaatatcaaaattacacgtttctttccaaaaattaaatgttcttatttatgtgggtccagttaaaatgttccaagcaaccagctgagtgtgtatttcgtggggttattaagccttatgcattcacatatatgtaaagaatgtttcaatgaaaggattgactctttgaattattcatgcgttttaattgaattcataaaaaatggaactacaaagaaaagaaaaaattatacaacaaatgtgttattggctatagtctataatagaataaaaacggactagtaatagtgtagcttctgattttatgcctttataattgttcttctattccttaaaactcgttattgcttcattattaacatctgaatagtttgatagtttgattatgcactaagacttgttatactaagcttatgatactttactgcagaggatttttgtagagtataaacagccgtttgcact

SEQ ID NO: 27097 - DNA, 953 bp, Glycine max
  Intron number 1 from transcript Glyma18g01550.1 (locus Gly ma18g01550) derived from phytozome v7.0 (chr-ID Gm18; pos 846826 to 847778)
gattgaatttcaggaatcctgggtgtctgcgatacgtaatcaccctttccatgtttttattcattcgatctatgatgatcataatgccactcatcggaaacttgttgatcgtgtgattttgttcttccttcccctgaatcccctgttttttttttcttttttcctttttcttttaccttttttttttcctggttgcgtattcagcaagtgtacttgttgaattggattaaactgataattctccgatctgggaaagtcacacccaaaaaacaaaagcaaaatatattatataaaatgattttttttccacctacctttgaataattggttgcaaaagcggttccaattacaagcccctgtttctgggtgtttggccatggacgatgattttgctgggtcgattattccttttgattggggtgatcccactttgatgaattacgatgacttcacgtgaatagagatttttaacttcgattacaaaattggcaaaattcctttctttttgttttggaatatcccaccgttgggggaatgaataccatacttcccctcaaagtttttatctttgcattcaccttcaaatattctgtttgttttctgtttttgaaagcttttttcttcatctggggtcatctaatatctaaatcaagcgtttcatacaacgatcggtgtggatttccttctctgcctctgattttttctatttggtatttttttttttttattgttttggtcttgttgatcctcctctttcataggaggttcatgattttgtgggtctaaatgcatgccttgtggtgattgtagatcataattgataatgtcacaataaatggagacagttggtcatataattcagttctttttttgtgtgtgtcacataattggtttatgtaagtatgtttttgtttgtaggtttgagacctgagatttgctagtcagttatattt

SEQ ID NO: 27098 - DNA, 774 bp, Glycine max
  Intron number 1 from transcript Glyma17g35100.1 (locus Gly ma17g35100) derived from phytozome v7.0 (chr-ID Gm17; pos 39089168 to 39089941)
ttatcatcaattgtctagttacagcagaaatacaggtatatacataaattttttttttttatctttggggaatatttattaattactaattaattaagtactttttttttaaatgggtgtttttggatttggatttgaaaatggtatccgttgtggggagccaaaatattatgtgggttgttactgtctgattctacactctacagtaccggtggaaggtcttttcacggaaaaaaaatacatgagtggtctctgtttgagtcatgtcaccagaaagttaaacaaaaaaattgttcttcctaagatgaaaaattaaatcttcttctactttccgttttaggaagatgaattttggtaaaaaaaattgcacagtaaactagagtgtaccaaaggaggaaaatatatgaagagctataacttataggagcaagggataagaaaaaaagttccaaaaatttgattggttgtagtatagtctctttctctgaaatctttgtttcacttttcatatcaaagttgactaggaaaaaaatcattaaacgttccaaaccattgattgaaccttctgctcccctctttttgctgttctgtttcttttagactaaggagtgactttcttttctattttaaattttcatgtatttggttgtttttttaaaattgtcaattttgttatgagctggtttaggcctttgtgcttgagttgcatgtttttttgaccttgtcttgtggtacatgtgtgtatgcaaaggttacaattcgggaagcataagc

SEQ ID NO: 27099 - DNA, 828 bp, Glycine max
  Intron number 4 from transcript Glyma17g32180.1 (locus Gly ma17g32180) derived from phytozome v7.0 (chr-ID Gm17; pos 35499297 to 35500124)
cccagaggtctgtttttgatttggttattagaaaagaaatactagttcttgtaaacttttatgcactcgatttgtttatttgcatttttggttatggagaaggcatgagaattggttggtgagtggtgggcagggtaaggtagaggaaaagtttcctcagtaggaattgatcctggcctgaagggacttggtgctggttgatataaatgcttgcttgatgctcttttggtttgtctttatcgtgatcaagttcattggcagactttgagtatttcattggtttgtttttgtagaagatattagttaatgaagcatgtttgtttttatttgaatttcacagtgatttggtgcctcagttcggatttagaattgatttggacattgcttgcttttactgtaaatacttttagtttgcttgttctttctaagtttcttgaagattggatttgatctatgccctgatgacttattttcattttcatgattttaaaaattataattttctatgattgtatccctaggattaattttagcattttctgtagcaatatgttaaaactatagcacactatatattttatgtgttgaaagccttaatagtttttgttcatatttaggttatatctgttcatctgttgtacatgcaactcatgaacttttttatcatcattttggtttggtaagttacgtaacaaaatttgatatattgcatatactttatgaatgatgggaatgtaaacacttgactattttgtagatggttatctttttggttcaattgtatattactaagtcactgacatcttatcttctcttttctggcaggtg

SEQ ID NO: 27100 - DNA, 762 bp, Glycine max
  Intron number 4 from transcript Glyma20g34790.1 (locus Gly ma20g34790) derived from phytozome v7.0 (chr-ID Gm20; pos 43121251 to 43122012 reverse strand)
ttaggtgctattgaagccatcagagtcccgaaaaggtttttgatttttcttattattgctgatgtaggacttaattgaatcttcagaatacaattttttttatttgctgtctatcttctgatcatttgctagcaagcttggatgtttcagcaccttaaattactaaaatattttcactgtcctggtgtcccgcattagtttttgcacaagtaatttcatataaggaatcggggatgtaaatatagcatcttagccaattgaaaatgaagacatttgtctctctcagtgcaataatttcaaacattgtggccttagagacagtgaatcaagacaaagctaacctatattttctatccaataagttattaaaatctatataactgtacttccagaatttctctagcttgacaacttgatgttttactagaacgatatcaatggattgttgtattgttgataacttgatgtttaaccgtattatgggtctaaaccaaattacaaaaaacaataaggtatgtatttttatgctatggataatactgaaatatcaaattatacaactatgtagaaatgagatgttccacagataaccaattccttgtaattacttatatatacaaaagatccaaattccccaagatgagacttacaatgtccaaccactatccacttttgtaaggagtagtgatgtttgtgatatactgatattgattgaaaaccttcacaggtctggttttaaacctagaagatcattggaagtca

SEQ ID NO: 27101 - DNA, 924 bp, Glycine max
  Intron number 2 from transcript Glyma17g13470.1 (locus Gly ma17g13470) derived from phytozome v7.0 (chr-ID Gm17; pos 10311934 to 10312857)
ttcagtggttatgtaagttgttatgttagtttatattttgtgttgtgtgacttcggtgagaatggttgttgttattatctaatgttctagtgaaaaaactgtgtttggatttcaatttttgatggtgactcagtggaatggaataaagttgttattgttcttttgtttgtttggataattttgtgacttgattgacagatttttgtgctccttaagtatgtgggcaagcaagaatacgattcccaagttaatgtgtatgtaatatcaaatggatagtttctaactcttggccggaagataccctaggttaacaaagaatagctaagtatgaaatgccttatatagtggtaaatggccaggcacaaaatagctccagaacaattctaattctcaattttaaaatcccagtttaaaagtgtaaatgaatttgtccagggttgtcaaattatttatcctaaattgatgtacattactaactccccctcccctccattctcctcaactgaaagaaacttagggagaaactatgttgatagtctgtgtagacccaaggggaaagtattattagtatatttgcttctctctgattatcttcaagtagttaacctaagacattatgatttatgaggttggtctatgagattgactacgaggctcactaaacatgctggtgttgatgctatgcctttcttgttcattgttctaatgatgctttgctctctttagaatttaattttgctctcatcagactttgtatgagtatggaaactttgacttagctgtttttcccagttgaaatgtgtattatgtgtaacatgccctttactggattaagcatgcatattaattttcttctctaattgctttattgtggtttcttgagtttttttggatcttatccatgttttctgtgacaggaactaa

SEQ ID NO: 27102 - DNA, 486 bp, Glycine max
  Intron number 1 from transcript Glyma17g10880.2 (locus Gly ma17g10880) derived from phytozome v7.0 (chr-ID Gm17; pos 8188091 to 8188576 reverse strand)
actcctcaatccaaaacttctcattccagatctgtgtaaacgctattctcttccatttccatttctcaattgtctttctgtattccattatcgatgttgcaattttcattcaaaattacactctcattaactaattttagaacatgtatgcaagttgttttcagctctttctgtgttgtatgctatggcatcttaattggttcgattgaataatctgttaggtctaccctagcaaaacaaaccttatactttcttatttccttggtgctttttgtagctttcagataggtttctgtgtgttaatcgaatagacctgaattatttattgtatcacaggttgtgatggcagcagcaccagcagctaccttcgctattggaaccaccggttccctcggccaaagaggaagctcgcttcctcaatcaaagtcctttgggttgaaattcaactctctgaatcatttgaagagcttctgtggcctcaaggcc

SEQ ID NO: 27103 - DNA, 340 bp, Glycine max
  Intron number 1 from transcript Glyma18g10150.1 (locus Gly ma18g10150) derived from phytozome v7.0 (chr-ID Gm18; pos 8968768 to 8969107 reverse strand)
caggttgttctttgaacaatatttcaatctttcatgtcttctatgatcattgaaattcatgagatgttactttttggtcatgtttgtgtttacaattttcttacgctttgatttggttatttcattccaatactattttataaaggaaaaagataaattaatataaaatcaataaggttaaattttgttttagtgcaagcaaagtggtgtttgaaatttttttaaaaccaccttgtttcattctttatgcaatatttttttttgtgtaaaataaatttgtttgtatctatttacttttttatataaataatggatttgttgtgcatttgggtgatttcag

SEQ ID NO: 27104 - DNA, 445 bp, Glycine max
  Intron number 2 from transcript Glyma19g34860.1 (locus Gly ma19g34860) derived from phytozome v7.0 (chr-ID Gm19; pos 42433666 to 42434110)
tgcaacaggtaacttaatcatcatcatatcaatatatcgtacacaaataactcaaaaggacaacaatttagatgtatgtcgtgactagttttggttgcgcaaagtatgtaaaattgttataaactcgttagtactgtcttcgattctacggaaaaaaaaaaaaactagcgttacttgcttttttgtgttgttttctaatcagaattagagttgtaggttggtttctatgtataacaaaagtttgcatgaaatgtcaatgtaaattagtgagataaaactttaattttgatcaattctgatcagagaacaccactagatcagaaactgtacatatgttttgtgcataacttataatagtcattgctctattgtggaggatgcaactatatgaagataacactgttttgtggatgttaggaatccgagaactattggtccggaggca

SEQ ID NO: 27105 - DNA, 870 bp, Glycine max
  Intron number 1 from transcript Glyma20g01240.1 (locus Gly ma20g01240) derived from phytozome v7.0 (chr-ID Gm20; pos 849859 to 850728 reverse strand)
ttgttgctgtcaagtatattgagagaggtgataaggtttgttaattaagttcagcttaatttctatgctttttccccttttttttcctttttaagtaaattgagttttcttttcttgttctgttggttgttgtaaagtttggtttgtgtgtgtgtgtggggggggggggggggggggggggattttggcaactgaagtttttggtgctttcggtggtggtgtttttgttttcagttggatatggtgctaaaagaggtgttggtggttaatgggggtgtaaatgttgatttcaagttttgagatgtgttgcccaatctaactgtgtatactgttttgttattcttgttttctggatggaatttgaggcctttgggggtaatagtgggtgcttatttgaatgtgaacctagtttttgctttcctcttctacctatttattgagcttaatatggtgcccccatgtgcctcttatgtgaattggtggacataatgggagatgctagaagtctatttgtttttatacataatggcatattttgttggatgaggtggtgaaattgagagtaaaaaagctaaagtacgcttgacgggagaacttcttagtagtataggagaatttataactattggtatagctgctttaacccctcaacaaggttgtgttgtgttggttcaataatcacatgtacacctccattcccccttatgaggaattttatttcttctagagttcatgtgagtcaatttcattggattttgcatgctaagctgtggggtagagttatttgaagtttggaaggaattgtgttgtgtgcatatggttttccctgcgtgatattgagctcaactgtgctttcttcttaacagatag

SEQ ID NO: 27106 - DNA, 672 bp, Glycine max
  Intron number 2 from transcript Glyma17g07480.1 (locus Gly ma17g07480) derived from phytozome v7.0 (chr-ID Gm17; pos 5484540 to 5485211 reverse strand)
gtgccaaagaaactcgtgaaagaatcagggttgtatgttcataaaagaactggaatatacatttcaatacacatttgtgtaattgcataagttgttgtgatttgtagtttcttacaccacatgttatctatatattatgtgccaaacttggcttccgtgtttggtttcttcctgttgtgcataaaaacttcgtaccccattgcccagaggctcttcgctatgcgaaggtatgggggagggatgttgtacgcagccttacccttgcatatgcaaagaggctgtttccggattcgaacccatgaccaacaagtcaccaaggcacaactttaccgctgcaccagggcttccgtgtttggtttcttcctgttgtgcatacttaatttaaaaaattggggaaagttattatgatcagaagaggagtagttattttattctatttccccttctgaataaaactgaaatagatgaagtatgatgattgacaagtgaatggttatgtagttatttctttattttttaaatgaaaaatgttattttgtgtcaagatgcatgtcagacatgatggagataataatagtatgtacaggattaaaaaattagatattatattactatatttgacaatcacgttggatgaatgaagctggtcgattgaacaggttgctggaggtg

SEQ ID NO: 27107 - DNA, 763 bp, Glycine max
  Intron number 1 from transcript Glyma20g36590.1 (locus Gly ma20g36590) derived from phytozome v7.0 (chr-ID Gm20; pos 44659312 to 44660074 reverse strand)
tccttgcaggtattgcgtgtgttactatagcgtctttaactgtggtttttcattcttaacgagagagagagagagagagagagaggtaattagcttttcataatatatatctataatatttggtttctgaaagtaggaaattggacaacaatttgacttagagaagagcctttcgtgtcatgctctatttcgtgatatatctttattattattgtagttgttgtaattttttcttgaatttcgttctgagtggagactatttcaacatcatcattcctcctctcattttgcgggaaaggtttcggtcatttcttttttccttgctttttcttgctagaattgttcaattcggctcctatattcttgggaattttgtaattttttttttatatattaatttaacgcggattgtggaaattactactgatacacctgtgtttctgtctgtaatttgttattcatagaattttgtgaatagtgctgttataatcgaaaatactgatcatttgtggcttaggaaacttgtttttttttttgttttttttttgttttgtcacttggtaatttgctagtgcttctcaattattgaatttgagtccaacaatggtggcagagaaatgtcactgtaagcatcagtttgtttaaaattggtgatttgattcttttgaaattaaattcgtggaaatgatgagagactgagaatggggattgacttattttttattttttattttactttttgcttgttttagttcaagagaac

SEQ ID NO: 27108 - DNA, 896 bp, Glycine max
  Intron number 1 from transcript Glyma18g05800.3 (locus Gly ma18g05800) derived from phytozome v7.0 (chr-ID Gm18; pos 4449045 to 4449940 reverse strand)
actcccgagcaggttccaatccaatcgtcgtttccccctcttttctgttaatttcgtatctcacgtgcttctctctccgtctctctctcgacctttgacgcgaatgaatgttttgatttcgatttttttagagtaatgtgagcctttatctttgttttttcaattcacgtggttaggatttttcttgaatctcggtggaggaaattgtgtttcaattggagtgtttgtatgcttgcggaaatcggtattcagctcacgaagttgattatgagattttggttcaattggaatgaggcttatagtaaaatgtaatgctttgcttgcaacaatgagaatcagagattttttttttgttaactgcatttaagtcgaaggctttgtttggatttaaaactttagggcagagttgtattgccgtggagtgagctttaagcggagtgagatgggatgaggtgacttttggccaaagaatatgtaaaagttgccttttttatattaaattgtgttgaagttagattcaactttgtgcgtgatccatggctggtatagatttttcttcaatgcattgagtgctgatgattttttcctcttgcttgtccttttcttttttacttgatgccaataatctctccctctaccatgtgttttgattcaaccgtttagtttgtactcttttaggacgcctttaatagagttgttatttattgtcctgtttttagaagttcatcagctagctagctagtttgtttgttttttctttttaatctttacgttttaatgctatacttattttatggtgtcttcctgttttgtaactacatgagaaaatattgattgctgaatttctattgcttggtatgtgcagattgaagaaatccgatccaggcttaatcttg

SEQ ID NO: 27109 - DNA, 1055 bp, Glycine max
  Intron number 2 from transcript Glyma18g06840.1 (locus Gly ma18g06840) derived from phytozome v7.0 (chr-ID Gm18; pos 5512906 to 5513960)
agccaaaagggtccgcgtccttgagctttctcgcaggcaatgtttctctctttgtcttcttatatatacacacacgtaccaatatcaaaggaagaaggaaaaagaattttgatggtttcttttcaaataccctttacttaacttcgatgttttgtattcaaagtttcttgttttgatgcatgttttccctgcccaaaatcttccccagctaaagttttctatgctaatattgagaattgagtgttgatgggaaatggaaagtggaaaattcagcatgatggtaacagtattttcagtaactaatatactgaaatactaactagttgtgaaaaattattattatattttatacactaaaaggagacagaaaaaaccatcaaaagggtggggcttataatttgtttccttgtgtttaactgtcatggcggtggtatcttctagggggaaaaattggtggacactaatatttagttaacacctagagagagagaaagacataaaaaaagaggaatatatgtgtgtaattaataatatgacgtgataaagaaaaagttatataaaaataagaagtgttagatgaaatatacggttaggtaagagtgtatatattatcacatccattttcaactggctagtccattcaatattttaaaaggaacgactgaaacatacgtaagagttaaaattaaaattattgctttatgttggggcccggtcatcatcttttagatgtaactactagtatttaaggataaacatgtttggactttgacaagttaagtggattctagaataaataataagtggcatgtgggggcccaccttgctgtgaaattattggtaactttgtggtgtaaaagtgcaacaaaagaacaaacagttggaaacaagtatgaaaaaggagttaatttgtctttgaagtgttaaaggaaaatttcaagggtcatcagttaagaaagtgcagtttgaataagtagttaataatttaccatttattgttttgtgtttgttgatgtcacagattgaagcaccgtggtcctgactggagtgggctc

SEQ ID NO: 27110 - DNA, 834 bp, Glycine max
  Intron number 2 from transcript Glyma19g02080.1 (locus Gly ma19g02080) derived from phytozome v7.0 (chr-ID Gm19; pos 1794945 to 1795778)
acgaattttacagtgtctgtatgtcagttttttcaccatcaccccctaaatttggtctatccgaggttttaacaaacaatctgagactgcaattttggctctgcaacgttgagtttttgggggtgtgtcagggatctcatcactgcaaatttggctgcatcatcgaggtttttggagtgtctgcaaccgcaacacgatcacatctgctgtatttatctgcaatttcccacgatatcaaggaatgcaacaaaaacacgacaacaactgcaatttaaaaccttaagtatcaaaatcagggtattaagttgggctggtgggtcaaaatccttgacattacgggaaattgcagatcaatgtggctgcaattgtggtcgtgttgtggtcagacactgtgaaaaccttaatgttgcggctgaaatcgtgatcattggtcgtctttaaaaccttgatcgaattgtctcagtttattttttctatgtatatttagttttcttttcagtatggttatatatatatatatatatatatatatatatatatatatatatatatatatatatatttttacataatgtttggtagatgggatgatgtctttgagtgagtatgaaattgggtcaaggccaaaaaatgattaatctcctaaaggggttgattctgtgtttgttgatcaccaacagcagaaacaaagagtgcacccttataattattttcgtagtaattcttctttgaaggttgccaagaatcaaggcaaaccaaaagattctacattgaaatcagatggctcttgagctgagttagactctgttttgacaggagaagtgtctacaggtc

SEQ ID NO: 27111 - DNA, 916 bp, Glycine max
  Intron number 1 from transcript Glyma19g22800.1 (locus Gly ma19g22800) derived from phytozome v7.0 (chr-ID Gm19; pos 28007835 to 28008750 reverse strand)
caagaatttctgatcattacagttccatagatcaggtaacagcttaattttttagtgttttatatagcatttaggtggtgtttggtttgagaaattattgtatggtccgaaacacgtgtgtccatggtcctgactaattttcatgtaactgagattttcaatttcaactacgagaaagcattaatgaaacttactaaatgtcatgtggagattgatcgaaaccataaatatgattagaccgatataatattttcaatgggtatagagagcttattggaacatgagaaaagaaacttataactcttctatttagcttattttaacaagtttcttgttgaaacttaagctctttttatttaagttttctgggcaaatttatggaataagatttcgtgtgataaaaaattattgaataaatgcttagtcaaatgtaccctaagatgatttttcttatttgactatcttgacgtttaggaaggttgtattttcaaaataaaaagcaaaaattactatacttgtgcaatgtttgtcatattgaatttgtagaaggatgtgtatgtgtgattacttctttctcagatatagatgcattatgaactaggtttcagagtgtagatggcagcgtgttcatcttgctttgatatgtgcttgctgaactatgctaaattcaattcaatgaagacaaagattagacctccgtgtctttagttagttgcaatgagtttagaactatacaatatgcatatagccattatgattcaatatcagaatgcattttcaaattcctttctcattgacggtgctcttgcctatctttgtgttactggaaaaaaatcaacactttggaattgttttatttctaaacttttggttgattacaggttagtgaggctcttgcacttgcaggccttgagtc

SEQ ID NO: 27112 - DNA, 787 bp, Glycine max
  Intron number 2 from transcript Glyma17g34380.1 (locus Gly ma17g34380) derived from phytozome v7.0 (chr-ID Gm17; pos 38325162 to 38325948)
ttgtttgaatttcaattctgtggaatctggtgagtgttgtttacagtttcaagttttttgttttttcttttgtgtgtttggattctttgaaacggaattttcttccaaactttatgtatgggaagggagaaggagaacaacaccacaaagttgaaagttgaaactttggctttgtggttcttaagaaagaggtgtgtgtggcttgtggctatggttgccattgttagaaagccaagtacccttcatgtgtttttctctcttgtttcttttccttggtgaagggtgttggagtttgtaaatacacgtaaagctgaatttgttttttcacttctttttttcttcctctctttctttgcaaccaaatatggcacttcttctgctgttttcagttggtccatttttttcttaaaaaagtcagccttttccgcgaatgctgagattgacatggtctgtttttgggatcttgtgacttttctttgcaatgcagctgtcaaattgtcaatttccacattgttaaaaatgaattatgttacttcttctactgatgtttgttttcagcatggctcacattgtgaaaatgaattttcaataaaatgtgggttgcataataatataacatcatatacaagtgtatataataacatggtatcaatttattaatatgatgtgtaagaacttgatttcatttgacttcaaggttcaaactatgttctgttctgcattgctaatgtttgaatactttttcgttgaaggagcaacgttgttagagataaagaagtcatttaga

SEQ ID NO: 27113 - DNA, 547 bp, Glycine max
  Intron number 1 from transcript Glyma18g42230.1 (locus Gly ma18g42230) derived from phytozome v7.0 (chr-ID Gm18; pos 51247332 to 51247878)
tccaagactgaaagtttctagattcgtcacctgcgagtaagtttcttcaatccatacttcttagtttttattctcaaatttcttcctcaatcaaactccttaccgtttgaaaatcccctgttttattttcttttaaaaatagggtttaacagtgtctcataactttcattccttaatttgaacctgtttgagctcaaatacctctgattttgctaacgccagattcaatatgccccacaaattcatggcattcttgtatatcgtattttaatccatttcagataatttgcgtgcctctgggttctttcgggacttaggtatgtctttaaattgattaaaatcatatatctcaagtttatataaagcttaagcagtacacagggaatgctaataacttgctctccttttttcccattaattgttgtctctagatatatgtttcacttatttgttattcaccatttcctttatcatacatctgattttttttttattattattgatttgttaaaggaggtggagacatattttgtgataaccctatacc

SEQ ID NO: 27114 - DNA, 740 bp, Glycine max
  Intron number 2 from transcript Glyma18g47720.1 (locus Gly ma18g47720) derived from phytozome v7.0 (chr-ID Gm18; pos 57297247 to 57297986)
attcgcctctttcaatttggaattgaggggaaaacggtaacttcgctttttctcctattcttcatgttcgtaaactctgttggaaggtgttttgttgtatgttatttgattcgtgtcgttttgaagtgcttggtggtgttatgggaaatttggttctcttgatttgggtgatagattctattgaaatgctaatcgggtcaaagattaggctttgtttggataaacttttcccgaagcactttttgagcttctcttataaattaaaattaacttataaccttaagttttgtacaatcttctcatttaacattaaaaaaaaaagatgctttctcatttaactattcttcagaagctgaagtatatgagttgatttcagcttacaagagaagttcaattcattttagtttatgattttcttctcctataagtgtttatagagagctttatccatacaagaccttaatgagtttgtttctgtcatgtgtagtagttttattgccacttatcagggcacattcttgatctggttttctcttaagttattaggtttggtgtcaaatgaatgttttttcagcgttaaggaagactgggtttactgctatgagttcctcaaactaggaaattgttgatggatggtcgtgggatttgatgcatttgatttatggaatgtgtttgtttccttgttaatcttttctgattccagagataacgagttcttttattgtgtacaggacgtttct

SEQ ID NO: 27115 - DNA, 533 bp, Glycine max
  Intron number 2 from transcript Glyma19g41270.1 (locus Gly ma19g41270) derived from phytozome v7.0 (chr-ID Gm19; pos 47580212 to 47580744)
accaagtgatagatcatattcatcattttaattttgtaagtaccctttaattttcactcttcttatttgatttttcttagaagtatgtgtttctttatatattaaattattatttgatgtctattcttttaagatccaactccaagtacattgtttattaatttgatatttatgaggtattattatttttttcatttttttaattatccgttaaacatgaaatagttttggttttacataaagagacgggattttggcataagatgggttgagatttgggaaggtgtttcctcttggatttaattataaattggaagtaagttgtaacttagccaaataataaaatttacaatctcaataggatactaattatgtggagaaaaaaatagttccatagatagggttaagatttactttgtgttttgttgagtttccgtaaaaataagtggaccttcctttttgtttcatgtgaaagaggtggaccttctactcacaagtgaaaatcaatgcttttttgttggcaggggtggaca

SEQ ID NO: 27116 - DNA, 695 bp, Glycine max
  Intron number 1 from transcript Glyma18g06410.1 (locus Gly ma18g06410) derived from phytozome v7.0 (chr-ID Gm18; pos 4962172 to 4962866)
cttgtcatcaaacctttctcatttcacagattgtggtaagttttttttttcttttcatcaaaactaacaactattgttttgttggtcgattagtttgagttgtagttatcaattggtaaccaaagggatttaaagacaatatcaacctttcaatacaaagatatcattcattttttattcaatgttgtattatatagggatatcatagttactaaaagtttaaaaatgttcattgacatgtattttaacttaagcatttgaaataattatactaagttgtgtttgagaatgccattttcataataaagtaaagaatttaataaacatgcatggttattatattgtattatctagggagaccatagttgctaaaagtataaaatcattcatgggcatgaaaatgcatttcagcttaagcatttaaaataattataataaagccatgttttggaatgaatttgtttttaagttattatgaattttacaataatcattataaaagttaacaaacttatcattcatgatgatttgtcattggaagaccgttaatccatgtattatttattctaaaatgtacaattgtttctttaacatgaattttctactggatttgatctaatggcttattatcttgtgttcctttttcaatggtctcatcaggctggaatcatattgggtcctttatttctaggtca

SEQ ID NO: 27117 - DNA, 912 bp, Glycine max
  Intron number 4 from transcript Glyma17g15920.1 (locus Gly ma17g15920) derived from phytozome v7.0 (chr-ID Gm17; pos 12637790 to 12638701)
gacaaccctgtagaggtactactctttaaactattgatcatgtatttatttatttttctcttctgttttaactatccttgagcatttggttttttaattcagcttcagtgttgtgtgatccatgtaattgatctcacttggtgggataataatactattgctcttgttcttgtttaactagaataatggcatgtaagaaaaaataattgagaaatcctgctacagagaaaaattacaaaggggaaggatgataaggaatcctgctacaggagagaacagaacagaaaacaattgagaaaaaatgccacatgctttgcaccaactaggcaccaaatacttaatcttatcccaaatcaagttctgtgccaatgaaatcttaagcatgtgagagttctggtcctattaaatgcaccaaactattgaagtagcatgggttgcacattgccacaaaaacttaacctgtttactttcaccacaaccaagaaagctaatcactataaattgttctagggacttgggacacacccaacattcgcctgaatgaggaattccataaagcaacctggcagaacaatttaagaacagttgagtgacaaattctctgcacacaccacacatcacaaacacattaggggaagaactagcccccctttttttaatatcatctgtcctgtattgtgtcatcataataagttaataaccttttggcttttgaaattagatctttttgctgttatcagctgactattaccttgcttatgatattttaaaatgtaatttgataaatttatcattgtctttggtagatacgcagatttagacttagcatgtacaacttcagtttggtagttcatgagatataaagagcttagatcaatgtgttgtgtacttttttgtgtttgatgtagaagt

SEQ ID NO: 27118 - DNA, 531 bp, Glycine max
  Intron number 1 from transcript Glyma18g50990.1 (locus Gly ma18g50990) derived from phytozome v7.0 (chr-ID Gm18; pos 59973724 to 59974254 reverse strand)
acagtagaaattttattgaggttgtctgtcaaatctcgatctcttccgtttcaaatgcgtttgtaaagcacatgagtctctcatttccaaaatcacttatctgatgcacccacttaatgaattcttctgaaatcaaaattgagatccactaaataacaagcaagacttgtatagttttgtgatgaaaagtgttagcataacactaattaacgtacttttctaatacaacaaattttacaatcaagacagaaatttaaaatataataaataatgtcatggagaaagatagatacagggtcaatggtgatgtacaaaactttcttttatattaaaaactataattttttttaatggaattcatttgatatgaagtgagacttacatttttgctatttataagattattttagtatgttgttagcattttgttgttgttgtgatttctaatattcttgaaattgatgtggtataggagcatcaaggaatccaagtcaagttaaacgttggagaacccgtataagagcaacgagc

SEQ ID NO: 27119 - DNA, 376 bp, Glycine max
  Intron number 2 from transcript Glyma19g26570.1 (locus Gly ma19g26570) derived from phytozome v7.0 (chr-ID Gm19; pos 33600130 to 33600505)
cctgtgaaaacgccactgttattcaggtaaaacttgtgtttcccctttgtctaggtttcacaaaattgagttgacaattagaaagattcttcttctttttcagttttttctaatgatttgatgtcataaagctggtgttttcctctgttttggttcacaaaattgagttgacaacaagaaagattcttcccgttttcttttttctttcaaattttctaatgatttgatgttattgactccttagttgcattttttttcttttttaatataaaatcaaaattgtttcctgagtagattttttctttttggaaacaaaatacagctatccacttttttattatctaaatattttttcaggttgacagtgtcaacaaac

SEQ ID NO: 27120 - DNA, 486 bp, Glycine max
  Intron number 4 from transcript Glyma19g38410.1 (locus Gly ma19g38410) derived from phytozome v7.0 (chr-ID Gm19; pos 45327962 to 45328447 reverse strand)
tatctggagataattttgtagggaggtaggatgcgggtctgatcatatacaagcctccattttgtgcaaaattattaagcactggagctagtttaccaatctgctagtttgaattcattatcgttcttcatggcaaagtgaaatttagtcactttatatctagatatctcacgatccatggaattattctatagatactttttcgggtactggagtttcatttcttggatttgaacatttttttttattagtttgattggctgaactttgtgattcagttctacaagtgatacttctttagaagtagtgttgttggcctggtcgatgttctgtttatgtttctaacaaagggcaacggattataatatgttagaatttttagtttatgaatatagccacataggtttattttgctttactttcccccttttgtattcttgttaatatatcttacattggatatgcaggtctgatttggaaactgtt

SEQ ID NO: 27121 - DNA, 606 bp, Glycine max
  Intron number 2 from transcript Glyma19g38340.1 (locus Gly ma19g38340) derived from phytozome v7.0 (chr-ID Gm19; pos 45258808 to 45259413 reverse strand)
cttcccataccaacctcactctcttcacgcaccaggtagcttatccatatcatcactaattatagtaataatattctctgttatttcttgtttcgggacaaaacttaattaaaacgcgctttcaattcaagctttaagtatttttagcactataattggagttttatttcattaatctgatatttaatgcagacattttattatgctaattaacgtatgaaactctatttctatctacctggacaacaatacgtccaaaataatattcattggaacaaatgtggtcagaattcagagaagtcgcgtgagggacacgcgccggttttcgttgaactaaacgtggtggtaaaaatatataggattcacatttttttgcatattaattactactataatcttgttaaatattgcagctggtataaattaaatggttttgttgtgtttgaatgtggtatagtacatactatagtgtatatttggtagtggaagatatgttttgattggaacatgaaatgtggtatgattgaaggcgtgggcatttgcacgtgttgttaatgtttgttacttacaggtggagggtcccaaggacagaacgaaacgacacca

SEQ ID NO: 27122 - DNA, 882 bp, Glycine max
  Intron number 2 from transcript Glyma20g24760.1 (locus Gly ma20g24760) derived from phytozome v7.0 (chr-ID Gm20; pos 34409907 to 34410788)
tcatatcagtcatagacaggtattggcctcaatttgtcgtctttttttttttttacatgttttatgttggtttggatttaaattgttttcttgttactcaaattgtgggtttcaaaccagtttgagttgtaatgggctcggatctcttaaacaagtggttaggggtttgaattttgacttgtgtatgaagaaaacctggttgggaggaggtaacccaccttttagtgccttcagatctctcaaaggaaattagtctcggtaaatgaccggaaatgctccttgtaggctttgtgtatcaagaaacgttgtgggtcaaaaggcagacattgactttggatgttagtatggtatgattaaagaataattggccattgttttgtttttggggtatcaattcactgttgttttagaactggaaaaaaaggtggttttttttttccgtataagcaaatggtatgggaatagtaagttattcttagtatgttggtttatctaagactaaaagtcaacaatgcatcccgatttagttttcttctttgctgtatacagtgaaagtggtggttgattgacatattttgtaggacaatatcactgttacccaatgtcctagtgtgaatatattttctctttttttttgccatccaaatccaatccctatgttttcaacagtctcccttccctggaaatgcaaataagcagttgttaacttgttatattctgtttttaaataatttttctttgcatgtcttcaaagattaacgttgccagtttctaatttgtggttaagtttttctgctgcttcttttcagctttttgtataattgattgagtccataagatggtctcttgtggcttcttttattctccagacttccatttacg

SEQ ID NO: 27123 - DNA, 976 bp, Glycine max
  Intron number 1 from transcript Glyma18g11960.1 (locus Gly ma18g11960) derived from phytozome v7.0 (chr-ID Gm18; pos 10764340 to 10765315)
cttctgagttctgagtaaggtagctaaccttatttccactccttttgaacttacctatgttgtgatttgcatttacaatgtatggttaggtagtaggatcaaactagtagttttattattctcagactaggattttttttttttttttgtgtgtgtgtgtgtgtttgatttccaagtcttttggtgaagttgatacccttttctggattctgctaacgtagtccctttaaagattggatgatttttagtagatttgattctgcatcatcctaaccattttgggttggtggtccttttgggtttatttctgtacctcttcattctttttttattttttattgaaaaatatcattatttttatttcctttatcccatggtcatacatgcatgaagatgattctagctggcattcgcaaactgatttgtggtatgtgtcttgtggttgagaggctgccacatgatgtatcatggcaatgtgcatttaaatttgtgtttgtttcacccaataaagcatgcattgtttgcttgccctactcaattttgctgtttatggaaaatggtttccttattttgtgatttgcatctcaaaatatttcttgtagtcaagtgggggataatatcatttgaattctgtggctgatgtgatgcttttctattgtgaacctggtgaaaccttacaccgattcatatttcttgcccctcttgcttgctgtatgatatgttgctcatcagttatttgttcattattgccatttactttcaatcatgaattgttaaatggtaaactagagctacttactacttgctatagtttgcatatgctatttgcatgtattgtaaactctgctggaaattttcatctttcaatcacgaattggtaaatagaagactaggagttactgattttgatttatttgaatgcactatttacatgtataccagattttctggcaatatccttctcaaaagctttgaa

SEQ ID NO: 27124 - DNA, 787 bp, Glycine max
  Intron number 3 from transcript Glyma20g06750.1 (locus Gly ma20g06750) derived from phytozome v7.0 (chr-ID Gm20; pos 9238745 to 9239531)
ttaaccagaaatttcaccactgcttcattgtaagtgtgaatttctgcttatgtaatgtatctttctattccccttttggtcatctgactttgcttgtggaagtatctttcaattctaatccttttcatgatcgaggtagtgattgtataaaaccttctgctaagagaattattggtatatcttacttcagtaaatgtaattattgggatattttatgtgcatatatgaggcatataaataagttctctaaccttcttgagctaatttttttcatcagactctctcattgacttaaactcatggtcagttcagtttttctcttaattttagtgaacagaattaaattcaaaatacacgctcaaagttgtttagtttgagaaatggttttctatactctatttttatgaatgattataaaaatgttactttattttcactttgtttaatttattattttcatcattttctctaaaacaatgaaaataagatgacattttttataattatttgtgaaacatgaataaagttaaaaccaaaattgattttttagatcaaacaggctgtaaaattttcacctccacggacaattttaagagaacaccaactcattcatatgttattttatttttttatattagttaatatttgttttggaagaagcattgaaaattgtcaccctgtatttttcttcagtttcaaaaacaattattctatgtagtttcttaagagcttctggacttgagcagaatgcaggaagctttaatgcccacttaactctgatatcagg

SEQ ID NO: 27125 - DNA, 707 bp, Glycine max
  Intron number 2 from transcript Glyma17g28980.1 (locus Gly ma17g28980) derived from phytozome v7.0 (chr-ID Gm17; pos 30990674 to 30991380 reverse strand)
ttagacatcggcgcacggttgcttctgttcctaaggtatgattgtaggtttaaacattttctaattttagatatttttcattccatatttgccaccatagcaacatagttagtagttaagcatgtgtttcggtaagcatttgcaaatgtgattgtggatggttttgattttacatattttggttaaactatcttttaggatgtaactacattaataaagacattaattctaagagaaaggaaacaaaacatttagcattgctctgtttccgatgttggtgcatgttggatttgtaaaaatcttgttcccaatgaagcaaacacgcatctaatgtatggtagaaatgacaattgtggatggatatttttttgtgaattttccccttcgttgttttagaaattgattctatggcctagtcagttggggtgataggctattctaaaggactttgctgttttcttccttttgtcttttaacacgtacattggtttttttattttgttttccgctggaaaaaagacagacatttgatcagtcgcaaaaaaagtttcctttcacattttttcttcactttccaatgggaaataacatttcaaagcaagtttttccaaagctaaattttttcactaaacttagatttggctgggtttacaaactgacacttgctgtgttttttgacctttttttttttgaaattgacattcaga

SEQ ID NO: 27126 - DNA, 985 bp, Glycine max
  Intron number 1 from transcript Glyma19g24670.1 (locus Gly ma19g24670) derived from phytozome v7.0 (chr-ID Gm19; pos 30325208 to 30326192)
gcagccatatcctagcccacttcgtcgattttacggttagtccttattgatctgaagctattaacaattcaatatgtattagttgagtagttacttagttcatcttcgttggttgtcatcgaaacccaatgctgaatcaatgtcttaatgttaataataattgttttgtgaatgccatgaccatgatccgcggatgctactattgccaccaaaatattatataattcgactcacattccacatgacaaggtttgttcttagcaatttctgtgttctcaaaggcttttttttttgtgtgtgtgtgtgtgtttcacttttatttgcttttcggttacagaatctatgtttgggtcgaattgtaatcaaattgagtcttggttgaggccttgtataatgtgtatagcgggttgtatcttctttgggatttaatgaacatgcctacctgcccgccacctgtttgatgaaatgcttgaacttttcagaattaaactagtgtgatatgttggcggttgaatttgtgatactacacctgttgattttcttgtttgcatctgaagtaatttaacaaaaacatgagagttttgttttgtttattattatattgatgaagttaccggctgagttttgaacacatgactgtttatatctgtgttcttaaagtgctacaataccataatttacttgtgttttgatacctgaacctgaaatcaaagcaataagacctcaaggttgttgtcggattgggttaaccataggttacccaaggccttttttggcttttaatttggttcttataacattactaataatgtaatacaagaaattacacatcacaggaagattcgttgctattcttattcttaagaagcctaagcactgtttatttttataaaaaaaaatgaaatttgttggtttgatattgatggtattttttttttggctcttgacagttagaaaagaagtgacttggaatctgaatccaaat

SEQ ID NO: 27127 - DNA, 374 bp, Glycine max
  Intron number 2 from transcript Glyma17g12690.1 (locus Gly ma17g12690) derived from phytozome v7.0 (chr-ID Gm17; pos 9562148 to 9562521)
attaactaatcgaagtttaaaaaatttggaatttggttaggttgtttttcttgttatactttcatattttcttcagttttcctgttttctttttgtttttagctttcacgaatttttctttgtactattttttttttctggatcctcggctgttttatggttgaataattatttatccttctctcatcttcagggttcttccagctgtgagaacagaaaacgttctagcacccaacttcagaagacatctacaaagacaaaactatcaggttctgcttactatcgtcctgaaaagaaaaaactgagtattctggaatcagaactcatttattttaaaacattgaaacgaggaagcaattcacaagttgaggcat

SEQ ID NO: 27128 - DNA, 595 bp, Glycine max
  Intron number 3 from transcript Glyma19g37210.1 (locus Gly ma19g37210) derived from phytozome v7.0 (chr-ID Gm19; pos 44426546 to 44427140 reverse strand)
ctcctccattggcctgcttcaccagtggactttcggtgagtagtggactactagtgtactactacaagcaagttaggttcagctagcttaattcattagatagaattataactatatttaaataagtaaataggaaaaaaattattttttttatttgttgattaagatcaaactaagaaatataataaatattttttatttttttttgtgttatttatcttttataatcatatctcttacgaattaatcttattctcatttatttcgctaacaatttcgttgatattggtaattcatgtcattttaaaattttaaaaattataattaagaagataattgaaaaaaaggatattttaaacttcaaaatgacagataaataaaaatgattttttaaaatactgataaacaaagaaaaataataatattgtatgcttttaatatctagtaattaaattatcaaaatatacgtgaattctgttataaaaatatggtccaaaattaagcaacactgtcatgcaagtgctggctttgatatatatataattttcatttaaaaccaggaaagtggtggccacctacgcagaagaaaccaaac

SEQ ID NO: 27129 - DNA, 942 bp, Glycine max
  Intron number 1 from transcript Glyma20g00760.1 (locus Gly ma20g00760) derived from phytozome v7.0 (chr-ID Gm20; pos 479417 to 480358)
tctgcaaagtcaaccctggtggaagaggcactgtaagtcgaacccaaatattaattgtacttttttacctattgagtaaatattaaattatgatagagacaattaaattaatacaatagcttttatttaagcaattacatttaatattatttattgctcaattattatgatacttttttacatttaatgtaattttataagaaaaaaacatgtcaaaaaaatataagaaagtttcttcttaattttaaatataaaaaaatttcaactaattttaaaatattaaaactatgatcaattttaacttatgtaatgttattgtctttaaaatatttttcattagttataataattctttcttatcttgatactaaattctaataaaaaaatcattaaaagtgatataattgaatgtgaataactaacttttgattaaaattagcaaatttgcaatacaatattctatatataaatataattatatttaatttaatatatatagttagttatttaatttttaatccaaattgatcatagtctttatattttataattagtaaattttgtccctcattttggtatccccaatctcataaagtgagacgaagttcaccatttataaaactatggaggccaaaattatcatttttaaaattaaagaattaagaccaattttaaccaaacattgagaatttctaacacattttatggtaatttttcacaaaaaaatataacttgagagaagtatttttaaaaagtttaatcgctgtcaaatactaattaatcaatgataaaatttaataattggaaaaaaataaacaagtttgagatcagtaaattttaaggataaatcctattaaaattattgagtgactaatttgtttttagtggtgaattttgataactgtaggtaaggaccatttcgttgccctgggtcgaaccgcg

SEQ ID NO: 27130 - DNA, 781 bp, Glycine max
  Intron number 1 from transcript Glyma17g37190.1 (locus Gly ma17g37190) derived from phytozome v7.0 (chr-ID Gm17; pos 41010826 to 41011606)
ttttccctcttttctctcagtttttagtttccgagtaagattcgcacatgcttatgcttctttcatttctttgtttcgttgatgatattttgttaatcgtatatatcaactctttttaatcttttgagtgtttcgaaaccctagaaattgccctgaggttcgagaaatcaaaattgacggagaaacagatacggacacgattaatattttgttattttttaattgttttggaagtcgtatgaaaaatggaatcgaattagcttattgtttctcagtattggctttgatttatgttttgaactgtgaataatgaaggtgtttgtgggtacggggcgtgattagtgcgtcacgctgcgtatgtggaaatcttttacacgaactagttttaaatgaacttacaagatgatcgagtagtttttcatactttactcatagattgttcttcctttttttttccgactatttttacaagccttgtgttcactgttgaagcacagtggtggttgtgtggagtctttttattattatgtatttagtttctaattggtggatgcaattaatggaaacttattatgattgaattttatggtggaatgttggttgaaatagattagttagagcatcagaaatccaaagtttagagcgtggttctttatatgaagcttttggtctctggaatgtttttaagacctgtgttgccttgaattctcagtttaatgatctttcctttttgtttatttgtcaggaagaagtacggttacggaatcttgctggaaattga

SEQ ID NO: 27131 - DNA, 785 bp, Glycine max
  Intron number 1 from transcript Glyma19g00360.1 (locus Gly ma19g00360) derived from phytozome v7.0 (chr-ID Gm19; pos 159647 to 160431)
atcaaggataaagtatgaacgcttcaatttcttagtctttatttttttattagactaatacactaaattaattatggatggtgagaaattttaaattttaagaattttaaatactattgaaattcttttatttttagaattgtgtttggataaaaaaaattaaaattatgaagttgaaaaaaaaaatgaatgaaaaaaaaaaaaagatatggctggtcagttagttatatctgttccctcatctggaaaaaaacggtaagaagagaattttaatttcttacgttatagaaggaaattaaaatttcagatttttagttatttaaaattttgtttcaaaattccaaaattttaaatttaaaaaaaaacatttaaacaataaattctagattacataaattcaaattctcttataaattacttttctcagttaaaattctctgtccaaatgcactcttcgtaataaaggtttgcttcaaagattagcttaggaattttgcacccaagttttatccattatttagttagttcttggaattttaactactggttaatttagtctgtgaaattattctttttcgtgatgttagcaaatgatggttattttacaaaaatatggactaaagtgactgatattgttcagtaattttagggtgttactcttatacttattttggtggttttggatctgcttttaatatgaacaactggttttgtgtccctgcagcttatatttccttacctggatttgaacatatagtattttgatttggggcttcaaaatcgtg

SEQ ID NO: 27132 - DNA, 484 bp, Glycine max
  Intron number 1 from transcript Glyma20g36680.1 (locus Gly ma20g36680) derived from phytozome v7.0 (chr-ID Gm20; pos 44727672 to 44728155)
tctcaaggtaaattaacttaatccaattcctactattgctattcaatcttaattttttttttttttactgttattgcgtgcccgtaactttttttccttctttctatcatcaaagatcatccaaaaaaaaaatcaacgcaataaattcgttaacagaaaaacaattatgagctgcactttgtgtttgatcagtgcggttgcatcgtatgctacctaaaaacttcatgtggtagaaaaacgcacacgtgcacctacactttagctaacacactgacaccttgccacccacacacacaaaaacacacaacccaagaggaaggaaggcacgaaaattgaagggaagcagttttgtctattattacgtgttgaagacaaaggtgctaatagatgctttcattcaatggtttgcgtttttggatttatataatttatggtgtatgtgggcgcaggaagctagcagagcttggatataagaggagtgcag

SEQ ID NO: 27133 - DNA, 954 bp, Glycine max
  Intron number 2 from transcript Glyma20g04560.1 (locus Gly ma20g04560) derived from phytozome v7.0 (chr-ID Gm20; pos 4774117 to 4775070 reverse strand)
tggacacctgccaagcctctaccctgttctgccaggtttccaatttattttatatgcttatcattcttgaaaactcctatgccaattcttatgaaataacagtatgtgactttgactctttttgagttttcattgtccagaattaattaacacatatcattgatgggcaaaattttagttttagagttgatatcggtccaaatttaatgaataccttgtgttcctcaatagatgtactttgttgaatgatattcttgcccttgatggcacggtcatattttccatcactggtagaatagtgcattggttgggggcataaagaagtctgaaactctattcctcatatttctttgttgttaggctgtttagctgctattagatggtctataatttgatgattaaggatatacacctatatttaaagagcatctaattctattctgaattatttttcttctgtataaatgatggttactttactttcagtcatgggcattgctatggcaattaaataattttgctgaaaggagtcttacaaatttcctatactgaggattctggttttaattttatcttcatgctaacatagacctacatgattaattgtataatatatttccctccctcataaacatcatatcatggactacaaagaatacgaatttatccagtctgcttttgttttttgtttcttttcttatccttctctagcttgtcttcctggattaaatcgatattcttagcacttagtgtgtattcattatttaaatgtatagatcattccaagccagtctgtttcattgtccacctgaaatttaaatttcttattatgttataataataaattattttcttctttctagttgattattttccccaagttttgtttctgactgcattccttttctaagcatggcagcttcattcgccaggtgttttggcaattggaagtag

SEQ ID NO: 27134 - DNA, 404 bp, Glycine max
  Intron number 1 from transcript Glyma17g34070.1 (locus Gly ma17g34070) derived from phytozome v7.0 (chr-ID Gm17; pos 37964074 to 37964477 reverse strand)
tccccaccgctcccatcaaaggcgccacgcagcaggtttgtaatatttttagggtttgtgaattgtgattaggttatggttactattcgatgcaatgctcaacgtagtagcagtcagacatattttgatgagactctttctaatatatatatatattgccagttggaaattctatgaaaaaatgcattcccaattagaaatgctgtaaaaactaaaaatactgaatagtgttttgtgtgaataatattatatgatttacttgaagatatttatttgtatgtttgtttatttattttggtaggttgaaaattagtggttgaatttggaggttgtgattgtttgttgagtgggtttggtttgttcttgtaggttgaaatccaagtgaggaagttgtattgtgtcag

SEQ ID NO: 27135 - DNA, 673 bp, Glycine max
  Intron number 3 from transcript Glyma19g07430.1 (locus Gly ma19g07430) derived from phytozome v7.0 (chr-ID Gm19; pos 8780143 to 8780815)
ttcctcttaccggaacattcctgtttctcgcaaaggttttttcttttccacttttttcccttccttctatctttttcaataatctatcattgttttcctctttttattccttttaattttcccgggctatcaatgaagaagcatccaacaagaaagttttttccctttttactgttattcatgtttgtttcattgatatttgcttctatttggaaggttttaattttatttgttggtatgcatgttttcttcttaataatagttattttttcttactgatttttcaattttgtttttggttcctttttattttgtcgggctatcgacgaagaagcatccaacacgcatgttttttcctcttttcctgttatgcatgtttgtttcattactatttgtttttatttgcaaggttctaattttgtttgttgttatgcatgtttgcttcttaataatagttattttttcttactgatttttcaactttgtttttggttccttttttattttcccgggctaatttttttgtcatcttccccatatgggttgtaagttatgtgtttgatgaaatgcctaaatgaagttatagtttttaatcttaaaaattcatgtgcatcaatgcgcatcctacaaattccacactgggtgtctaatgaatgatacatgcaagattttg

SEQ ID NO: 27136 - DNA, 868 bp, Glycine max
  Intron number 3 from transcript Glyma19g02380.1 (locus Gly ma19g02380) derived from phytozome v7.0 (chr-ID Gm19; pos 2098330 to 2099197 reverse strand)
tcaccactgatatcaaagtggacaccggttccaatgtaagttcaccgttgttgtttggaaatgttttgttcttctctgtgcttttgggcgtgcaaaactatgaaaaccaattttggtggttgatatatgttttactaaccttgcaaggtgggattttagttggtttcaatttgttggtatatgttcatgttatggtggtgtcagtgtgtaaaataatcaccgctgactggcttgttctggtttcttattgttttgaaaccacttactgttaactttttcaattagtctgctcaagccctgctaaaagggtagtgtgatggatgggaggtagaattgaaattggaagtagaaaacttcaaaataaattctaaaattgatagtattgtagaattgaaattggggggctttagttatatgctggctgtgtaattgaaggtgtttctatatgtccccactcctttattgtagctgtttgcaaatgcccttaatgctcattcaatacggaagggtgttctgattttgatttcagcttcaatgagctgagtgggtgaggaaccctgttgaatctcttcgtgtgtatatatgatggcagttaaaattcataatttacaacagatatccaatgcactattcctaaacttgatttacatttaagcaaattgggcaatggggatatttgagggatttcattggtattatgcttggtgtttgatatttgcacaatgtcaaccaaaatcatcatatgcttcttgccactatgtcaatttgcttttatgttctttaatttacacagacctattctattgcatgaatttcactaaagttgataatgcatttgcactccagcttttcacaactatcactgtca

SEQ ID NO: 27137 - DNA, 466 bp, Glycine max
  Intron number 2 from transcript Glyma18g01880.1 (locus Gly ma18g01880) derived from phytozome v7.0 (chr-ID Gm18; pos 1099377 to 1099842)
aacattactagaagcgacaaagttagttagaagttaaaacctaagatagttaaaaactggaaaactattttattgaatcacaagtatttattaatactatctatgttaaaaaatataaagttaaataataaaattttaccttcaataaaaagattaaagaagaaatccaataaatattcaaagaaaaaaaaatataacaaattagaaactactataaaaatctttatttaccaaacagttagtaaatatactccattaattaatgaaacttattggaattgtgagtttcactaatgaacccttttggtagttttaacaaataataaaatgtgtgtacaaacgaatgtgcttttttttataaaagaaaaaagaaaaaaaaaactcactaaaatctttatgattccagtattagtgatgaaaaacgatttctttcactaattctttgatttttctgtagtgacggagg

SEQ ID NO: 27138 - DNA, 863 bp, Glycine max
  Intron number 1 from transcript Glyma18g50870.1 (locus Gly ma18g50870) derived from phytozome v7.0 (chr-ID Gm18; pos 59878394 to 59879256 reverse strand)
ttttgaaagcctccgaggagtttggatttttccaggttctttctgaataattttctttccctttgtcataagtaatttcagtacctatgtattttctacttccatcatatctcagaactcctcttttttaaaattaatcagcacgcgtagcaggtaattactatattgtaaaaaaaaatccagataacaaagtgcttcattttcatgtgctaacaatatgtagagttaattatacttatagtcttttatgcattacattgtgcaactgtggtacctagaatttcaattgcataaataggatcttcaagatattgtaagtttagggtttctttttcttccattagttttttgttaaatatattaaataaatttcacaaactccactcaaattatacttgatgatgatgtggaaatgatatgtcatgtaacacatgttaatgtgattttattgtatttttaattccttattaatgtaatattatagagattaaaaatgtaattaatctatgccaacatatgtgtgaagtagcttcaattgttttgtcatcttctaacatcatgttagtaaaaatctattaaatatttaatgaaagcttgatatatgaatcaaaatcacataattaatatatctaaataacctaatttgtacaactattacttggaggatcaaagttgtacaatacgaataaaaatgtaattaagtcaaatatgtatgattaaaaaagagcagccaaatgacattataactcccacataatggagtctataggactcttaaggtcaaagttcctcctcacctctgctaaaatcgtgaactgatttggttaatgtatatgaaaaaactgtgatgtaggttatcaacc

SEQ ID NO: 27139 - DNA, 584 bp, Glycine max
  Intron number 1 from transcript Glyma18g09460.1 (locus Gly ma18g09460) derived from phytozome v7.0 (chr-ID Gm18; pos 8361994 to 8362577 reverse strand)
tattaccaagacccagaagccaaaacgtgattccgtatgttttaattgataaaccaaaatatttgattttcatagtgatgccaattttcaattcgcctatggtttggtagaatcatgctgcttctgctctatttgttcgtttcttttttttatgatgatgcaccccacttgtttgataaaatgccctctaatatgaatatcaacatggtgaatgttttgtgtctgttttcatttttttatataattacaaaattgccaccatattttcttcctgttattcttaaaagtaaaaaatattataattattaattaaaatattaaaaccaggactagtgaattgacacacagcgccaattacaatccttggtttcgtgtaaattttatgcaccagtgaaaggtgcatttgtgttatcaaagatgtggtgacataaattattttgtgccttcacatggtataaacttttgaaacggttaattcgtcagtagcattaagagttctagagttcaatccctatagagtactataagttattgatgtatgttcacttgatagttgatgacctttgtgataggtggttggacaa

SEQ ID NO: 27140 - DNA, 697 bp, Glycine max
  Intron number 1 from transcript Glyma19g29130.1 (locus Gly ma19g29130) derived from phytozome v7.0 (chr-ID Gm19; pos 36710610 to 36711306 reverse strand)
aagcccaaatgtgagtttttcttcttcccaccaatttttttatttataaattaatttttggattttaggtgaatttcattgaggtgcctgaaatgtccttgcataacaatgaggcagggttttgatgattaaaatggatgttttactataaacaggtttaggggtggttgtcaaaatatttagatttgcaaaactttggttcattaggatcttgaaaaatgtttgaatcacatactcatatgaagttgtgtgtagagattgattcaagtgtcatataaacatgtctataatgattatccattgaattctattgattcctctttatagaatggttaaagggtatatatatatatatatatatatatatatatatatatatatatatagcatattgcatcacaggaataatcattattattttcattgtcttgtggtttctttgttaaacaaaatgccatggcttgtgaagtttgaatattactttttagtgtgttattctcttataattgttgctcttttgtttttcaatttttaaatcttaaggattcgaggttgttgtgatgattgatgctgatagttttcatattctcactctctctctctttggagtttatgtgtctactagcacttatctagccatgtgactcatgaaattttttatttgtggtagattctagattctcacagcaagaacttc

SEQ ID NO: 27141 - DNA, 838 bp, Glycine max
  Intron number 3 from transcript Glyma18g05060.1 (locus Gly ma18g05060) derived from phytozome v7.0 (chr-ID Gm18; pos 3800204 to 3801041 reverse strand)
aagaacttattaagaaaggttcatttttttgttccttttgctttatctcctttgtaaccataatatggttttggtgactagaccggtccagtcctggacaggccaatcagttggagtgtcaactgtccaagcatctgaactagattgacccaaaacatcagacttgagattggactggcccatgaccagtttattagaacaggcttagtctaaactcaaaattttaaaattagtgctgaggtttgggacaactataatgccagaattatggtccatttgctaactaaacctcaaagcttcattaggtccttgcttaaattaaactgtccacagtttaggcatgcctgggcttaacccttgtcttcttccccttcaaagcctacttttgtatttcttttttgttacattgttacacactattcttgttttgataatagtaagaacatggtaaagagaaaacaacattagttttttgatgatcactttggtgcacatattaattattttatgatgttttctatgtgatccagttcaactgccagatgccatttaaactagtaactgctaaccttaccagtttactgatcaattcagttttttaaacattgctttacattttctccatctttagtgcttgcagttgttactttcaatatggttttaaggttgaacaaattccttattgtggaatatatgtccaacaaatagaaatgtgctgaaagaagtttcacaagtagattgaagaagttttttgatcctggacaacaatctgctactataagaagatattttcattattgcagagattgaacagcttttggaacctggagaaagagca

SEQ ID NO: 27142 - DNA, 714 bp, Glycine max
  Intron number 2 from transcript Glyma18g53000.1 (locus Gly ma18g53000) derived from phytozome v7.0 (chr-ID Gm18; pos 61411482 to 61412195 reverse strand)
aaaataaggtatgtttatttctggccttgactatttggatttataatttgtatcattaatgagaatgaaacttcagctgagtaattcaaaataaataaatgaaaaaataaaagtaaaacctttgtgctgttcctttgctcttttatgtgtgctgtggtcaagtttttaaaagtctaggacctgagttccttgatgaacacattgacaatttgttatatgtggcattttagtccttcattgttgcttgagggtgactctttgtatcaaaactgtcacacatagtttttctttgaattgctatttccattttcttcttcctttgttttctttggatcacaacagcatggaacacactagtgatttatttgttgtttatggtaaacaacatgtgagcatgtaggaagcagggcccactatgtcactctgcacgaattttcttctccagttgaagtgaaagaggattttcctagttctaaattaaaaaaatgccactaaaatccagcagccaatttaaaggtcacttgatttatacaataaaaatacctttctgcaaacatacattactgtttctggttgttaatgtttaagtttgactgtgagcgagtataggagtctattgtatggcaataagagttattatgcactgacaaagttccttacattatactattgatatcaggaactgaatattggtggaagtttagtcactgcagc

SEQ ID NO: 27143 - DNA, 913 bp, Glycine max
  Intron number 1 from transcript Glyma20g35410.1 (locus Gly ma20g35410) derived from phytozome v7.0 (chr-ID Gm20; pos 43678447 to 43679359)
tggaagagctcgtctacaaaaatatacgatttgaggtaccttcacttatcactttactacttcatttattttgttttaatgtgttgatttggtttcaaaggtttaacgttctttttatttgttgccgaatatgtatgagtacgggacttgtttattcttaatctttcattagtctgatcaaagttctgcccggaaagcaccctatgacccttattagtaaataatagactactagcagttaaattcaccagcactcacggcatccaaacatctttaaaaaaaaatacagaaacatatacgtctgtttggtttccatgaaaattgtgttttgtagaccggatgcatgttttctatttcaaggattattgacatgtagttgatccctcctagagaccagatctgattgttgttttctcccggtgcatttgattggggtagaatgaagaagagagaagggatttttttttttttttaaaaaaatcttctcatttggtttagaaatttgaagagaagggaaaacgcacatgctttctcttgcaaaccaaacgagggaattcccttctctttcctccattgtaatttattccctctcctcctttgaaccaaatgcaggaggggaagtgtagaagggatgtctgaaattgaaaacatttatttctacttttcttttttgggcttcaggtagaacaggcatttataacccttcctcgagtcctttgctagctaattttttttttcccaatctggttaagggatggatctggtttgcataacaatccacatgaatgtttttaaaaatatttggtattgaatatttcgaagctttactactgtgcaggattaagacattactcattacactttgtcattcatttcaggtctgggatcttggcggacaagaaagactgaggac

SEQ ID NO: 27144 - DNA, 771 bp, Glycine max
  Intron number 1 from transcript Glyma18g50780.1 (locus Gly ma18g50780) derived from phytozome v7.0 (chr-ID Gm18; pos 59797986 to 59798756 reverse strand)
actgctttgtgagtctttttctaatctcattatctaaattcattacccttttgatgtgatctctttggttttttgtaatttgagtttggtcttggctagatcttgacatggtttggtttgcaaggttggtttatctcttccttagtcgtgtaaagtttggatcttgttatgttggttttctgtgaatttgtttgtgagtgtaactgaggatagtgcctctgctgtttctggccattgaatggcttggatcttcttttcggctttatgatatgtttgaaacagaatgtcggtttgttactgtgtaattagtgatttttcaaccgacggagttaggtgggttagtttttcacaatgtggcgagaatcacgggcggggggggggggtgtccatgttcagtgtcagaaagtacaaggatgtggtattcttttattgtgaggctttgatgtaaagtatgtttgttttctgtttcactctttttaattgaaaatttgaaactatggttagatttagtgtctgcatttggtgaataataacatgctatagattgattcatctgaaagtgatggaatcttcaggtgtcctcctgctatttgtattaatgttgacattggttttacttatttattttgttagccatatatagtagtacgattttggatttcatcaatgtgtatttttctattctttcatttgaaattttaggatttatgatttaactcttattttttgttgtgacttaggttgccactgatccatctggacacaagatta

SEQ ID NO: 27145 - DNA, 906 bp, Glycine max
  Intron number 1 from transcript Glyma17g17390.1 (locus Gly ma17g17390) derived from phytozome v7.0 (chr-ID Gm17; pos 14217749 to 14218654)
tcgttttgctagtttcattcttcgccttgtaccaggtcagtgattattgatgagtgagtgttcttctacttcactcatacttaacttcgctttccaccttctaatcattcctttcttttattgttttttttttctctctttaaattgagtctttcgagaatacctcttaattctgatacacggtgttgaactctgattcttgctttgcgtgtaaaacccttttcgcctaataaagtttaacattatgaatttactgtgattgatttgtagatttgaatgttgaagttaatttactactaagatagtgaaaccagtaagagaaaggtgacttgtataaaattggcttttagcgctgcttacaatttcatcttgcaatgaagatacatgttattatcactggcaaaaatagatttatggttaaagtttttatttatgaaccatcaaataagattttgagaattcgtagctttcacataaatatattggattgaaatactaaccttttatccgtgcttacagttgatgccttcaatcttgaagaacttgctaggaacaattgaaactcttctctatctttttcatttctttcttatggctctcttaatgatggaaatatcgagttatacgtctgtaggcagagataggaactgtttctatttccttttactcacacatacattactattttcaggtttgcgcataattctttgcatgtagaggtagatgtttgtgacttcttttaattgggttattgagtctcaataggttgcattttgttaattgcaatttccagcatgattttgaagatataaaggaagagaaaatgaggatgaggaacctatacaggaaaccaactgctttacgttgcaatgcaggaagcaggtgctattctacgtcggctgtgat

SEQ ID NO: 27146 - DNA, 919 bp, Glycine max
  Intron number 3 from transcript Glyma19g40950.2 (locus Gly ma19g40950) derived from phytozome v7.0 (chr-ID Gm19; pos 47234510 to 47235428 reverse strand)
tgttcaacgccttgcaaaaacaaaagcttcctaaggcgagtttatatatataaatttccaatttttaattatatgccttgaaatgaaacacctttcatcctcacaagcataacctaaagtaaggatatattttcatcaacgagctgatcatataaatttttcctgccgtgttgattaaaaattcatttttatttttatttttattcaagcagtattatgaaatgatttgtttgttatatgtctgtgtgctattttttctttatatatatatatatatatatatatatatgtatgtatgtatgtaagtgaagaagcagggtagcgtgcctcacttaaattagaaagcctgctattttcattcatcccgttttttcaaactcattctacttagcatatataaataaaaatacattctttcaaacaaattatgatataagttttttttcaaacagttacaaaatatattcaacatttaacttttttttttctaatttattttttatacaatattttctactttcttttaaatgtatttaattaatgtcatgaaaataactcttaacaaatctcattattttttcctcctttgaaagcaccttcactgttcagactctatgaaatacccatttcagctaagcggcaattaatactaacaagtacttccagataaaattgacttgaccctagcatatgggaaaaaaaaaatcttatctagctgccgatagaagatatagcactccggagataactgcaaaaaattcattttgcaaaattcatgtgcacacacacacgtacttctaccggcagttaaaactcaaagtactttaacacataactgtcaaaattcatgcacacacgtacttgtactaacagttaaaaatctatgtccatagtactgaactgatacttgtggaacaga

SEQ ID NO: 27147 - DNA, 616 bp, Glycine max
  Intron number 1 from transcript Glyma18g08400.1 (locus Gly ma18g08400) derived from phytozome v7.0 (chr-ID Gm18; pos 7169382 to 7169997)
gtgtagacctttcggtaagcactgtgaaatatatttcggacccttttgtgtgaaaaatgttttattttatttttttctgatcatagagattcctcattttaattttatatgctccttaaaaaaatgtgtaactcttcctacatgatttgaaacaacatagatggaggcatatgatcaattccaaaaataacaacactggttcggccctacaataataagaaaagggtgtatgtactatcagtctaacagaattctacaatcattcaataacaggatatgctttgtgaaagtttattaagtttcataataattattttaaaagtcatattaataatgatttttgattagtttatcgtatgtaatttttatattgagtgcgtagaaattaatctcataataaatatctaggatactggcatgttttttaattgagggcttgctttccatgtgagaataaaatgataaattacaacaaattattacatgtcctgtttaaatttaaattgaatattgatatgctagtaaattataatgcttctgaagtcaaccattgattctataaattttgttggaatcattaggtgaagggaccttctggtgaaacaattaaagaatt

SEQ ID NO: 27148 - DNA, 744 bp, Glycine max
  Intron number 2 from transcript Glyma18g13630.1 (locus Gly ma18g13630) derived from phytozome v7.0 (chr-ID Gm18; pos 13150164 to 13150907)
gtgattatactctctgtaaaccctttagtccctttattattttctgcatttttttttgtttcctgtgtcatgtagttaataggttggcggttttgaacttttgatctttccttgaagttcttaccttgtttagcccttattgatgtgggtagttcaacttcaaacttttgatcaagaatgttatttgaattgtgaggttaggatcgttcattcttgccctgcaactattgtctttcctaattgctattcctttgttttaaaaggaggaatagggggttacaatttagttactccatgaaattagtttcttagttgcttttgatagacatatgcaaggttttaaattgaggatgcggccgcagtgagttaaaaaacctttacattaagggaaaatgctgctgatgcggccacaattgcagtcacgatgtggttgcggacagtcgaaaaaatgttgcattgcggccgcaattgtggttgcggaccgatatttaaaaccatggacatatgttgtggtttgatgcatcatgcatgtaactataacaaaccttaatggtgttggtaagactgggtttttgttgtgtcaaatttggaaagcaagataatcggaaaggttgaatgcttacttccccaaatttattttctttgctttttgcaactttaggatagtctatattcatactaatacactgattttaaaccaatgttgcagaatctcgtgcaataatcagatactttgcagagaag

SEQ ID NO: 27149 - DNA, 818 bp, Glycine max
  Intron number 1 from transcript Glyma19g29440.1 (locus Gly ma19g29440) derived from phytozome v7.0 (chr-ID Gm19; pos 36996915 to 36997732)
taggaagttgtcagctgttgatctcgttggaattggtaactactgttctatttctataccacggcttccaaaaaagaaggaaaaaaaattaaactagtaactgtgattgaatgaattaagtggatgttcggtatatatgatgttgtagtgtgtgcttctgtctgttagactgttatgacttactacttatgaaccaatgattttgcttttatcttttttattctttatattttttataaagttaatgcagctagcccgtatcaaaaatttagttttgcccttcatgatgattttggtgaataaaccatcaatttcgtccttgaagtatcactccctcttcttaatagtccataagtaatagaagtatttaagtaacccctaaagtcctgaaattggtgtattttattagggacaaatttgaaaggttttttaatatttggaggatttcttaacatgatttgcaattcttttgggactacttgagtagtttgtttgcttgtttgttttttaaggaacattctagacagagggtagggtaattaaggataaaattgatggtttacttgatttttgtttattatcaagaaacattgtggcctagttatcatgacatgtgcaattgccaacttttaacttatgcagaatggcatgtatgatccatgtgtctgaccttacctagtgggataaggctttgttgttgtagtagtgtatgtttgttggctttagcttctttttcccgaacatttacattcctaaaggtaattgactgttcttgaaaatcaggggttggagctaccataggagctggagtgtatatt

SEQ ID NO: 27150 - DNA, 309 bp, Glycine max
  Intron number 1 from transcript Glyma17g34850.1 (locus Gly ma17g34850) derived from phytozome v7.0 (chr-ID Gm17; pos 38838339 to 38838647)
gcacgacaacaacggctcctccttcgactccatcggttagggtttctacttttattcctcaatgtttttatcggcacatgttaattcttagtttgctagttttttttttgttagcaggagggatgacctttccctccttccattcttcttaaccatccaaccaaccttatatctccacttttattcctcaaataatcacttattcctacgagcttttaaaaattaagtgcttaattttgaatattagttaagtacacgcatagttagggttttgttgctcatttgctgtgtttttttttttttttgcag

SEQ ID NO: 27151 - DNA, 844 bp, Glycine max
  Intron number 2 from transcript Glyma20g00590.1 (locus Gly ma20g00590) derived from phytozome v7.0 (chr-ID Gm20; pos 346922 to 347765)
tcaagcttatttcatcgtggatattttcacgtcttgtaagtaaccatgcatttatttcttttttttttcagagacaaatattaatttgttaaagtgttaatttttattaataaaagagattaaattcttatttttttcttttttaatcatcctatacattttatatatctctaccatgcatttcctctaagagtaatattattctcttactaaaaaaattcaaattcatcgtgttttttttttacatttttctttatattactccctcgtattgctcattattgtagaaagtatggtaaaaaaaaaattggaataacaatattacttattacttgttacttaaagctatttacgttagataaatttcttaacaagtattcactatagggtaaaaaatcataggaaataaagagaaaagatgaatcaaattgatataaaattaacttatatatatcttaatttatgaataagttatatgaaacaacttataaaaagttaaaaggcacaagttaatgttaatttttggagagaaaaaattatttatttcacctttttaaattttttttgctaatagattttccttatccaaccaaattgtgactcttatttcacgaaggacaacatgtctcattgactttttttagcagcaataatgtatgaacatattattactttaaatatctcattaatatttatcattttttttccaatcttgtcatatcactcatctacttttatctctacctgctcttctattttattttagtttagttttgagtgtccactagctagagtttagattcctaccaattattttctgttttcaatacattaaataggaagg

SEQ ID NO: 27152 - DNA, 533 bp, Glycine max
  Intron number 3 from transcript Glyma18g01440.1 (locus Gly ma18g01440) derived from phytozome v7.0 (chr-ID Gm18; pos 768279 to 768811 reverse strand)
attggtattgtcaaatgccacactatacttaaaacatcctctaatgtttttaacctcaattttggttcatttatttttcaatagacatgatttttatattttaaaaaattcataattttgatttaattttatattttgtttatattttattttgattcaattaaaccttagacctaacatgtttatttaagggatcatcaaaaaataatttaattaattaaaatataataaatagaagaaataaatataagcaaaatttaatattggatcaaaattataaatttttaaaatagaaggactagttttctttattttgaaaaaataggaccaaaattaggaatttgacaaaatacaaacaacaaaagttatatttaaattatctttttaatatattattgagaaaatactaaataaaaatgtacgtgcatgtgatatgttagaaacaaaaagtatataacatgaagatgttgtagtaggacataagattatttttgttggcatagcaaaatgtaacagatgaaaatttcaggtat

SEQ ID NO: 27153 - DNA, 770 bp, Glycine max
  Intron number 1 from transcript Glyma19g34210.1 (locus Gly ma19g34210) derived from phytozome v7.0 (chr-ID Gm19; pos 41827666 to 41828435)
atttctcaagcttcgtcaggcaactaaacacttacgtaagtcctctcttcaccaccaccaccttcttcactcgttttgtctctaatccttctagttttatgggaataatgttttgacataacttaaatttggtttcatgggtattttgatacctgttctctgatcagaattgtgttttttttttctcagtaacatttaatgcaaacttttttctctgataaaatttcatttttgattggaaaacaaacaatactaataatacttatggaaatgtttttaagttttgttgtttttgttttgcttgctcatataagtaacaatctcatcttctgtttgaatgagaaataagttctctatctcttttttcctgctagcttttgtagtggaatatagtttcactgttctatcgttttatattttctttactcctagtctcagtggtaagttttcatgttttattactaaaactaattaaaaagttattatatggtattgtaatattcaaatatttaaagtcacatgttctcttgtgggttttttcttgacttctagatttctctttttctcctatcctatctgttcctgctgtggccagtggtacagtttggcttcacgcccaacgactttgtccatttcctgtcataattatagcaattatggttccaatttattcagtgtgtattgagtttttatggattttgggtactaaaaaatatgtggggttaaatttcatagggttttagaaaaattgatccagataggtgggagtt

SEQ ID NO: 27154 - DNA, 659 bp, Glycine max
  Intron number 2 from transcript Glyma19g43160.1 (locus Gly ma19g43160) derived from phytozome v7.0 (chr-ID Gm19; pos 48895535 to 48896193)
ggttcgcccaaggaagcttctttatcttgcaatcggtatgttgcttcttcttgttattgtatctcttgtctatggagcaccaagcatttcccaatacttcatcgtacttgcagatgacactcacggaggaaataagattgacactattcctctttgtaaacaataagcaacaattatgatggcaatgatttataatttctattttgtttttagcaatgtcccaaaagcatgctcgttgtttggatttgtggaatgcatttatcatatcctatatatttgtgccataactccatatcatatttgtgtgtcatagtctctcattgtggacaatctgccagacagctcctttaagttataaatccatttgattcctaacttctcattatgccttctatttcttttcgatgattagtaacttttggcacactcctgtatggttgtacattcaaaatttagtgcaagtattttcaagtaaaagactcagataagtgtttgtaaaacagaatagccaatatggaaagatagaacttttaaaaatccaaattttggaaggttgtaattttttttgtttgaattgttatgttattgtatgtttggtttaactttgaatcacttcctcattcctaccatttctttccatatgtttcttgccccttaag

SEQ ID NO: 27155 - DNA, 751 bp, Glycine max
  Intron number 2 from transcript Glyma18g12080.1 (locus Gly ma18g12080) derived from phytozome v7.0 (chr-ID Gm18; pos 10898569 to 10899319)
gagggtgcaagcacaccgtcagaggctgcaaagaaggtaaaaattgggatatattttgcaacctggtgggctctgaatgtggtgttcaatatttataacaagaaggttctgaatgcctacccttacccttggcttacttcaactctctcacttgcatgtgggtctcttatgatgttgatctcttgggccactgggattgcagaagcccccaagactgatcctgagttttggaagtctttgttccctgtaagttttaattggtatttttgtttgtttattgagggaaagaaaaattgatgggaggaagtgaaagctttgtttttgcttgctcttgtttttttttttttgttctggggaaacaaggtttttctttttagcaatttttgcacacatatctggatatgttggttgattccagaataaaacaaaaaacaaagtagaggaaattgagtctgttccattcaaaccttgtggctgaattggacagaattaattttgagaattttcgtttatcaattatggcaattttcaagttttgaaagagtggtttcactttagcttgagaattaacaaagtttcttcctccaccctccaataaaaaattgccctttaaattgttggtatgaataattgtttcaaaaatgttattgatcaatttagtcattctcctttatttatcattttgaatggatgatgactttagtttttgttttgtttctccttcaggttgctgttgcacatacaataggac

SEQ ID NO: 27156 - DNA, 524 bp, Glycine max
  Intron number 2 from transcript Glyma18g18550.1 (locus Gly ma18g18550) derived from phytozome v7.0 (chr-ID Gm18; pos 20062267 to 20062790 reverse strand)
taacatttataggatttcatcctctctttctttgtgtaagtgagtcgcaatgtggttttgatggtggcttgtggttctaagtgattggtgaaattcactatgtttgattgtgatgtttcggtaaaataaataaaaaaagaatcatatgtttgttgctgttgcggagaatttgatgttcagctgccttttgctggatttggaatgatgattatctctagttataagcatatctagcttgttgtcattttcaatttgatcctttcattgcattatattgactgatatttacataatgagatctattgagttcatgattatgtgctgaatgaaggtgtgtattacatgattgtaatgcattttgaactatgtgtctatgggggttatcttttgaatataattgctgtgatagttaaattccttgcatgtatgtatatactgtattatgaacttgagttgaagaacataataatgctcattgcaattgtgcagacagcagacccaagctggtggcagggtcggctgaa

SEQ ID NO: 27157 - DNA, 991 bp, Glycine max
  Intron number 1 from transcript Glyma18g48380.1 (locus Gly ma18g48380) derived from phytozome v7.0 (chr-ID Gm18; pos 57812964 to 57813954 reverse strand)
cgttcttcttcatctcacctaccaccttaacctcgtatgtcacccttcctctctctttattttaccttattttcttcgaattcgctttcgacacaaaaataattttttttcgctcggaggattcgtcgttttcttcgcacaattgctttagcttcttctctctgcctttgattgaatgccttaaaaaccattcaatttgggtctctctgcaaaattcccttctgggttctcttccgtgttgttggcttggctttatacatttttctgctttggaatttatgtgtctgatggctgatgcatactttcttactgattatccaatatatttgaagccatggttaaatttcaacatgtatgctgctatcattgattttgggcatcgatttcatgtttgtataatgcttttctctcatatttaagatggttatgtggatttggggcacttgactttacacaaatttttcttaatattattttgattaggggattaaagaagtcatggctatatggggtggttgatggaaggtaccatagattattaacttattatttttcttatcattgatttctttcttagtttcttgctttcattcttgtagagctttttttctagctttctttctttctttgttggttgcttttttattctatattcattgataggaatacatttcttctttctcctgatgggcagaaagtttgatttggatcactttaaccagctgaaccaacctgtgttggtagtttcctcgatcatccctttgagtatttgtagaagtctaaaatgcagattatcgtgtcttttttggctagcagtagaatgtgttagcttaagaaaagtttctttttttttttggttcttagatgtatctttcaacttttagattgtcagtgaataataatgagcatgtgtttttgaagatttcaggtctttatttcattatttacctgtttttactggcagatattagcacaaacttggtttgcttct

SEQ ID NO: 27158 - DNA, 753 bp, Glycine max
  Intron number 2 from transcript Glyma19g45330.1 (locus Gly ma19g45330) derived from phytozome v7.0 (chr-ID Gm19; pos 50523518 to 50524270)
tccattccatattgctgcaaagcagggccatcttggtaagatacaacatggcattatgtttgggcctaaggtccctataattttttattttctttcctttgtttttgattttgtgaacaattttactatgtaaatgaatggagcttagtaccctaaaaagattgtgcctgggtgtgatatcttacttattggttcttagttaattaagatgtaaaccaagacccaaaatccatactgtcctttcagtctttttccataaatttgtatgagtaagcagcaagttggatttgtcaacatttgacttgtttaagaaagttgtttttcatttgtgtttcctagttaaagaaacaatcaatgtccaggaattattctatccttccctccatcctcaccccagcctgtgcaattgtctctctttatccatattgaaaatgaaggaaaaaaatgaagttagagaaggcagaaagatagttgtatcattgtggcttctcagttaattgacatgaagatctggttaagattatagtttattatttaccaccatatatttggcttcaatggttttactgtgttgcctttctgatagtgttaagtttcagataaactaccatgggtgagaagccagggtatggagaaccaaagatatttttcactaatagtatgcctgttactccattctctgtttatatctccgactaagaaacaaataatcttgcagaggtgctgagagaactactgcactcctttcccaac

SEQ ID NO: 27159 - DNA, 365 bp, Glycine max; identical to SEQ ID NO: 26967
  Intron number 4 from transcript Glyma18g38700.1 (locus Gly ma18g38700) derived from phytozome v7.0 (chr-ID Gm18; pos 46370405 to 46370769 reverse strand)

SEQ ID NO: 27160 - DNA, 977 bp, Glycine max
  Intron number 2 from transcript Glyma19g40290.1 (locus Gly ma19g40290) derived from phytozome v7.0 (chr-ID Gm19; pos 46721001 to 46721977 reverse strand)
gaggtaatttgaaatttttatttttattttctttctctctcactgacattctcccattattctgtttcattggttttgctttgccgtgctatctgtctctcgtttatttattatttatttatggggttttaaaaatggaatttttcttcgttttcgggtggttcaacattttttctttaatgacttttatttacgtttgagatcagatcgaagtaactactcaaatgggtttcagtaaatgctcctgtcctgccacctacacacgcaagtgctttccagctccttttattccaaaaaagaactcactctaattcaatgcacaataaaaaagagtactaaatgtttactgtcacggttccttttaccgtggtacatttaccattcttttccttccatcagacacatgtccattgtacgctggttttctttgttttgtttttatcccaaaaagcataacccccttctggctttaagagaaaaacaaaataaatgcagttgccgttaagaaacagtatctatcactcctttatttttatttttttcattttttacgttacatatacaaatttctatactatatttcaaaattaaaagaaacaatttcttgttaccatattttcatactcaaaaagaacaaaatgtaatctgagttggcctgtaacatttggcttaaatttcatatgtttggtagacctatcacattgttaatgctctcccatctttttatctttttcatcacactctattcccctttactttggtgacaagtttatgcatctaataaatgctttaaataaaacgatttgacaggtaatatagttagattagaaaaatcaaatgttgaaacatatgctataataaggcatacttataataattaaattttaattgagcaatacagttgtatattactactattgtttaattaattgtgtgtggaattttcaaacatacagatacttggtgttgggtgaagc

SEQ ID NO: 27161 - DNA, 454 bp, Glycine max
  Intron number 1 from transcript Glyma19g38800.1 (locus Gly ma19g38800) derived from phytozome v7.0 (chr-ID Gm19; pos 45652453 to 45652906 reverse strand)
actccttcttcagtttctacaactgagtttcatatgttagtgctctccctttgtttcttctccatcttggacttaacggttattgtcaactcactctatatatggagcttgacttttctgtttttgtggttcttctggtggtgtacttgtttatgtatctgggttttgtattctgtatgtaggcttattttctggtttattgtttgtacctttctgttgggatagttgttggcctgtgcttttctttgattgcaattcccatcttacttttgtcttcttctaattatcttcacttttatgtcccgctttcaagctaaagtcttcagttttattattgctttggcgttctagattgctcttattttatgtattgttattattactgattattattaaggcatggaaattgaaatttgtgttttgatgtatatttcaattcagcttctttctgttg

SEQ ID NO: 27162 - DNA, 519 bp, Glycine max
  Intron number 2 from transcript Glyma20g25480.1 (locus Gly ma20g25480) derived from phytozome v7.0 (chr-ID Gm20; pos 35132014 to 35132532 reverse strand)
acgtgcagcttgccactatcgcagaggagggcagtgtcaacttgacagcagagagaaattttgttgtaccaacggtatactacaacaaaatccctgtaaacacccatgaatgcaatgcactaacacttgtttcttctatcagtttttcacatttccggttcttaaatgtttccttcacaatttgtgaaacattgtctacttttctgtaaatgccccagcccagttccttctcctacatcataaacagaatcaaaatagctcaagtgacattgatgtgcctaatctgtgttctctccttgtcttaaaatttcaaatctacagtttactacactggcaaggtctgagttattttgattgattgtctaatgtctaatattattggtgcaacactcacaattagcatgccatatttttctctgcataactttatcttcacacttcaaatctgttttgtttgctaaattgtttcttctaattgttgcagttataaaaaaagggtcgagtttgaaactggttata

SEQ ID NO: 27163 - DNA, 575 bp, Glycine max
  Intron number 2 from transcript Glyma17g17350.1 (locus Gly ma17g17350) derived from phytozome v7.0 (chr-ID Gm17; pos 14157550 to 14158124)
tagggtattgctaacgagtactttaggacattggtgaaggaagtatttattgtgtaaatcaaacgagagaataaaaaaaaccatgagtaacacaattttgcgtattccaataaaaacctttctccttttaagttttttaaacaatgtattaagaacactgattaacattgaccataaatgtataacctttttttttagaatatcacaggtattctctactggaaaataaatttattagatactcgtgtgtctatgatcccgactaatatctatgtcacacattattcagtttttcaatttgcgaacaagaattaatgaagctcgatgacgtgttatgcagggattagttggaaccaagttctagaccatgtaataatttctcctagcaatgtttgagcctagtaggattactatggtcaataactatgtataaaattggtaaaaatgtatttttcaaaaaaaaaaatgaagaaatgctttctactcactgcaccgttcaattgatcttatatatttagctatgtaatgtggtgcgtgcaggatatagccttccttcatcacctgggaatccggtt

SEQ ID NO: 27164 - DNA, 593 bp, Glycine max
  Intron number 1 from transcript Glyma20g00230.1 (locus Gly ma20g00230) derived from phytozome v7.0 (chr-ID Gm20; pos 44281 to 44873 reverse strand)
tggtctttctcaaggctggaactccatctccaactgtaagtcaactccatctagctctacacctttttacattctcttgttgtgtaatgaaatttatcatgattttctttttttagatctatcctgcttatagtcatagaatagaagataaatattgcaaacatactcttttttcaacgcaccctcttggtactaggtgaatttaaaggctggtttcccgagtgatttgttggcttggagtttagtaaatcaaaaaacaaaattaggtgaagtgaaattaatgtatgtggattccatccatttcccatttagacggtcttattaccaaactaataggacccatgtgatttttaaccaatgaaaaacaagagtattagagagtatgttactagtatactcttcaacattgtgttttctctcaccatgtcaatatttgacaatacatttgagtggaatccacaaacaaagacatggttgctattgacttgaattaaattgacacgtttcatatgctttagaaaccattacagtttgctgatctgttattccctgatgattctgttctctgtattttgctctgccagggttttgtc

SEQ ID NO: 27165 - DNA, 403 bp, Glycine max
  Intron number 1 from transcript Glyma19g40680.1 (locus Gly ma19g40680) derived from phytozome v7.0 (chr-ID Gm19; pos 47030250 to 47030652)
ggaggtacgcctatatgcctgtgttttttgttttttgtttttgttacacttagattctctactcggtcggtttcttacgcgtggaagcctcaggatacacatgacgtggcctcctcaatttctgcaccctgtcttcttaaattttagtactctttatctcacttctatttatattcctttcgtttttcttgacgaaaatacccttgctcttatcataatttagggtttgattttagattagtacgtatttaggtgttaatatattatgttatattatattgaattgatttcttgattgagtaaggtgtgagaattgttggaaaaaaaatgctatactatagtaaattgtgaaaataattaattggaaattggattatggatgcagtttgtggaatacaccaag

SEQ ID NO: 27166 - DNA, 957 bp, Glycine max
  Intron number 2 from transcript Glyma17g24410.1 (locus Gly ma17g24410) derived from phytozome v7.0 (chr-ID Gm17; pos 24768793 to 24769749)
atttttcctcacaacgttgggctaggggctaccaggtgaattacctatgtcattatatatatatatatatatatatatatatatatatatatatatatatatatatatatatatatatatatatataactagttcattggattaaacaagaaaaaaaaatcttaatacataattcaattaaaagataaataaaatatagttaataattatttttatcaaaaattaaatttaaataatttaatcttcacctcaagatatattaatgattaatgattgtgattgattacttatttgtgtcaatatatatttgacaagagataactgatatcacaattttggtttcaagtcttactaattgaagattccgatattcaaccttattgaccggttgactatgtaattgattcattggtttgagatatcaccagaaattgatatctaacccttcgatggtgctccaaccaaataaacattgcttaactgaattaacaattccaagttgttgaaaactataataaaagtggaatgctttttaccaaaacgttattctatattgtcgtcgtcgaatatttaatttattaaaatatacatgattttattctccgaaagtaataataataatttgtacttttcgatttagattaattttttgaatgtataaattaaaaaaaaagactaatgttttgaattcttctttggttgtctttttctctctctttagttattcctttctcgagtcttcttttttcttttctgtgatgctgtgacctacttactactttaaactcgcgcttacaaattttgattgaataaaagttagttacaaataggtaagcttgtgttaattataggtaaaagcagataaattttaacattttactatgcttctgtatcttgatgaagcttatctctgaacaagcagggaccctaaactagtgagaaaaattggagaagcaa

SEQ ID NO: 27167 - DNA, 1043 bp, Glycine max
  Intron number 2 from transcript Glyma17g09670.1 (locus Gly ma17g09670) derived from phytozome v7.0 (chr-ID Gm17; pos 7167593 to 7168635)
gaggaagttctgactataaaaaatacgtaagtatacataacattatacatacacttatgtagtgtttctctaagatacaatgtcgcataatatgatatttgatgatgcattggataacagtataacactggatagggtaaagttttatatttttttacagtaacttttatatactatattcatctatgtttgttatgttgtgctaatcttctgggtaagacaacagaacacagcttacgttttgtataaaagaaaaacctttgtggagcgatggggtagtgattgaagatgtgttgtttttaagtatgtgctgatcacttttgcctctgcttgtagcttatttcagaattacttacaccttctgtttttttttgctttttttttttgtcctttgctatgtactggctttaggagtttagtactgccagatagtctatcaagcactaacactttaatttacttcatatatctgcatccaatatgcattttataccaatactcttggatatttcacacatacatatatgtgaagtatccaagccttcaatgttgtgaaaattcaattactacatacaactattcaagtcatagaagcatctataattaaaaacatagaaaactgtcccttgatgaatcaacaaaggaaattgtcctctttaaggataatttcaagaaaggaatgagattaatattaatatattattcctatttgtagacgatgggaagtgatttatcaagactgatttataatttttattttatttagtaatatccaagaagtacgttttaaatttattatcttttatgaatttgtatacatatttatatgtgtatatatggtaccctataaaaattttgaataatcgaatcagatacatattttatcagataaacgtatcctctttaggcatcatggcaaaatagttatagttttggttatgctttcatgatggatagttctggtttgttgttgagatcttgatgtggcaaataagcaatgtcctgcagtgaaattgcaaagcatctttcacttccaccagtta

SEQ ID NO: 27168 - DNA, 1010 bp, Glycine max
  Intron number 2 from transcript Glyma18g47370.1 (locus Gly ma18g47370) derived from phytozome v7.0 (chr-ID Gm18; pos 57036916 to 57037925)
ttcattcctcctacggtctacactggctctctcaggtcaagtaaagtaactcttttttgttttcctctaatttgattgagatgttatggtcgactgaatttagctagcatattgtgttaattggtttgtttttttcttctatttctaacttctatttaagttaatgtccaattttttccacttaatttattcttcttttgggcttaaaaaatggtgttgaaacaaattaaagtacaacgatatttttattattgctattaaaaatatgacaaatgaatatcgtttccatataagggctcatttcccattctagctcatatatatttttggaacggttttctattataaattataatgacttaaatatttttttttatctctataagttttacttatttatttttagtttatataagtttttatttttttaattttaatcttatttttaccctttgtaattgtaagtgtgtttttttaattttaatttctataaacacaaatttataaggactaaaataaaaaatttaaattttaaagaaacaaaatttgaaaaagcacaaatttcaagatgaaaaatgaacaaaagatcttacagagattaaaactaaaaaaatataaatttacaagaattaaaaataaataaaaaattacaaaattaaaaacatatttaaatgaattgtaatttattggaaataaatttattgtgggatgtattacttattcttgaggcttctaacttggcataaatggtcaaggaatcccaataatgtatgtttgatgggattgtagggccggtgaaaaacattgcatagttggacttactatgtactttaatttgtataagggttgagatatccttgtacctccttatatagtatacctttttggtgtaaaaaaacatattgatcaaatcatctaatcaagcaccctcaccctctaaaatgtttgaatttgtttattgtattttggttgtaggatccattattggggtctagcgaggcatcgttact

SEQ ID NO: 27169 - DNA, 524 bp, Glycine max
  Intron number 2 from transcript Glyma19g01050.6 (locus Gly ma19g01050) derived from phytozome v7.0 (chr-ID Gm19; pos 740852 to 741375)
cacattggtagcttagttaggtaacaataacaaagacaggtgtgtggcatggatttgttcatgcactactagtatgtgtcagcagccagaaccatacaattaacaaattattttttattaggaagacaattcataccgaaaataaaaactatatataacgtgaattatagttgtatgggggaggtgtgttagttggaggattctaaggcgaataaagaagcaaatccaacaaaaaatagcaactaattaatcctcggacagtgtaaaatcaaatttccacatttccgaggttttacataataactgaattctgaatatttttttcctttagtcctcccccggcgaattccacagaattttatcatagttactaacttatgctaaagtttcatgtttaggatagaaaattataattagaaaattgcttttcgtttctcatcatttcattttttggtcacttgttactagtttgtttttaaaaaaaactgatacgtaattttattttctttttggagagagaggat

SEQ ID NO: 27170 - DNA, 817 bp, Glycine max
  Intron number 1 from transcript Glyma18g48150.1 (locus Gly ma18g48150) derived from phytozome v7.0 (chr-ID Gm18; pos 57641906 to 57642722 reverse strand)
gaacttccactcttaaaattaccattatcgctcaggtacattacatttaatttttcaaagcaattaatagtacgtatgtgaacacaactcaagtctattgttttaagaataagtttgtcgaaattatcttttttgttcacactttgtgttctcactgttgatcatgacatcctatttttcttttataaattataaatcaaaatactttaagacatttggttgatgacatatacataaatgcaatacctaataaagaacgacttatcagtttgaaacctccccatcatgatttgaaataaatttgcgtacaagagacaagcttttgttcaaattttagtttagtttttttttttttctaataagtgtatttcaattaagtttttaaattaacatgtcaaatgtttttggcaaagaaatggagcatgatgctttactatatgatgactatttaagtcctcttgattatcaattgtcttgggttgttcagttatatatatatatatatacttatttatgctgaaaatctcactttctagtgatagaaacttgttgcaatcctctaattctattttttgtttcttgttacacttttccttttacataaaaatgattatttataatagaaatggaatcgatcgggatagtggattgagaaaaaatatagggcacggcgattaattagtgatacactttttttttaatcttcatgtcacacattatcctcagcatttgcatatttttaagctcctccggcgaaagcaaagagaaattcaacaaccatgatatgcaattctgaatttttatacttctattgcag

SEQ ID NO: 27171 - DNA, 442 bp, Glycine max
  Intron number 2 from transcript Glyma19g04030.1 (locus Gly ma19g04030) derived from phytozome v7.0 (chr-ID Gm19; pos 4146453 to 4146894 reverse strand)
attgtgaggtaaaataagtgtcttagtgtttcttttattttagatgtctaattccaatcatattaaagtctctcggttaaatgtttacttcgattttatacctatgtacctattcatgttttcttctaatgattaaaaaatttgttgtgctgttgtattgcaagtaagaaattgcaatcttaatttgatttacatgactatacatggatggattgacacatgatagtgattgcttgattggctatcattttgccctttgcatttcataaaatgtggaggatgattgccttggaatactctcctaattttctttaattctaagttctgacatgtttagctaaccttatttgaagacacttttattatatttgaattgattaattttctatatcaatacatctgaaatattgggttgagattttataggtgagagcatctttgt

SEQ ID NO: 27172 - DNA, 797 bp, Glycine max
  Intron number 1 from transcript Glyma20g25700.1 (locus Gly ma20g25700) derived from phytozome v7.0 (chr-ID Gm20; pos 35335012 to 35335808)
ctcttagacttgattttattgggaaacaatcctaggtaactctcttacttctttttcagttttacaagtcgttctcaaaagtcaaccctgctgcttgcttctctcggatttcttcttgttaattgttgcatccactgctttctaaacactgttttttggtgccttttctttcattgaaaataaaattaaattcagatcttttttcgtttgcatgtggctttgttatcttcattcgtgttgatgatagtttgtggtagttttttgggaggtcagagtggttggctattactgaatcaccaccgatttggaatttccaatccagctgatgttatgatgattgataattactcatgtgtgcaaattaagggagttttataataatcctctgagacttccaataaatttggagcaaaaagactttttttttcttagtaaatgctagtatattcactgagttttcacactggtcattcaattacaaattactacgcatgatgaatttgtttacttttataataattatttaaagtcatacttatcattatttgtgattgattgattatatccatgaaagaatttacatatatagaaattacactctttatttttttaaattttctcaaaggaccatttaaaatatgcttaatattgttctcatgatttcacaagtatatgcaactgcatttgatgtgaagctattggcctttttttcttgagctttaaattctattgaccccacgatgtgatcgattttctttacagcttctaaatctatacgggacaacaactgatataag

SEQ ID NO: 27173 - DNA, 564 bp, Glycine max
  Intron number 2 from transcript Glyma19g37600.1 (locus Gly ma19g37600) derived from phytozome v7.0 (chr-ID Gm19; pos 44702374 to 44702937)
atttagaaaggcagcgtcttcagcagtcaagtagggtaggtgcaattatgtcaaaacttgtcctttaaaggtttgaaatgatgcattttgataggaatcagtcaagattggacagtgatacagaagcttttgtgatggaactgaaatttagagtcatgtgtttcttggatgatgaaacaggactggaagacatgtcatttttaatcttgaatatgagacaatacagtatttttgcaataagtgtaattgaattggaattttcattgaactaatttgaatttctttttttttcttcttaatcatgaattatcctgattttgcggttctgtttatggtttgacatgtgacatatgtgctattaacctttttagacattagttaaaagtaatattttgaacatcatcttcatattatttttatgtacatattttagatttttgttttcactttgtaactgtatcttaaagtctgattcacaattcaagtcttttggtccaccatctcttgtacttatttcttttgccatgtcctttttttatgtcatgaagagtaaaggagtagtta

SEQ ID NO: 27174 - DNA, 829 bp, Glycine max
  Intron number 2 from transcript Glyma18g52310.1 (locus Gly ma18g52310) derived from phytozome v7.0 (chr-ID Gm18; pos 60963692 to 60964520)
gctcctgctaagggtgggtcttgcattattctttttatggtcatttcttcaatattatcaatctatttatctagaggctcatgtatgtaatgttgatatttatgttttgttgctgaaaaagttggatgctagtaatggtctgttttgtgctaaaacatatcctgttttctgatgttggatactcggtgcatatggtacttattatctatgaagcactgacatccagccccttgccgtgtcacgcgtccgtgtcagtgtccgacaccgacacgacacctgtattacgttttatattttggatattacaggtgtccatgtgtccgtgtccgtgtcgtgtccggtgttggtgttggtgtcggtgtcggtgcttcatagcttattatggtgaatgcactacttttttttttggttcttttggttacggggctcttgaattccagtgtgtgcttgtgaactgactgaatgtattcctaatttaaagaaaatggatgtgccactggtcattttctttaatattacctgaatgaagaatattttgtttttcatttataccagcgagtttggagtgtttgtcgagatattgacaaataatacataagtatttggctttcctttagtttgcatttccttttaactctccagtcataagtcatgtcctgctcttccttgtaatgcatctttttgtcagtttttgctagtttgattttctgtttccaaattgtcttttaggttgatgcattgttttatagacattggtggcaaatgctcaaagcagtactggtttcctggtaattatctaattactttttttttccttgtgcagcggaca

SEQ ID NO: 27175 - DNA, 988 bp, Glycine max
  Intron number 1 from transcript Glyma18g10070.1 (locus Gly ma18g10070) derived from phytozome v7.0 (chr-ID Gm18; pos 8859012 to 8859999)
cttcagtgaaggtacgaaattagaatttcactctcatgattacactttatactatcccctttggtcttttttctgtagctgcagttgtagagttttgttgaattgtagtttacacgattgaattcaaatttcggaagatttgacttcgtaaaacaaataacaaatattttccttaagttgattatgctgtcataattggttagcctgtttgtcctagagaatctatatagaagaatgttggaatggaattttgcatttgcatcgtcttgcaattggaattaaatcatagcagtaaagatcatgggactggttaaaaagttttttgattgctgtgcactgcagaatttctatttcaaactttcaatatcttgttcttgtaagttgagttgattataagatcgcaaaaggaagaacaaagaatatctataattatttcttgatatttcgataaaggttgtaactaaaatggaaatcataaacaagtaattgtaatagatcctttttctaatatgatactccaggtcataagtcattcggaaaagcttcacgggtggtttggtttcattttaaaatgcaaaaatgaccttattttcattttgtttccgtttttaagaagtttgtataggctaatagataacattttctcaaaccaaacagtctctaagtttttggcaagtttataaagtagcttatgaccttgttaactcaccttaaagaagcttcacgttgaagcttatcaaaataaacttatttaacattatctaattgaataataactttagttttttcccccccactgtaaacacagaaaaaagatgttctatatagatgaacaactaaacaagtgtatttcgatttcagtatctgataggcaaaaacctgtgaaaataacagacttttagtgtctagactcacacaaacacttgctgttcaataaataatatctctcacttagttgtgttgtactatggtttggaaggttacaggt

SEQ ID NO: 27176 - DNA, 828 bp, Glycine max
  Intron number 1 from transcript Glyma18g08930.1 (locus Gly ma18g08930) derived from phytozome v7.0 (chr-ID Gm18; pos 7663103 to 7663930)
ggcttaagcgacaatagtatcaaggctgtgattttggtaagactgtaagagtgttgacatcttccatcagtggtatttgcttagtagaaagtgatgaactattctcatcttccctatggtaaaccaatagcttgttgtttccttacttttattaacttgctgttgagtgctgattacttctggaatgttagttaacttctacacgatatttagaaattttatcaacacaaacatataaattattaagaagcaaaactatgttgctacttagacactagcaattccaaataataatagatcaacctgtttggataaacttatttgtaagtacttataagatctcttgtagactaaaattaactttgtttcgtattagtttttggaacagcttattttaacttacgcataaactaattttaatttattggagaagttgattttagtttgtcttctcattttgttttcatataaatccttataaagaaatttatccgaacaggaccacgtacacaatgcatcaatttacacttggaatagaacacgcaaagctgaaatatattttcaacttccaaagcaccaagttttgtacaatgatcttgctgtatgctaggtttacacctctaatttacaataagtcctatgctatccacttgtattggactaattcattacacttattggtggatctgctattatatgggtttgattttattatcttgcatgttcttccatggaaaattaagttgcaatggatattggtattccttcaaatttttcctatacataaaattcatatgacaacatcttgatgtcatgattttgaaggat

SEQ ID NO: 27177 - DNA, 464 bp, Glycine max
  Intron number 1 from transcript Glyma18g07250.1 (locus Gly ma18g07250) derived from phytozome v7.0 (chr-ID Gm18; pos 5911007 to 5911470)
gactgaagaggaacataagtatgtgtaaccttgctgcttattgtttattattacttttgctttttcaattttaattccatgtgtgtgtgtgaaatactatgtgatgattttactattttactttttggttattgaaaatgtaaattggtttgaaaagaaaaattgatgtacatgaggacagtaaggagttaatggatgtagttatgtttatgaattatgatgtactttatgtatgaagctaggagttggagcaataatgctatcttgttattaattgttggatatttgttatttgtggtgttaaggtctttttagctttcatgaggcaaactatatgggtggtttggttaagtaaaataaataattcatgtgctatttatatcagatttttggttttgactttaaatttgattatgattttgtgaaaattttccacaggttgtttctactggggctgaagaagt

SEQ ID NO: 27178 - DNA, 349 bp, Glycine max
  Intron number 1 from transcript Glyma18g40380.1 (locus Gly ma18g40380) derived from phytozome v7.0 (chr-ID Gm18; pos 48974200 to 48974548 reverse strand)
aaaattatatattacaggtttggtttgcctgctggttattaatactattttttaatttttattatataaatatagcttgaaacattatatttggaccatggaacaaaagttttttttggtagtttttgtatggatgaaattgtttgattctatcttcttcaaatagtcatctgagtccatggtattagatgttaatcactcttactgaaaggagaaaaaagggtgggagtgggggtggggggatgaaaacaaactcctgtataatgttgtctaaggcttacaattgaatcttaatttctttgtctcttttgcagccgaacatttttatctataattggtggagttgttg

SEQ ID NO: 27179 - DNA, 789 bp, Glycine max
  Intron number 1 from transcript Glyma18g12890.1 (locus Gly ma18g12890) derived from phytozome v7.0 (chr-ID Gm18; pos 12288031 to 12288819 reverse strand)
ggcgcatttggcatcttacccgcaagaagaaacaggttcttctttttttatgttagtttggttgaagaaggaatggaaaataattcatttgaaattatatatgatttgcaaactaaatgaattgtgaggttgatatgatttgaaataagtttcatgaaggactccatttttaaaattcaataattttttagattccaactttcacgacatgattgaatcattgccaatatcaaatattcaaatcaaatacatgatatcagtgtgcataggaagaagagtttgtttttcttgactgatgttttgatattttaaaggatgctttaatttctatttgatttggacaattcttctttctttctttctttcttttctattaaagggggattggtgtgactgaaattgggataacctgttattctcagatactcatactactaaatagatttcaagtaatttcaattgaaagtagagaatttagtcatatgtatatataagtttacactgtacattaagttgacattgcccatttgtttggagattcagtccaatttatttattgtagctttgtcacctttgtgaaaattagcagtggttattgtttttttgttttccaattcaagacagagaaggggattttctagctaggatagaatacactgtttgatttaagtgttcaattctctatgcttggtccttcttataacaaaatttatgggaactatcatttggtatggagttactgtatggaagactataatatgccacacttgtgtggtttgtgtagttgga

SEQ ID NO: 27180 - DNA, 965 bp, Glycine max
  Intron number 2 from transcript Glyma18g39710.1 (locus Gly ma18g39710) derived from phytozome v7.0 (chr-ID Gm18; pos 47771559 to 47772523 reverse strand)
caggtgtgagtgtgatcttcgctttgttgttgtcagggttttaaaatgcggtcacggttgtggtgggagctttgcaatgtcaatgtgtcataccctggttgtagtatattttctttcttatacattttttggcctagatatgtgaattagtttggtatttttagtaaattctaaattgagtcaagaggatttgggattagtatcatgagatttagcaacaagtaaataacaacatagatcctggttatttcttctgaacattagtctagatatatgaattagtttgatttttttaacaaaatctaaatttgagttatgaatgaggatttaggattagtgtcatgtggtttaacaataataacataggtcatggttatatttttctgaacatttagtctaacaactaactattatgggaatggttttgaattgcggttgaatgtgtgatgtagagatctcaaaactacaatatagcagctgcaattgtcatggtcatgaaatgcaatttaaaaccatgattatgggttttatgtgagtattcaaaatagcgtatccactcttagattctttaaatttgtggtacctacttgtaaatgtgaacttataccctgtttggtttttcatcgccaaagacaataggcacgcccatggtataagccagttcatatagcttctgattttttacatttttaatacacatcacatagcttctgattttcaccttttttttatccacattttgggctttgatgcagaaccaaacacacatttagagttaagagggtgagggttaggggcattttctatgtttaaatttgtggtatcttgtggtaaattttaagttttaacatgcttgtatataaattttctttttattatttttgaagttttttactttgttgtgttgtgtacttcagatgaactgatgcttggtgttgcagggaaccgaggaacaacctggcttg

SEQ ID NO: 27181 - DNA, 966 bp, Glycine max
  Intron number 1 from transcript Glyma19g04340.1 (locus Gly ma19g04340) derived from phytozome v7.0 (chr-ID Gm19; pos 4526408 to 4527373 reverse strand)
atctatctactctctacccactttctcagttccaggttcctctctctatctttctgttactttttcgaaagaaaaaaaatcaatctttctctgttcacctcttacccacttcaatttttagcttccaattatcgttttgatccttctgattgcttcttactttgattataggaagtgggtatcttctttttcttcaatttatggtcgatcctctgtttttttttttttggaaatctcattgtttgcacacactttgggtgtgatttatgtctgttttatttttatgttgtaaaattatgatcacaatttttcatcttctagtaatgatgttcgtgttgtttgctgattcgttggcatagcttgatagagaagaaaatatttttttttaattctttcttcttaaatttgaagttgagatgggcaagtgaagttgtcggtgagtggcgaaagactaaaaactgaaaagttttgtcatttgaataatcaaatttggcatattcttctttgaattttatattagttattttatgttacactcgtgagctttatgttgatcttacgttatggttctgattttgccgttctgaaaatgtgtacatgttgctttggagcatgagcattagcttcattgaccagttattcatgtgcgcactaagtcaagccaaaatgatcaatcgttattttaaaatattaaatatttatgtggctcctaaattttttgttgtcatttaataatcaaatactataggataataggaattggtctaaataatacacatgcaaataatttgttgtctagctgattaaagattatttatttttaattggtcaaataatagcatgacatgaatgataacttcagcaaacttcacatgtttgtcagtgttgttattattgttcttctttaatgctgttttggtgtaatttgcaggtcagcaagagaaacagtacttatccatattacag

SEQ ID NO: 27182 - DNA, 755 bp, Glycine max
  Intron number 3 from transcript Glyma17g36160.1 (locus Gly ma17g36160) derived from phytozome v7.0 (chr-ID Gm17; pos 40183005 to 40183759 reverse strand)
gatatcttcaaaccattaacttgaagcaggtatgttcctctgctgtttgtttattgtggcaaaagagaggagaaaagtaaaaaataaaacttaggccttgtttgtttattgttttcaaaaacagttttctgctttctaaaatttgtttgtgtccacagcacatttgcaagtgtttgtccccttagcacatttttgttttctaatagtctgtcttctgagcattttgagttgaacatctgaagaaaagagaagaagaggatgagaaaaatatctctccgttctgttttttggtttttaaaacacttgtttttttaaatgattttcaaaacttaatacactttggatgaaaaattaattgctaagtagtgtgtaattgttatagaaaacattttcttaaaaaaaagtgagaagagaatcaaacaggctttgagatgcagttctttaagtgtttttagaacagttcctcaattagaatttgactttcactttcacctcagtaacttgtatataaaagtttgcaataaaaattaacataggttaccaaggtaaaactctaatttagacaggtgaacaacacttaaaacacctaaggaattgcgtctaagttttgtccaaaagtaaatttttgtatgaaggattatgagtgtgatatgttctaataaataagcatgttctcctcatcataccatcactaatacaatacattttaaaatatattaggttgttatagctttagctgaaattctgtgggaaca

SEQ ID NO: 27183 - DNA, 780 bp, Glycine max
  Intron number 1 from transcript Glyma18g05020.1 (locus Gly ma18g05020) derived from phytozome v7.0 (chr-ID Gm18; pos 3748996 to 3749775 reverse strand)
ggacttgccaggtaattaattaatcaacacttaacacttccacacacacatgacacaataatttttcatcatgtcatgcatggatattaattacatatctaattggattgattgctcattcttcaatcgaacaaaaaagatgtatagaaattttaagattagtttgttgaattgaatttttgaatatactaattaactttagcatacccatgtttaaaacacctataatttgttttttattgacgaatcattattggttaatggctatgcaaaagaatcttaaaaaagtggggggcacgcttctttagacagtatactagtactatttggttgcggtcttcacccaatcatgcatgaattcgaaacacatacgtgctttattggtcaagtatatttttctgcttccgcataaaatatctagggatatgatgtttacgtacgttgtacggggatatagacccttcaaatatagggttggtactactttctataatcctatactgttgtgaacgtcaagacatagtaatgagggaatagtgggattcccaagccaaaaacagtcaacaaaagaaaaaagagaattacaatgtatatatatctagagttgctaattttcattactttttataaactcatttagtactttttttcatggtaaccaatgcaagtttgaaattaatgaacatgtattaatgttaatgttaatgttattgttacttacattacatatattatatatatatagggaagtcattgttaccgggtaaagatttggagtgg

SEQ ID NO: 27184 - DNA, 666 bp, Glycine max
  Intron number 2 from transcript Glyma19g44210.1 (locus Gly ma19g44210) derived from phytozome v7.0 (chr-ID Gm19; pos 49706689 to 49707354 reverse strand)
aggaaatctaagggtgacaggttgtacttatttacttgtttaacttcctaatctttttgcttgatttttgatatattcgtacttattgaaatggtattggagtatggactagtaataggatgagagtgagtgttgcattaatagaatcaatctcaagaatatcttgtaattgtgaatcggacttcatctttttacccaagtaggaattaagctgcaaatatggtgattgtgtgtgtagacttttagactgtaacttttgaattttgattattaattgtgaacattttttttattgtttttttctcttaagcattgatgactacatcagtagtctaaatgctccgagtgggttatgtatcatagagcagtgaaaagtaaaatcataagcaccatttatgacctcccctcattttctatcttttcttcgagctttaacttttatgagtcagtcatcttttgccaaaatttgtatgtagttttgaatggcttagccatcagtgtttatagacataaattttatttttccagagttttaatttggttctcattgtgaggttctcttacacaaggataatgggatgacctcttgtttttcactactttagtttattgaagttttctcatgctacaggagatcaactgaaatttctctggttatccggcaaa

SEQ ID NO: 27185 - DNA, 765 bp, Glycine max
  Intron number 2 from transcript Glyma19g31320.3 (locus Gly ma19g31320) derived from phytozome v7.0 (chr-ID Gm19; pos 39085550 to 39086314 reverse strand)
tttgtcccaacaaccatcaggtatggtgtgtttttttttgttagatgcataaaggtgtttttagttttaaaattttaaccaacttgttgtgttgtgtttgtgttcagtgtttatttttggccacagatcagtttctttttctgggattctgagattgtttttggatttttgtgtctttataggaggtggaggtgaatcttgttataacagattactgtatgcctggcatgacaggctatgacttgcttaagaaaatcaaggtatgcttgctttgccttggtttctattcctgtctcatgtctcttttaaccattttattctccaccacttttcttctcagtttttgtggccaagattgttttcccttttcacaaagacccttggagaaactttccattctgaatgtgtgcattcatttcaaatttgatgttgttggttaaagttagttgtcaagttggactaatttcattactcaccaccactaaatatattatcaagtgtaatccttttgccattttcttttttagttttccacccaaaacaaatcaggttcaatatgtgatggaaagatttttctttcttttccaaaaggtcctactttagtagctggatttgatttgagtgaaaaaatcgtttgagaatcgatggaaattatgtgctcacttcacttattccatctggaaccaacaggctcaaaaacttaatagtattctctctgatgatatttcaggaatcttcatctttgagaaacataccggtggtgat

SEQ ID NO: 27186 - DNA, 821 bp, Glycine max
  Intron number 1 from transcript Glyma19g32090.1 (locus Gly ma19g32090) derived from phytozome v7.0 (chr-ID Gm19; pos 39868155 to 39868975)
tactttatacgattggagatttgaaggatatcaaagttataatttttaattattaaaaaaattttaaatataaaaataaaaaatctaaaaatatctatcaatttttttttaggcttgtatgaaaaatgtaaataataagtggttaaactttcatttttctaaaagaaaaaagtgaatatatatatatatatatatatatatatatatatatatatattttaaagttataaattatttttttgggatttctttataagggaacaaaatatttacattgcaaaatgtcattacctacatttccttataaacttgttgttgttgacatgttattcatattttattttttaaattttattttatagtaaatgtaaaaaaaataacttttatccaatcataaattatagttaatatgaattttactaagacaattattgtaaaattaataaattatcataatattgtcggtacataatttttttctgttgtataaaacatacgcaaagactgatttcaactaaacttcactttatatttttccaattttgtattaataattgttttaaaaaaatggataacactacaggtcagctatttatacttattgcgcgcatttagagttcgtaccatataacagttctcttactttgattttctccctcaagtacacataaaatgtaggtgcgaggtgtcagtttacacactattctaactccgattctgctcttttctgaagaaaatggctgaatcatttgtgttccatattgctgaatcactgttgcagaagcttgcttcttatgtttctgaagaagcttctcgagcct

SEQ ID NO: 27187 - DNA, 649 bp, Glycine max
  Intron number 2 from transcript Glyma19g37220.1 (locus Gly ma19g37220) derived from phytozome v7.0 (chr-ID Gm19; pos 44444389 to 44445037 reverse strand)
taaggtgaaatgttattatcattatcatttttccatctcaaatctgccctcgcaatatttttctcttatcatttgtgttaaaaaacattttattgttcatttcattatcaacatgcacatcattcacaactcaatcatcctcaacatatggttataacacccaccacccatacatcatcacctacatttgaaagcccatcgccatcattcaccatcataattatattccctctacttttgaatattcatcttgtctgtataacaatatcacattgacattttaattaaattttaatagtcatggttagaagatatgataatatactctaatataatcttagaataaataatgtgaaaagtctaactcaatttcaaaagttagttcaaggagtgagggtttccctcacttatatattctaatttgaaattatttttaatcgatgtagaacttagattatttctaaccgtcataatcatactaatagttaaaaaccatgagttttgtatttattttgattttaattatcaggcagtattgttgacaacatggcatgacatataattaatgtgaccattttaattaattattggtttaatttgatggtattgataatacttttattgttatagcttgaaggaataaggaaaa

SEQ ID NO: 27188 - DNA, 899 bp, Glycine max
  Intron number 1 from transcript Glyma18g43940.1 (locus Gly ma18g43940) derived from phytozome v7.0 (chr-ID Gm18; pos 53554055 to 53554953)
aagctgccaattctgtgatcaccgccattgttgaggtaattacactactttcacttttaagattgtttatacattttatggaacatttggttcacttttgggtatggtgtgtgatcattatacataggttaatgaattaagcttttggataaaatgagaatctgttgatggagttatttgaattgacaagagcttttttatcccatgaaataattcattaaggtggtgttgtattgtatgttgaaatctatggataatgtgaaaagaagaaaataaaggcacccaaataaaaattctctattaatctatggaaaatgttggtatcttccattaacaacactagatttttgtggaacagatcagggttagtgctgcaattaaattccaaaaagaaattatagatttaaagagaattcttaacttcaatattcccttcagattttttacatctccttgtggatcatgagtttctcattttattctacttgaataaacactccttttaccccacattcagaagcccaactttaaaagaagtctctgcataatttttttaggataaaggttaaatatgtttttagtttctaaaattggtatgcttttatgcaaatgtgttatatgtataaacaagggaccaagtgactagaggaatttttttgtcacaatcatttgtgaaggacggtgactatgatacattttcacaagtaagaatccaaaaagagaatttatttttgaaggattaaaagcaaagattttcctatggattcaggtactaaagacatatttaaccaaaaaaccaaaaatctagttagtttttgccattcttgtggagctgggtctcacatgatctgactttggctgcaggctggttacagacacatagacactgcttcgcagta

SEQ ID NO: 27189 - DNA, 613 bp, Glycine max
  Intron number 1 from transcript Glyma18g44800.1 (locus Gly ma18g44800) derived from phytozome v7.0 (chr-ID Gm18; pos 54537013 to 54537625)
ccaaatctaaggataaagtcgttcttaaaaaggtagcattaagatattcgtttattttccaatgcttctttagcctatgatgggtcattgttggaatagtgatgttatgttttatacttcatttgaactgaatcgatgcgatttgctgagcttgtttgagttgtttcttaccaactcttttttaatctgctgtgatcgtttgttcccctttgtttctgttaatgtgctgtggtggttttgctgttataggaagcatgaggtgcatttaattagagccattccatcttacatgagataaaatgattgatgtagaagagttgaacagctcttgaggattattgatccttttgttctttatttttctctcttaatattttctccttttgaaaataaagagaaaatatatatctagatgttggaatatttaaattgaaatcccaaacttatgtgctgactttacctatcagtatcacctcataatttacatatgatgatgtaattcattttctttttatgttttcaattataattgcaaagcctgtcaaatgtatttaagagctgactgatggcacatgcaggtaaaggttggaattgaaggagcagaggaatttgg

SEQ ID NO: 27190 - DNA, 783 bp, Glycine max
  Intron number 1 from transcript Glyma18g45280.1 (locus Gly ma18g45280) derived from phytozome v7.0 (chr-ID Gm18; pos 55035848 to 55036630 reverse strand)
ttgcgacagctagaagccatcgaaactcatagcgggtaaaacttttgatttttaactacaagtatactcatgattaaatctttttcttgaatcttcagtgtaaaagtttttaaaactattgggcaattaaaaatcattcttatatgatttttaaggtattattataaagttaataaagttatcatatatcatcatttattaacaaggtaaaaaatcttataatttttgtgcatatattatttatttattatttaatgtttaaaaatatcaaatttcaattattataacatatgatattcattttaaaaatatttaaaatgtcttagactaacaattggtaatatttgaaatctatgattattggttttggtaatagacatttatgtttaattgaacattcggttggagatatataatgagtgaaatacatttttctttgtataaaaaagactacctttttgtcaaagaatttgaaaacatttttaatactaccatggcactaaaattcttaacacatgtaagtcttgtactattattttgacatgatgatttggtggtatgtacagaaagtttcgatgtaaatacaatacaatggagtgagaaaacttctattcataattaagctgagaaatattggaaaatatatagtgcatatgaacaatttgcatatctttatatgttgcatatttcttgtttctgacctaaattttccttaacatatcacatatttctacacacgcgttttcttttcaaatgttatcgatcttgttacatgttaaaggt

SEQ ID NO: 27191 - DNA, 937 bp, Glycine max
  Intron number 1 from transcript Glyma19g37910.1 (locus Gly ma19g37910) derived from phytozome v7.0 (chr-ID Gm19; pos 45001236 to 45002172)
gagagtcagctgccagatctagagccagaaaacaggtgcatttgcatgcatgcctcattttaattatcgaccaatgcaatgcctacatatatatcctgttgataatcatcttgatttatatcatgaaatattcatgctggcttcttgcctagaaatgttgtataaagccaatgaactcaatttgacttaactaaggataattgatagtatgtgtgtactaaacacaacattagtttaagaagaatctgtccttagacctttccgctttgaagtacatgtttgctattgatgcattaggatcgatagttttcattaatatagttttttccccttgaaattatgttaactaggattggcttttcttttccagaaattatagggggttgacaggtttcaaagcaccagcaggctatcagctactaataaaataccaattaattaattttttacttagcttagatttaaagatgtaaataaaatatacatcaaaatggaccgcgtagctgctatagcttatgagactcaaagtgttattcacttcttgcattgcgtagagttgatgtggtatggtatatagtgtgtgtgtgtgtattgctgaagcagatgatcagggttaagcaattattaattgggagaaatgttacccggaagtagataaaacatacactagtttaggttagtagggactcaatttcaaggactttatcatgttctttgagatgtgaatctagacaaaaggagcactggaattacaccaaaccaaaatttaaaattttgaagtaccacaaattaattaatagatttttttttatggaatattttcgtagatatttgaggaaggattgctattaagctttctttgcggaaccttattcgtttttttttttttttgggcttggcaggcatacacagtggaattagaagcagaactaaacca

SEQ ID NO: 27192 - DNA, 453 bp, Glycine max
  Intron number 3 from transcript Glyma17g31510.1 (locus Gly ma17g31510) derived from phytozome v7.0 (chr-ID Gm17; pos 34660668 to 34661120)
atatttctggtttaggacaatttactactcaaagtgtttattcatgaaaacctaataaatgagtaaccaattattcctaaactggaaatactttaccccagaattttatttattaatttttgtcattttctcaattctatattttgttttatggtttctgcattcagaatagactactagtgccctgtgttcttggaacaacccatgcaacaactgtaatatttagcatttaaaatttttcttcactgggtcaaatatgaaaaatgttaagctaattagttttattttcttttatcaactggttaattatatttaattatatttgaggatggtacgggtaagagcactttaatatagattatgtttgatggtgcttgcctgctaggtcccgtcagttcaaaaaattattaaaaataagttttgtttataatctgccttgtggaatccaggtta

SEQ ID NO: 27193 - DNA, 777 bp, Glycine max
  Intron number 2 from transcript Glyma19g34400.1 (locus Gly ma19g34400) derived from phytozome v7.0 (chr-ID Gm19; pos 42003428 to 42004204 reverse strand)
tcggtctctgatcctgcagttaatcggatcagcgggtattactcatgttctttccctttctttatttatttactttcgtttctcattggaaaggttgagctctcgagtttgcaatttgtgtaaggaaaaatttgaacaaatgattgtggttttattcagtgacacaaaatgatatataacttgaattttcgtacaacttttgtgtttatatatttaagtatctttgttctactttatataattgtttctaattagggtttggaatgtcagattttgagatatttattgaagttgatgattgtatttaatacttgctaatttggtattagtggattgattatgaaagtttatgtttgcaagtcatgtttaggttctttcgttatagattttggtagatctagagaaatgacattgaaagaaataaaataaaaaaactgaggttaacatgtacttgagaatgatattttgaaaataagttagaagatttaattttgattagatggtgaaataaaattgactttgaagtgtaaacatggatgcgcaagtatggatatattttacgagcctcgtacttcaaaatcaattttttgttgtcgaaaaagttataaatttcatttttcttagaattgataactttggccaccaccaagccataaacaatttgtagtagcttgtaagcttaactagaggatgccactttttgctgattaattttgtctattctgcaacattaacaatgcaggggtgaatttgctcgatttgttgctgataaaaaga

SEQ ID NO: 27194 - DNA, 453 bp, Glycine max
  Intron number 1 from transcript Glyma19g25090.1 (locus Gly ma19g25090) derived from phytozome v7.0 (chr-ID Gm19; pos 31013193 to 31013645)
atactttccttcttaacagtgtacaccatcacaaggtattactctctgttgcatttttcctttgaagttaaaatagtcatttttttatacctgtgggtaagaagtttgattgaactgtaattattggttaaatgagatttacacaaactcttttagttaaaaacaaaatggcaacactcaacagctatagttaaggtgtgcatattgttaaattaaaataagaagcagaagaagatgcagtttttgactagtgatcagcatcaccaaggcatgtctgacattggagaaatcctttgcggactgtgtcttatcattgatatttgatatcattttgtttgtaaattattatattttcaagaaaaactgcattttatgtgtctggattttttatcatgcatcattgttgacaattttgcaggaattacttttctcatacaatattgccgtggatag

SEQ ID NO: 27195 - DNA, 708 bp, Glycine max
  Intron number 1 from transcript Glyma17g06740.1 (locus Gly ma17g06740) derived from phytozome v7.0 (chr-ID Gm17; pos 4804852 to 4805559)
aggagattgataccacaaggtacttgcattcatttctctcaactcttagtactactactaagagttgttcctttggcaagtttcttccttcaataagatatatttacttttgagtcttagactggacttgttgctagtttttgttattgttgttgttttttttttttttttttatctttattggcaaatgttagttttgttagaaatgttagtgggggaattcgaacctgtgacctctcccttcacccttcccccttcccccaaccactgggccacttgttgctaggtgaggtgaacacgtgaataggtttttgaagagtctaatttaatttcttcccgagtaaatttagtttaaaccctcttaagaagtaggtaatggtttaattgttcaactattgctcatatgaagttattcttcgaacctgaattatatgaagttattcttgtgtaggctaacttgtgattgtgaacaatttgtttacagctggtgctttttcttttctctttgtttttaaggataataatgcaatgatcaccagcccactctgttttgaacagtaattttcattttacaaaaaaataatgatagtttttggctgttattttttctcctctagtatgtgatgaaccaagaaatggatattggcaagtgtggttactcaccttttgtactattttaaacttcttccagtgaattggttacttctt

SEQ ID NO: 27196 - DNA, 330 bp, Glycine max
  Intron number 1 from transcript Glyma17g08980.1 (locus Gly ma17g08980) derived from phytozome v7.0 (chr-ID Gm17; pos 6658392 to 6658721 reverse strand)
ccaattcctgctctctgcttccactccgcactacggtaattcttctaattaattacgtctttcttaatcgaaattcgcacgcacttttatcttgttatcctttggatctttactttttatttcttgatgttgctgaattttttatttttcgtggtttttcaagttgaattacgcttgtgcgagttttgatttgttttgtttcgtaacaattactgattagaatttagaacagagagcgcgttagattttggaagttgaactgtgattctgtgtttttttttttatttgatttcagattctgtgaaatctctgactggacgctctgtaatt

SEQ ID NO: 27197 - DNA, 803 bp, Glycine max
  Intron number 1 from transcript Glyma17g37300.1 (locus Gly ma17g37300) derived from phytozome v7.0 (chr-ID Gm17; pos 41093525 to 41094327)
gacgttgatccttgccaatacgaacaaattgtacgtttcttttgcttctcctttacctaatattgcgcttccattccccttttctatttcactctactcttctttcttcgttatatttatattgatgattctggcttctccttttgcagcaaagtaagtctaaaacgattttcatttttaattctattctattcaatccctagaatgttttgtttgtgatgcattggtcttgataagtctcaaatcaattgaaattatgaacttgtcatttcatatgcacagccggactgcattattgttctctgtgtaacctgtttgtatgtagaagggtttgtagtaatttatatgctgtgtatattttgggcgttgccatggtatttttttttattgaaatctgattcgtgcttaaatatttttctatcacgtgcttaaatatcatatttaagtaaataagctgttgttttgaggatttttgaaaactcgagctagttgggatttgttgaggcttgattctttgttgtttctgtggatccatttttctacttaattctatgatggaaaatatttcaatttaagcagttccttcttagctgtgttttttgaacttgttttttctgagagagaaaaaaaaactgaatttgagctcatgcagcattgctacttctaagataactgttgtatatgtggttactattaggtgctttattggtttctgtgtgtggacaattatgaattccgggttatatacttatattatttctcttgtccataacttttggtactaatttctgtgcaggctataa

SEQ ID NO: 27198 - DNA, 877 bp, Glycine max
  Intron number 1 from transcript Glyma20g00370.1 (locus Gly ma20g00370) derived from phytozome v7.0 (chr-ID Gm20; pos 181329 to 182205 reverse strand)
aaaggtactgtctacttcactgtattcttaatttaattatgtccctttagctactatgcttatcatgtaaaaatggtctccttccgcattctaaatgaaagttacttttggtctaattcaaattaactttaaatttatgaggccttttcaattaaattaagtatttgattcccatcttatactaaagagtgttcataagcttattgatgtttacgaaaaatttaaatgtaaaagctactgaaaaaaattcagatgtttaagttattctaaggtttaattattctactgatttcgatctttccctagattttcaattaggcatatgaacttcttcttttttttactgggtttctgtacttttcttttcttttttttcaattgaattcttccgtttgattttcgttatgaaaaattaatcataaatacctaattagaggtaaagatcatggaataatatttttgtagtgtgttgtaggtacaatttagtcaattgtaagagatttttgttgagtttgaatctctatagctcaattcaactcaaatatccttttagaagcttataacatttgtttaactttgcaaaaaacttgataattataaaagtctagggactcaattaaaaaatttaattatctaattaaaaatttgataaaagtacgtatgagaactcaaagatcaattaatcttattttaatttatacataaataatttaatttcttttatctttttattttataggatatttatttcgaatttatctaaattttttgttcgtgacgaaattatattttagtatctctagaatgtagaaaagatattagatggtcattttttaattatactttacaggaaaaggaagctggagggccacataat

SEQ ID NO: 27199 - DNA, 1000 bp, Glycine max
  Intron number 1 from transcript Glyma17g34100.1 (locus Gly ma17g34100) derived from phytozome v7.0 (chr-ID Gm17; pos 37977831 to 37978830 reverse strand)
ctcgtcgctttcttcatacttcttaccttctagtggtactcttcatctttctcactattcgtttgttcatacttctcagttatcaatagtttaaaaaaaaagaagaagaaaaagttaaaaaagttttcctcatgaattgttgcttctcatatagttttttcttttcccactttcaagttagaatacacagaattatgagctgtgaactcttattattcatttaatgttcatatgatcatctgggtctttcttgattatggagtctactaccttctgtcggtctgttgattaatcttgatgtttattatttattttctatacaattcttagcacaattcaagacataacgaatttccaaaaaacaaaattcttcttttggtttatattacgcatcatctttattacctataacttgaattctgtttgctctgcctcttcatattttattttgtgttgaaattctttgttcttccttgtatttgcatggttttagatgattctgtatttattgtcagttttttttaaacctgtcaccgagaaaagggaaagaaaaagtaagagtttatatgaccttttctatgattggagtcttcttcatagttccatgcgtgaaaatattccctcatcattatctttcttcttttttttagcatctttcttctgaagtactattgacatgtactagaattgcaaatgctacttatgcttcacccttttccccattgaagtgtctagcagtttacatttttttttactctttctactttccttttgaaaacaacatattcttaattttaatgtacacattagatttgtgtttgagcgtcatggtattacttttctttgtttatgcagcattaaaagttgcatgtcatatttgtaagagttgttacaaaatgatatccagattttcttttcaattatttatttttgtttagctttctttaattttttcatgcttgaagaaataaaattaatgcttatttgttttattcagata

SEQ ID NO: 27200 - DNA, 561 bp, Glycine max
  Intron number 2 from transcript Glyma20g39000.1 (locus Gly ma20g39000) derived from phytozome v7.0 (chr-ID Gm20; pos 46474115 to 46474675)
ctcctcacccctgccgcataacaaaccaatcctcagtaagtctttctctcttttttcaccaaggaatcgaatctttctcttcttttttacctgtaattgccactcttgttctttgtgctgaactaacataatatgtagtttctgatatctaatgctgttttttctttgcattgagcattggggttggctttggtataaaatgcttttctctgcaaagtaataaatactcttttctgcatacactgtcttaaactttatcgctctgattttttgtacttttttaatccaattgtcccccagttgctaggtcatattgtgtcaatttgattttttcaatttctgtgatggacaggtgtggctgctactaacggaagatggagatatatgaatgtctttgtccattgaagaatgagcaaaagggacctggaacatatctaatatgcaaacattagttgactatgttctgattgttgtaattaggcactgacttcagttgcatggttacttttgtaaaatcatagtataggaaaagccttgtacagtaggcttcattgtagattt

SEQ ID NO: 27201 - DNA, 633 bp, Glycine max
  Intron number 1 from transcript Glyma18g03110.1 (locus Gly ma18g03110) derived from phytozome v7.0 (chr-ID Gm18; pos 2052113 to 2052745 reverse strand)
gtcccttgaaagacgaggtttgcactttctctgactgactacagacaaattgaggcagaaaaattcttcgaacatgctactgttgtgtgcattataaattctgtctacttctagtttatgaaccatttgcacaatgccaaaatataccttgtctaatgtcttgtcttacactgtttgttttctggtttctatatatataatgtgctaacaatgtcatcccatcatagattaacaaatagggtaagattgttgtcttctgtattgatatttgataacagtgtatggaaattaaactcaggtgatctcaaatgctagacaagcctagattgatatctggacaaattgttgttgtatgtaacttgcaaactgattttgtctggtcatgagataagcaacaagtgtttgaagcacagaaatcttgctccacacagaaacaagcactacaagttcaacattcattggctgtcaaaaacattcttaaataggaaaaagttaataatacatgtcctttgtttcgtatgatctttcttttaatgtcaatgtctctcgtttgctttggacctttatgaataaattaattataaattttcacttttgcttactatataaatcacatatctttctaggtacatc

SEQ ID NO: 27202 - DNA, 874 bp, Glycine max
  Intron number 1 from transcript Glyma19g26270.1 (locus Gly ma19g26270) derived from phytozome v7.0 (chr-ID Gm19; pos 32873781 to 32874654 reverse strand)
agttggaccacctcccccaccttctggtagattacgtatgtctctctctcccccctctccttctcctcttataattcaatttataatgaagaaattaagattttttgtttttgatttaattagaatgcgctggaaatataattgtcatgtaatcacaaattgtcaagtgtatagaaagtttgttgacttttataataactatgttttaacgtacctaagacgatttctaattagttgagagtctaacaataaaaatctttatagaacttagaaacaattgtttatttaaaactgaaccttttcaaatttgtatttaattttgatttgattattcatgtaaaatgaatagtttagattaactccttttttcctcttatctcttacttgatgcacaccatgtatgtgtgtgcaatgatcatcaaaacttgtcaagtggaaatcattgataagtcatggatgttgcattgaatgatgaaacttgaaggatgaaaaatggaaattggggcagggaagttgaagtagatttggggttggttttagtaagtttcatttaagtaaacaatatgattagaagcaaagacaggaaatcaaacaaaaatcagaaatggggttttgtgacatagtagagtattgtaccacagcacaacaaagttttgaaaagaaaataggtcatgcatgttgcattaaatgatgacagaagaaaaatagaaatggggtagaaaagtttgaggtagaattgagtttgattttagtagtagatttcatttatgatatagggttagaggcaaagacaatgaaaacaaaaaaagaaaagaaagaattattgaaatggagttgttattatggaatatggcagctggaacattgaactcag

SEQ ID NO: 27203 - DNA, 627 bp, Glycine max; identical to SEQ ID NO: 26379
  Intron number 1 from transcript Glyma19g37740.2 (locus Gly ma19g37740) derived from phytozome v7.0 (chr-ID Gm19; pos 44839725 to 44840351)

SEQ ID NO: 27204 - DNA, 834 bp, Glycine max
  Intron number 1 from transcript Glyma18g36750.1 (locus Gly ma18g36750) derived from phytozome v7.0 (chr-ID Gm18; pos 43234281 to 43235114)
gaatcacttccctgtaagcagcaacaacaaccctaatttccttttccaatttcaatttgatcttctatctcaatcgccaatttcgtctacaaattattagattcttcatatgcatcatccctttctattttcactcgttttaattattttgaggtttgaaatgattattatgctagaataggagggtttgttacgtgaaagcataccaaacgatgtcaccattgagcttgtcatttttaagggtttatttatcacatcagcctgttactgtctttaaattttttcttctcaagaaattttgttacataattcctatagtttttgttttcttgagctgaagtttggttgcaagttaatttgtagttttgataatgttacgatattgataatgcatctgagagtagattgatggacgtggtgagtggtgagggattttgttcttttaggcactttctgagatgaaagatttctttgttttagaactagaattccatccaaaatttgcgattttccaagttattttactttaccctcgaaccaatcaaataatcactaacatatttaagatttttttctgtaaaaaatgttttgttacataattcctaatatcttatggaatgaatacacataatttttttattttttattttcctgagatgaagttttgttgtgagttaattagtagttttggtgagagtaaattgatggatgtggtgaagtttatgaaagtgtgtagatgagcgtaatatcatcgttgtgtgcttttggatagagctgatgtccttctgttaatgctacagggatcaatcacttcaaacacactcctagccgaga

SEQ ID NO: 27205 - DNA, 624 bp, Glycine max
  Intron number 1 from transcript Glyma18g04620.1 (locus Gly ma18g04620) derived from phytozome v7.0 (chr-ID Gm18; pos 3396430 to 3397053 reverse strand)
aacgttatagaaaaggtcgtcgccaagttgtggggttcgtctattccttatcctctcttcttctttaattttgggatgatgggatttcatataaattctgttctcatccatgtttttaattctatgcttgctttaagtgggaaaattcatggtgggattttggttttggtgaattttgaaatcaattttttattccctaaggctttgttcttatatgggcaagatgagtttactgatgaagagaagagtaaaacagttaaaggttatgagtttgtggatatggatactaagaatttgaaaatgagtttctaatgagggtgtatttttttatcggtaaatcttaatttgttaatttttattagaaatgtcagttggaaaaatttgaatccgcaactttttttttcttcctttgcccatctccaaccactagttaaatcttatatctccttctaatgagagaattgaagtgaattagttggtgaattgggaactgcattgtttctctatggagttttatgttaatggggttagtagtacttttattttttatttttcactaaatttgtgtttgcaatcatgttcatgcagatgcataccgtacagatttaagattggggagaagac

SEQ ID NO: 27206 - DNA, 369 bp, Glycine max
  Intron number 2 from transcript Glyma18g02760.1 (locus Gly ma18g02760) derived from phytozome v7.0 (chr-ID Gm18; pos 1784772 to 1785140)
tcttggatcttaaaaaccttgaggtatgtgtttcattcttcattttcaggtatggtttgacattgtttatatacattggacatgaagatttactgttgaaaaaatgttcaagatttcttttggtcttgttgacaaaataatatttggttgatgttgttgcatcctgcttcaagatccctggtcttctattctatgtatgctttaaaagagggacacaggttaatgacttgacgctgtaaagttatgtgatctagctgaagttgttggaaaaatattccgaatagagtatttgatttgactttttttttatttttttttattttagccagttgacattattatgactgttcttacagattttgattttgg

SEQ ID NO: 27207 - DNA, 693 bp, Glycine max
  Intron number 1 from transcript Glyma19g27600.1 (locus Gly ma19g27600) derived from phytozome v7.0 (chr-ID Gm19; pos 34905947 to 34906639 reverse strand)
gtaaaggtaattaacaacaataatcactacataaatctgatcaaaatttagtgataaaaaatgttttttcattattaacacagtacaatatgttttttctcccaatttttgtttctagtctcatatattatttttagttcctcataaattattttgtttttatttgacgttaattttaattcttaagtaatgacgtgaacaacataatttgtgtaaaaaatttctaaatttctgagaaatgtttatttttgtaacattatggtggtttcagaaattttggtgtttagaattttgattttttttattttcagtgattttagtctgtcaaaatatttgcagtagttaaaaaccactaaaaactttaaaaaaaaatcacacaaattttacttgtcacgtgatcatctaacaattaaaattaatatcaaagactaaaaacagaaaagaacaatttatgagtgattaaaaaaaagactaaaaacagaatagaacaatttatgagtgattgaaaacaagatagaccaatttatgagggactaaaaatgtgaaagaaaatatgtgggactaaaaacaagataaaatgaggaacacaaacctattttatcgttagtacaatatcacaataactctagtgatattttttaaaattaaatataaattgttttttcacagattttattttttttcttgcagtga

SEQ ID NO: 27208 - DNA, 714 bp, Glycine max
  Intron number 1 from transcript Glyma20g29460.1 (locus Gly ma20g29460) derived from phytozome v7.0 (chr-ID Gm20; pos 38312172 to 38312885)
caacaaggtgatccatcgttctcggattccttcaattcccatcttcaattttcatctttcatctctgtttttcattcgaaatttgttcttttcgcttctttttcaacttttagggaaaaccgagatctgagatctggaacccaaattccaggttttgattctctgttaccctctgttctatgagattctccctaaccatttggtgttgaagctctttctgttctacgaagtatgcttcgtgctctccttttttgcatgccgattttttttctccattagttagatttaatccctttgtattttttttaatggattttggttgtaataataacttctatttcaatttgcgatactgttagtttgtatgtgcttgagcttgattatatagtttttctttttaaaaataaaataaaatttagatgtgggttgggtggtggtatagaaactgtcagaagagtaacataacttttgttgtttgtgttggaaattgtttactgttctttttcttttgcaaaatttgatgcttaattttctcatgaatgatgtgtaatagcggtattaggttataacatttgcagaagcttcaaggagtgtttgtattctcgagttgacttgagagaattttctctgtttgataattgcgcagttatgcttatccatgttacacagggtgacttcgagtattgagtatttcttaacttgtgttcagggaaa

SEQ ID NO: 27209 - DNA, 682 bp, Glycine max
  Intron number 1 from transcript Glyma19g37700.1 (locus Gly ma19g37700) derived from phytozome v7.0 (chr-ID Gm19; pos 44810886 to 44811567 reverse strand)
aagaagaaactaagcgtcttgcaaccattcgtgaggtatctctctctctcacttccatttctcattttcacttaacaggaaaacccttttttttttaatataaaaaaaagctcctgctggaaacaacgttggtatttttttttgtgaaattttatttaattaaatcgggttatcatgtaacaaggggaataccagaggtttagagcacatctacagcacttgaatatgtccgatctgtggtttttttctcgacaaagtgaatttgcagcccccaaaacattttccttttattttccgttgggttttttgaggaaaatatttcaaaatttgaactttcatgttcccttgaatatattcttttcagaaagcagtgtcgggctaagaacctaataattcatatacttcctttctagaatttatttggcacctaggattttaaatatctgttgttagaaaacaatatatcaaatatcacgtatatttctttggccttacaattttaaaatttttgttttaaataaacaactggccatgattcatgctgaaacttgttatacatatttatgtagcgtgtgtgtgtatacaattttgtcatttatactcaaattgatatgtaattgaataatcccaaacttattctatttgaggaatatcaggagcttgaagccctggcagatccaat

SEQ ID NO: 27210 - DNA, 863 bp, Glycine max
  Intron number 1 from transcript Glyma20g00720.1 (locus Gly ma20g00720) derived from phytozome v7.0 (chr-ID Gm20; pos 452389 to 453251 reverse strand)
tttgggtaaatttggaaaacagcagctgttctgcggtaataaaatcccccaaaccaaacttttcctttgtttagctatagatattcaaatagatacctgatgtgtattatattattaatgatgtggagttgaaaatgctgtaatggatgactggacatatccaaaatataagattaggaatgaatgaattattaaagagagtcagagtagcaatctattgaggacaatatgatggaatcttgcataagatggtctggtcatgtcagaggagaaaaccatagaagcccctgtttatgtgtagaagtatttattactacacattaataccctgtttagccttgatctttaagcatctagggatcattattactgtgacttattgcatagttgtatatgtaattggttctgtgactgattaataacctgttttacatcttgtggggatcccaaagaacttgacaatactagatagggaatgggggagggaatcaaaatatggcaatgctcttcacaatgccttgggatcccaaagaactggattttgtacatccttatgatgttttataagaaccttgggatcaaaatatggcaatgctcttcacattgccttcactttaatggctttgtttttgtttcattctcttttctgctgcactgcttgaaatccacaactttttgttataatttatctatatctagcctatattagaatacaaattttatcagtccttgatgttttgctgctgcatcaaacatataaagaactcacagttgattgctgacatttgctggaggagttcaaattgctgacactttttccttttgcagagtgaaaataataagacacctgaacctcccaagga

SEQ ID NO: 27211 - DNA, 924 bp, Glycine max
  Intron number 1 from transcript Glyma18g08630.1 (locus Gly ma18g08630) derived from phytozome v7.0 (chr-ID Gm18; pos 7356178 to 7357101 reverse strand)
tttacctcttccattccaacctttgaatctgtaagcttcttctcttccaatttcccttctcacgcgtcgttttaggtttaaaagtttgcatctttatgtactccgctgtcaattgttgcatggggttggtggatttggggtgagggatttttagggctttgaatgactttactttgatttgattatttgggctatgtttgagatcaaaggttctcactgggtgtatttaagaagaaaaaaaattatattttgaagccttttcaattctcaccatggctctgctgtgctctggtgagaattttgtttttggaattgcatgaatatatccttttgatgcggtgatgtgattttctctggaaatggtgcaaaattaatattcaaggattgtttttttttttttaatttaattattcgctctgccatgctgtacagtgttgagtattatcatgttggctttttgtttgtcatcaactgcattcctttgttgcttttaggggggtgggtgggttaattttcatgctttcgctgcaattaattgacatggggtaaatatattcattttttctcgttgtggccatgactgaaagatactatagtgcttttcgggttggctgccgcacgctgttatccaacattgatagtaactatgattgaccaaagtggagccaaattgtactccccttgacggctgctttgtagagtccaacagccgctgtactgctacagcatgctatcaataacctgggttcaattttaaaatatttgcctttttgaaatgcccttccattgtagctggtttttatcgtttattttcccctctttatttgcactttgttgtttgagtgtttgtcatacctatactaaatgatgtgttttttaattctccaggtaggcttcagttgtgctatttaacagtgtagggca

SEQ ID NO: 27212 - DNA, 606 bp, Glycine max
  Intron number 1 from transcript Glyma17g16850.1 (locus Gly ma17g16850) derived from phytozome v7.0 (chr-ID Gm17; pos 13638077 to 13638682 reverse strand)
ttttgttgaatactgagtatctcagtttgcttcgggtatgtatgcatgtaatgtcatgtgtgcgcttttaccatttgtaatatctgctatcttagttgtgatgttttttagagaaaccattctagatctgggtacatgtgtgaatgcgttttgagagtgtcatacattatcatttgttttatttttgtttcttgttgcacacatgttcttttgttgatctagatttggctaccggatattagtatgttatcttagttgtgatgttgctttttctatcttcctctgctgttaaattgaaattaggatttgaatgcataatcttaatacttttcaaaatggtgtttttatgatttgttgatgagtagcttgcagacgtggccatgtattttataaaccttgtgtgatttaatatcactagttccactgattaaaatattaatacatagatcaagctttaaatttgtagtttttgttttcttcctttgcctagttctttcttatcagttgtgttgttgagttgctatttgtgaatttgagagtcccttatggagtttaatcttcatatgagcaggttatattggaaagaagtaaaattttggatagtga

SEQ ID NO: 27213 - DNA, 1005 bp, Glycine max
  Intron number 1 from transcript Glyma19g01500.1 (locus Gly ma19g01500) derived from phytozome v7.0 (chr-ID Gm19; pos 1116158 to 1117162 reverse strand)
ttgtgctcggcaacaacgtagactcctgacctacggtttttttttattactctatagttgctaatttctatttttcacctgcaaattgagattaatctgtttatgggtcactcatgtctattttgtttggtgtttatcagccactaggaggaaacataggcacttgctattagtatgttacaatgagaagttatgggatagtatggtaatgacttgggtgtctgttagtgtggtctatacatgttttattgctgatttaatttcttctaattttcatagactgcgtaattggtattgaaattcctggaaaatattttaatagtaaatgtattttgtttctttaatgattttagacatgataactttctgcaaatccaaagttttcacccatgtgcaacatttgcattcttggctcatgcatcagctgacagatctgattatttgattctattttacaaaactgtcccaaccatctctctgcttattgatctgttctttgatttatgataactgttttcatttgctcttttttttttctttctttctaatatggtaggttttccttatcttcaattaattgaggtcattggattgttctctgtatgagctgtgaaataatcattcagttttcctggtggtctgtgtgacctctgttattgggttgcttatatcttcattaacatttggtagcacaagagtatcaaactttctggagttttctgttgtttaatttaaccttttgggaatatggaatgcaatcccccatttaaacaattaatacccttcatttacaagtagtggacagtaacagtgatttacattgcctcctttggcaacttggtgtaaaacttatttacaattatatgcatgctcatcatttatgattagaatatatagcttcaatttggtattgctgattacttcactctcatatatctagtaatttgtgaaaatatttttttttggacagagttgagataccagtctcaggagtgcttgccggtg

SEQ ID NO: 27214 - DNA, 795 bp, Glycine max
  Intron number 1 from transcript Glyma18g46120.1 (locus Gly ma18g46120) derived from phytozome v7.0 (chr-ID Gm18; pos 55889293 to 55890087)
agagtgtgttttataaggtagtttgagatggagtgtcttttttctttttccgagaagaaatagaagagagagatgagatagtgtgtttaatgggtagtttcagtataaaaaatgagaaagaaagtggattaatataaaagggagtgaaaatagcaattaccaacttaacaaatcttttaggcttttttttcttcttttatttctattctttaattttattctaccttttcatactgattgcgcatattagtccaaaatattagttgaatatccatacccttatgtatttttcatgagctgaaaaagctcttttctcctgatcttttcaattcattatcattttatttttttcattcttgagccatatgggtcaaaaccttttagccactattttattcctattatgctctttgtacattttagaccattggaatccattctaaaaataatgaataaaattatgaattataataataatatttttgggattctaaccaaaaatggcataaataactcctctagcacaaatattaaaacatgctacatgtataaactgatttctattagactggtacaaaaacaatatatcaaaataaagcgcataatttaattagaaaacaaaaatgagaatttgaaattaacaagagataataatagatatctcaattaaggaggcacatgcatatatagttttctacaatcaaatgtaaatccaagaggtacacatgagacttgtcaagtatctgacgttgagtttctatggctttgaaggtattttttgaatattcaaagcat

SEQ ID NO: 27215 - DNA, 753 bp, Glycine max
  Intron number 3 from transcript Glyma19g32950.1 (locus Gly ma19g32950) derived from phytozome v7.0 (chr-ID Gm19; pos 40634180 to 40634932)
agtattctaaggaggtaaactctcggttctactttattactatctccaattatattgcatgagtacttgtacatattataactttattagtaaactgtaaaaaaatatattttaaagaagattaagagtaaataataaatgcgctaacaatgtaaaagcattcttacatgtttacggtttatcccataacaaattggcatgtatgataagttgttgacttttatactgactaccttaaaagtcgtatcaacattggtttctgattggttgacaatgtaaatatagaaattaaactcaaagattagtttaattgattgaaaattattttagcgatgataaaattattaaaatactggcatttgaaacattcagttttggaaaatcttaaaatttagttagtttgtgttgacgatgatttgcaaacatatcattatgttagtgttacttgtagaaatttgagtatttgataagaaaagcaaaaatgttttttgggtgaatactaattaaagaggaaaaatattgacttgatttaatgcaaaagctcttgtgccatgggactatgtgaggagagtatgcacgtagacgtgggtcattctactctccagagtgaggacttgaatttgttatatatgggtgattttatgctttctttgtatgaaaattgataataatgtgccatggtgttgtatttcactatttttctgccaataatgtacagagatcagtggttccactcgtcaagccacataactt

SEQ ID NO: 27216 - DNA, 344 bp, Glycine max
  Intron number 3 from transcript Glyma19g38690.1 (locus Gly ma19g38690) derived from phytozome v7.0 (chr-ID Gm19; pos 45540927 to 45541270 reverse strand)
cgtgtgcaccccaaatttctctctcacagctgcaggtatactacagctaccatatcatttcatttcattaactaacatatataaataacgaattatctccttttctttatttccttcactactttctcctagctccttcaagtttttcttttacttcatgagacaccacgatgacaaaaccatgcacaaagcaaaccaatttcagatgtaacttaatttggaactacaagtgaaacatgatctcaaatattattattcaggtttaatcttcattggtttttgcacttcactgtttgtttgtttcatcaggatacttttgacagagaagctacctaacaataagc

SEQ ID NO: 27217 - DNA, 941 bp, Glycine max
  Intron number 1 from transcript Glyma20g30950.1 (locus Gly ma20g30950) derived from phytozome v7.0 (chr-ID Gm20; pos 39609510 to 39610450 reverse strand)
gcgaccttccgttttgattcaccggcaccgttttggtacagtaaactcactccttcttcttcgatctgcgatttgccgttttgtttcccgaacaagtgagcgaaaaccgacacttcgaaatctcgctttgcgttatttgatttgagtgtgatttcactgtgttcagggctcggcgtttctgattttcttttctcatgcatttgcaagtaactcagaagctttgttttaattttttttcctatttttgtttttgcaatttattttgttttctcggagtttaaattgtgtttgaaaaattgcttgctaacttgtgtattcggagtggttgcattgaaacagagatcttacttactatttttatctcggtggtgaataaacggaaattgattattaatgtgtatatcatatgcatgttcattaggttggtaataaaatatacatgacggtttatataagatggttgggagtattgagaaggtgagttatgtttctatcttgagcttttttctttataactactttgatgattttagcaaaaacgtaactcgattattttgtggcaatttttgctgcatggtttttttttttatatatatatattttggacaacatattcaccacgtttcgagcatcttgtgacttgtggaagtcttaaagtgttttagttctgtgagtttgtccttgtcttaaactcttaaggcttttgaaatctgtgtttttgctatgaaatatgcttttcttgtcttatcaacattgaattagctcaagcgagcatattctgtcttttaatagttgaagggaatgactggaatgaaaagtattgttaaaaatgttaaagaagttatgaaacgaaaattttgaagccacgaaatatcattctgatctctgattacttttggttgaaaggctgttactttggttcttcagagagaagggagcca

SEQ ID NO: 27218 - DNA, 668 bp, Glycine max
  Intron number 2 from transcript Glyma19g27240.1 (locus Gly ma19g27240) derived from phytozome v7.0 (chr-ID Gm19; pos 34520839 to 34521506 reverse strand)
ggaattataataaccccgcgtatcagcctcctcaggtttgcaatttaccttccaaattttataaaaataattttttttttaccatgttatatgatattggtacatgactaattttctcggagaatctgatttttttcttcactcccaatcacacttttttccgtccagaacccgagaccattaataactcgagttttttttttttttttttgaaatttgattacttaattgcaatgtgaatggataatgaatagcttagaggtggaaggttgcattgtgttgtaattttggtagctatctcactttcgttttctttttacatacatgattgaggaaatctatgtgggcacgaacaacttccttttcacatttacaccattcctatttgggaattttttttttttaaaaaaaaaagctgaatcaagcaacctttgaaaatgatttttcagttttacttgggtttgtttgagtttttatctttgtccttaatatggccgttttatgtaacactcaatcggttgaatttattatggcgtactggttcaaccaacgtcctggcacgtttaaatatggaagagttggttaagacgtaaaaattatgccataattagtgctgacttttcttccctgcaggtgtgggattttcaattacaaaaatcaacagattg

SEQ ID NO: 27219 - DNA, 560 bp, Glycine max
  Intron number 2 from transcript Glyma20g28420.2 (locus Gly ma20g28420) derived from phytozome v7.0 (chr-ID Gm20; pos 37342564 to 37343123)
cttgatgtcagtaatttcaactcaattttagtgcctttttgttgcttcatttactttttatatcccattgttgctatctgccttaaagtgtaatataagatttcaatcattgttcatatacatatatgttcacgtatgatccagaaaataaatgttgtgagagccaaaaaaattagttaattaattttagtattatacactgaataatcctctgtacatttgatgttagcttagtaaaatacatccaaaatgaaaatgcatattattccatcgaagttcttgctatgatagaataatgagcatggtcatgtggaatgaaagagatgaaaggctaggcggatgtgagatgaattttgaatttgtctagaaaagaatgtatctccttggaaagatttgcattgtttgaacctggtcataaatgaggagtcttttgttttttgctttgtatcttgacaactaaacattaaaggctactaaggatgtaaaattattcacttgagatttgagataatggttgaggaaactgaacttggttgtgatttttcagcaacttgcttcac

SEQ ID NO: 27220 - DNA, 534 bp, Glycine max
  Intron number 3 from transcript Glyma20g35550.1 (locus Gly ma20g35550) derived from phytozome v7.0 (chr-ID Gm20; pos 43831802 to 43832335)
ggaagagcattttatttgttggaaggtatataacacactgttccctgcttggtaactctttcttactgatgttttaagatactatactagttgaaatgttgacaacaggaacccctgaaatgaaattagtttgattcattcattatattcgataagaaatagttctgatatgtttctttatccttgtcttacttttggtctaaatgtcatgtcatttggtattctcttaaaatgtaaaatacttgatgtaatccgtgtgcgtgtgtgtggcattgttaattataataaataatctaagttgttcgtttggacgtttttttaaagttatgttaggcatcaatctaataaatgctaacttaaaagtcactaatcatggtgtgttggttcattaatccaacaacatagtagaatgttcaactcaaagattcactgtgcacagtttctcaacaaagatttgatgttttttttttctttttctcttttatctcctataattcggattctctcaggcctggggttggcaaaactactgtt

SEQ ID NO: 27221 - DNA, 751 bp, Glycine max
  Intron number 2 from transcript Glyma19g30860.1 (locus Gly ma19g30860) derived from phytozome v7.0 (chr-ID Gm19; pos 38532875 to 38533625 reverse strand)
ggggaactgaggtgaagcttgataacaaagagtatgtatatgttttttcttgtgatattttttatttattagtttattttttaccctcgtagaattcttcaacttaaccctaaagtttaatatgtagatataaatgtttgaatggactagaattattcttgaggtcccgcatttttctaaatacattttcttgttacaaagttgatcccttcaggtctaaatgagtaaatgttattgacttattggagactgttttctttgtgaatcattaatacaaggtagacccttattgaagaaggagatgctgtgcttgatattgtttgtccattatttagaattgctttgtttgatgattaatttgaaccaggcagatgttgaaaagtacatatctttttctctatgttagaaaaagacaagaagtcacaatccaaaattaagaggatagggagtgtcttgattttttatctgttaacttgccattctcaaaccctctcaaattgtgggatttgagtgtggcaaagttaacagacgaaatatcgacatcaaggtttaagggatgctagttttggaaacattttattgatattaaactacttagccaccaattaatttctctccttttcttgtactatgtaaatgaattatattggacggatttagttggttcatcctagttgcaatagctgctatctatttctcaagtcttggctaattaaatgctttttgtgtaggtatcatctgtttagagacg

SEQ ID NO: 27222 - DNA, 569 bp, Glycine max
  Intron number 1 from transcript Glyma20g21200.2 (locus Gly ma20g21200) derived from phytozome v7.0 (chr-ID Gm20; pos 30313084 to 30313652)
tctgcggcggaagaggtgcaggaatcagctgatatgtacgttccccgattcgtctctttgattcacggttcctgttttggacccctttcagttgtttttcattggcttaatttaatcacaagattaggtaaattccttgttaaagtatgcatcttggggattgtgtcaattgttttggttctggtgttttgcttttcctattgtcgtgtctttcgttgttcctaatttctatttcttctttactcgaatagacttgtatgatcattgagcttcggttttaactttgagtcactcacttgttcaggagcaaaaaaacaaaaataagaaactatttttaaaaattttatagtttttttcctttggcgcttgcaaatggagtttttggtagttgaggggaataatagaaacaaaggaggaataagaagtaagagaatctaaaatatattttttcccttgtatcaaaatttggaactattactgagttagccttttatttgattttattgtgcatgtgaatgatatgcatgccccaacttatatctgggttcaaaatgaatgaagctatttgg

SEQ ID NO: 27223 - DNA, 363 bp, Glycine max
  Intron number 1 from transcript Glyma18g48890.1 (locus Gly ma18g48890) derived from phytozome v7.0 (chr-ID Gm18; pos 58303801 to 58304163)
aaacgttcccagcctcccaccgtgccacctcttcaggtcttcattcttcctgctttttgcaatttaatgtttcttttccactactttattagctttgaggctttctgttttgtaccgtttgcttacttcttaattcagacattcttgttcttagcatctgattaccatatttgtagttatgtcttgtttcttttctttttgatgtaatgattgtatagtattggtttagtgctaatttagctgcatgatcagagtttcacatggttaactaccagtttattctccgttgacacctgtgattgtagttaattaattgctacttaatgtgctattttttttacaattttaaatttaggtgtaaaa

SEQ ID NO: 27224 - DNA, 649 bp, Glycine max
  Intron number 2 from transcript Glyma18g01380.1 (locus Gly ma18g01380) derived from phytozome v7.0 (chr-ID Gm18; pos 722263 to 722911)
cccataattctgttgcgtcggtgcctctcgacaaggtgttatcgatttgcatctatatgctgcactgaatactgatctcatttatttactgaattattattacttacaaatacaaaacatcgtcgcatttgttaagaaacgtcgccattctctctttcactggagaaataatctttgagatattgaagcattttgctcgttatctaattttgcaattggatcaaggtgaagttgggtcaattttttttagtagaccaaccgttttagtccctgaaagtatataacacttgcattagtcctaaaactaaggaaattacaaataagtgtaatctgttgatcatgttagtccaaaattaaaaaaaaatgtgtatcaaaataacagttagtagttatgtttaaagacttacatgaaacaactggaaattctaggaacttatttggaattttcttaatttcaaggtctattgtgacagtggattatatttttaggcactaaatggtagtttacttcttttctttttttcaaatcatattttgatgtgttatatatttactttcgattgtgtttgattatttaacatgtattttctttctatgtactgtttttttaagatgattgtcttgtgttgacaataagggcaggttacat

SEQ ID NO: 27225 - DNA, 814 bp, Glycine max
  Intron number 2 from transcript Glyma18g04040.1 (locus Gly ma18g04040) derived from phytozome v7.0 (chr-ID Gm18; pos 2803502 to 2804315)
tggcaactgccttcaacggcaagctcaacatacttgtgagtctttttctttatttgtatgtttgtaaattggaatagtttgttttgaatttgttgtgcttaaagttgtttcgaattaaaaaaattatatatgagtttgtgaaaaagaaaaaagggaaagataggttatgttgccccaaaaaattttaaaaagtttaatttatatatactgtcagtataatttttttttacatggatatatcatataatcctattccataatatgaacttccaattatgtatgatgtactctatcatttttacttatgtgaaagatatgttatgttaccccaaaaatatttaaaaagtttaatttatatatactgtcagtatacttttttttacatggatatatcatataatcctattccataatatgaacttccaattatgtatgatgtactctgtcatttttacttgtgtgaaaatttagaaaagaaatctattaggcggttgtaaataaaagtggtttgtagactgtagtaatgttactgataagaagtgcatgttgaaacatgtcaaggctagagatttccttggattatagtattatctttagaagtgtcatattattatcatatactttaaaaatttaaagatacggatactatcttatagactgtatgataataatatgacacatttcaagataatacttttgaaatcaaggaaactatgctgtcaaaaagggtgtaagtgaatgtatggagcacttgatactttatttagtgtttactatgttaaatttcaaaatcttttggaggtcctataccctg

SEQ ID NO: 27226 - DNA, 958 bp, Glycine max
  Intron number 1 from transcript Glyma17g37910.1 (locus Gly ma17g37910) derived from phytozome v7.0 (chr-ID Gm17; pos 41646562 to 41647519)
tttagcaacggaaaggttccatctgactttataggtacgtacatgtgctatctatatatattaagttattttcatatacgaatttttttttattaaatattagaaacaaaaatattattaaaagttacaataatttatatatctcttctttttgcccttccttcccatatatatgtttggaaaatatatagttttgtgagctaaaacatgcatatatacgtgcaaatgtcgaatacaatcattaatagttactactataaagggaatcaaagtgatatgtttgggctcttcaaatagatagttccacatatataaaatgcgacctaaatgttgagttcaggtaatactttgatacaaattaattactattactattaagctagctttcagtattaattaattttgatgaaaataacttatgtacatatcatttatttttttacattttcatcaatttccagtattatctaattgattgattatataaaatttcctatactaataatatatagaaattaattaaactgttattcatttgttatttgtgtgtatgtactactgatataatttacggggcctagtagtcaaaagccaaaacaactgatgtgactttttttgagtgacaatgtgatttaatttgtttggagacaactaaggactaagaaggtcttaaagaataatgttaaaaaaaatatttaatacagttttaattatttttaatcattttaaaaagtaaatagtagatagtatagtaattaacttttatgtttctacgtatacaataaatattttttattttagttttttaaagagtggaccttaattgaagtttattttttccttgctgaatgaagtcagtgatattaaatgacggtgggtattggctttaaattaaatactgtatcttagttagtattattttgtgttgtatcagctgaagaattgggcattaaagagt

SEQ ID NO: 27227 - DNA, 579 bp, Glycine max
  Intron number 1 from transcript Glyma20g26990.1 (locus Gly ma20g26990) derived from phytozome v7.0 (chr-ID Gm20; pos 36277261 to 36277839)
caggtagaataacataaattatgatattcttttctaagtaaatcacttactactcctgtttcttagtcctatagtaatgtagttacataagaatttcctttttcggcagaatttatggcatgtgtttgattttgtgtggttcttcttatcatgatttgataattttgatttaatgatttcataggtacgaaagagcaagaaaaatgttaaatctatgaagaaaccaaaatctgattctataagtaactctgaggagggtagaagtcctgatcttcagggtttctgctcagaggatgatgactccaatgcttctcaggagctaaatggaggaggatcttcaagtttgagcctcgaggattctacatctcttaagttaaaggggaaaaaatcaacagctaatagaggttctgctactgatccacagagtgtatatgcaagggtatgtcctttgccaagtgcattttatcaaactaatccttgccaataattttatgattaccttgtactgtgaagtgtggaaggattagatctcaagaggtttttccttttgtacaatgcagagaagaagagaaagaataa

SEQ ID NO: 27228 - DNA, 989 bp, Glycine max
  Intron number 1 from transcript Glyma19g27800.1 (locus Gly ma19g27800) derived from phytozome v7.0 (chr-ID Gm19; pos 35160960 to 35161948)
acactggccaatcttattggtactgctttttgtttgaaccttttttttgctccaatttggcacctgaaattggtctctttgttgttgatgttgttttggtagttatgaaaacatgtttggggagtgttttcactctgttgtgctgtgattgtgttgtgattgctcttggaattgaggagtatggttggggggtgggggtggaaattagtgttgttttcccccttttagaaacaaatttgggatgaaattcactgatatttctggaccctttatgtaatttagtttttgagtgctgttatggagttcagatttgtatatattttttagtttaaatcatggttatcaaattctcgagttatttattgagaacagtactttaactcttaaactcttacgattttagagtttacacagacaaaacaagttaactctctagtaaacttgcataaactctggagttaggtagcaagtttgaaatcaactataattctttcccgcctgccccccatagaaccgtcaacgacaatgctttaccatgactcgaacactttgaagaaataaatttttttttcaaaaaatgttatcactttaataacttaagtttttatgattttatatccaatttggtcatctatgtattttgatattatatattaataatgtattgttacactttattattgttttgttatttggctttattatgccgttcaaatgttaaattgttgttgtggtaagagtattttgttaagtctatatgtcattaataggtttttcaatattatttttctactatgtaaactctacgagtcgagtttatggaaactttatgagtttaagtaaactctcgagtttgacaaccttggtttagatgacgaaatttggctaatttttgttccttccttcaatgttgttatattttttgtggtatgagattttgggtattatatgcagaacatagttctgaccgagctgagttcttgaagctc

SEQ ID NO: 27229 - DNA, 755 bp, Glycine max
  Intron number 1 from transcript Glyma18g47810.1 (locus Gly ma18g47810) derived from phytozome v7.0 (chr-ID Gm18; pos 57376443 to 57377197)
gttgtttgggaggttaaatcctttttctcactttgaatttctatttttggccaatttaccctctttatgtagtctttgttttgctacattttgccaattttgttaacaattcagatctttttctatcttaatattaaaggttgatttgattgatttccctcagcttggattttgtaccttgcatatctgcacatggggtgctgatgtttttacatacatacactacttttttctaggtcttatgttgatccttgaattccatttcctgcttcatgctgatttggttgtgacgtgtctcgattgattgatcaagcggtgtgttcacgtggtttctttgcatatacggttttgtgcatggttgtggttgttgctgatccttatttcactacatctttggctatatatgacttgtttttggttttgattgtgatatttgtgcattaaggatctaattttttgttttgctgggatcacacttgatgaaaggtgatggacgattcaagtcctgaaagatcttagttgtgcttccccatcacaaaatagagagtcacatgaatattgatctgaagcccatcaaacttatctgaaaatttgtatcttcaccttttttttttatttgctctttgctattctcttgattttccacctttattttatttattatgaatgtggaaggatcttttgccacctttaattgcttctgcttaccatatattgcagaacttttgttctagacaagatactattttctgtgg

SEQ ID NO: 27230 - DNA, 756 bp, Glycine max
  Intron number 1 from transcript Glyma18g49950.1 (locus Gly ma18g49950) derived from phytozome v7.0 (chr-ID Gm18; pos 59239758 to 59240513 reverse strand)
aattccgtgacttccacaatcaccactcggatcagtatgcacaccagtctcagaaaacccacaagaacaaaaatcagatttttccaagtctgtttttttttttttttttttatccaatcctttcttgccttttaggcgacccagttgaaaattttgagatttttttattgtttgatgtgtaccgattttaagattggatctcttttgatttagctgtttgagatttctttcttctttctctctctctctctcttttttggttggtgactgtgttgaattatcttatgatgtttccaatccttgtttgttttgtaggtgacccagtttaaaatttgagatttttttcttgtttgatttgtacccatttgaagattggatctcttttgatttggctgtttgagatttctttcttcttctttttttctttgttggctggtgacagtgtgttgaattatcttatgatgtttccttttaagcacttgttgttggatttcaatcatttcactccatttattgatatatttgttttttatttttgcatatttttttgaatatgtatccagttcagttattctcaatttcctctgttcatatttttattacaacagtttctataagaacttttcaaacctctccaaacttttcatgatttatctagtttttcatgccagattctgcatgtaattatgtgggactctaactcaatcttttcctttgtgcctgatttttacagaactcttgagtgatagactttga

SEQ ID NO: 27231 - DNA, 601 bp, Glycine max
  Intron number 1 from transcript Glyma20g38980.1 (locus Gly ma20g38980) derived from phytozome v7.0 (chr-ID Gm20; pos 46467369 to 46467969)
atacagagactatcaccatcgtcctgctcatttggtatgaattcatttcactgctatttcttcttctctcgtgttttgtagttctaccacgtttcctgtccctgcttcaatcaattggatttgtaacctgttttcttttataagtcgacaataacaaattaaacatatctaattctgcaattccattttgttgatttattatgtttttcaacgacacagtttttatgtgatcaaggtgatgggaaaaatgtagggcgggaatgtcgcaagtctttttctatcagcgtatcttgggcatggagtttttcatgcattgcgtgtcatcaatgaccgttatgattggattctctgaaattcacgcctttagcatccggatttatttgtcattaatcgttaatttttatgaagtaattgtgttcaaaatcaaatagctggcgatgagctcgtatttattactttttaatgctgaaagtggacctgtattctggcggagatgtgttaaaaatatacctgttttaagagtttctaaattatcttgtttttcacgaataataacatcacattttggatattaatgcttcttgtgctgatatgtaggcac

SEQ ID NO: 27232 - DNA, 717 bp, Glycine max
  Intron number 2 from transcript Glyma20g38980.1 (locus Gly ma20g38980) derived from phytozome v7.0 (chr-ID Gm20; pos 46468141 to 46468857)
gaggtgagtttcttaatttaatccattctgttgttttgcccagatattgtttactacttgagaaagaagtaaaagtaaattacaaaggatacaaaaaaaaaacagttaattttaaggcttcgaattttccttttcaggaatgtcttcagtttatttctctaagccagccacttgaacattttgcctccattttattttttattcatattttcattgctatattttcatgttgatgttaaatccttcttcctcgaccattccacaaaaagtttcttctggtttgacctctgttctgtcacacatcagaaattgttttttttttccccttatccctttatttaaattttttacttctttactaatttactatgttcttagtgctcctaaattgtgtgtgtaaattgtgattattatttatcataaatttctttgattttaagcatttatatgtgtagtatacattatttagtttgtattattatatttaaaatagtggtaatcctactatggtgttttcagagccagctgctatgcaccaatattcaagatttataattatggctctatttagatgcttcaacaatcttgacttaacaattttactgctcatggttcaccatataagatcactggctcctttcctggtaaagattactcatgtttcaattattatttgctttaggcaaccaaaaaggctcaaaggtgtcagctcctgtc

SEQ ID NO: 27233 - DNA, 767 bp, Glycine max
  Intron number 2 from transcript Glyma17g07140.1 (locus Gly ma17g07140) derived from phytozome v7.0 (chr-ID Gm17; pos 5205424 to 5206190 reverse strand)
agcaccgttttctgagattgggaaaagggcaaaaggtaaatttgcatttggaatcataatatattatgtcattgctccaagatgcttttcatatgtacttgaacacatcaatggttatcaactgttatagacacatgaacaacatcctgttgctggtttctgggtaataggttctcttatagcatagaaatgacaaataacatgttgatttgtgtatcacaattgattacttgttcacccctcacttgtgtatacatcagatatgtaggacatgatatggtaaacatccacaactgtaatggccttcatgcctagcattcttcttcaataatttgatttttcagatctctatgttctgttgcacaactaattttgttatcactgtccacttttgatttacttatccgttgatacttctaacctaatccaaatatcatgagaagttcaatatagattctcattttacaagatcattgactttctcaatgcatcaccagcattgtacaccaagcctctgaaagcatgatctgttgtatacttgtatgaagattatgttagctaacaatttatcttttaaattttccttctttcgaaaccctttctgatcgttacatggcctctatggctgaaaatctagattgttggcttctctatatttcatatcaagtcacatctaaattttgtaaaatatacccgaggcattaagttgtgaataatcttgttcctatgcagaccttttatacaaggattacaacttcgatcacaag

SEQ ID NO: 27234 - DNA, 1026 bp, Glycine max
  Intron number 1 from transcript Glyma17g07140.1 (locus Gly ma17g07140) derived from phytozome v7.0 (chr-ID Gm17; pos 5206205 to 5207230 reverse strand)
tctctacgctttacccattcattcattcattctcagtaagtcccctttactccttctatcatcattggtaagtcccctttgcttttgattgcgatcgtttgtgcccgtgagagtttttttttctttctcatttggatattttgtcgagcacctggtgcatgtaaaatcaaaaggtgcgatgcgatgcgatgcacagtagtagtttaataatgtagtgtctcttagagaactactggagtgtattgagaagctggttaatcttctttttcttctctagtttgacttgcgcgtgaaaataacgcatcttttcagctcaaattcacaactccccagttttctatctcaagttcctctgaacctatactaatcgtgtttgctaatgtgaacatcaaagattgctttttcaaattgattacattaattggccacaatttttgcaaattaacttagtcagcttgaaatcatcatattgaaaaaaataccccttggttgcactgaaggattgtggtgtcttgttttgaaaatagtaatggtcagggttggggtagcttgaaggaacataaatgcttttcctgttgggtagagtacaaagtaaaattcctatgcattaacgtcactaataaattccagaggctttaactttattgtcctattgagtcactgggtgttgctcagaagagtctgaacattatcttttcgcgtatcaatttaccatttatatttatgtgttacacatgtattgacatcattacatgcatacagtagtgcagtatttgtgtaaaaactcattgtcctacctctcttcatcctgtgacgttctggttactaatcatttgctacataggaaatattgcatttgcacatatgcacacaagcgcatggtactgttatgtttggtattgtacctggtttttgtcctgtttttttatttatcggtattatttcctgaaatagtgaaattgacaattaaagtataaaacaataattgtgtttcgcagggttcggggcatttcattctgattcact

SEQ ID NO: 27235 - DNA, 374 bp, Glycine max
  Intron number 1 from transcript Glyma17g36500.1 (locus Gly ma17g36500) derived from phytozome v7.0 (chr-ID Gm17; pos 40431008 to 40431381)
aaagtaaattcattaataaagttcatgtttgatgattaagttaaatccgtcgctaaaatttaatgacgccagaattagtaaggaaaaatcatcactaaatttggttgctaatccattgattcttagtggtgataaaagaaaaatcgtttttttcttctcttttctgtaactattttgaaaaaacttttgatggttgaacatggtctaatattacatgctaatggtgctatgtatgagtagtttgatggtttctttattattgtatgcaaaagctagatgcttttgagataaaagcataacatttaggttacgtctaatcttgagtttgtcttgtcacacttgcaggagcaactccgaagtctgtgttagagtta

SEQ ID NO: 27236 - DNA, 606 bp, Glycine max
  Intron number 1 from transcript Glyma18g47540.1 (locus Gly ma18g47540) derived from phytozome v7.0 (chr-ID Gm18; pos 57166617 to 57167222)
ttagtgttaacggagttcagaacattatagcaagggtgagaacacagcagaagcaatgacagacacaggggagaacacactaagcaagaaggcaacaacaacaggggtgcaattagaaagcaggaacaaaagagcaattacaaggcccacataccttaaagatttcgtgtgatgcaagctggggcaccaaatcggatagagtgatgctggtagtatagcagggagacaagcacaacaaattcctgatattctctgtacacaaaaggacaaattctgttagtgagaaaatcagtataaataatactatgtaataattcagcatcatcaatgaaatatcagcttttctctctacttaccttttcccttggaggtccctggttcctcgaaaaacagtgctcacaattcttctatcaatttgtcatttggaatgttgatgttgtaaagaaagttgtagaaactaatttgatttttgataatcaggaatcaggataagccagataaggaagaaaaaagtaatatggtcataatgctgcttcacaaaagtttcatcataattttgacttttggtctattatttttctccaggttccgtgctttttcttgtgg

SEQ ID NO: 27237 - DNA, 728 bp, Glycine max
  Intron number 1 from transcript Glyma17g09610.1 (locus Gly ma17g09610) derived from phytozome v7.0 (chr-ID Gm17; pos 7118732 to 7119459 reverse strand)
gaggaagcattttctacttttacactcagtgagttttcattcccttttgaatttccttatgtcaaaatttgaatgctgttgaaatgagtattatatggatagggtctctctgcatatctatgactacagtccagttactataaagttctcaataaacacttaccagaaaaaaagaagaaaattagaagttaaaataaatcaaacttgtaaattaaaattaatttatgcatcttaacttttttctattgtgccagagaagtttgattccaaactaggccaatgcgtgagtatagttctgttttaacttttaagagtcatcccgccttgttggtatggaacatgaaataagtctggctggaacacgaatttgaaagcttattaaactttaaacagagttaattattttcaaaccaaaacgaagctagtagttttgccagatgaagggattgtagcagtgcaatcagtcctcttctcttggaaataatgaagcttttataaacccttttgtgatcattgttttgtgtgtgtctaagataacaagtgttttttttttttttttttaccttatttaaaaagccaattgaagctgctaccgtttaaaaaaaaaaaaaaagcgtatttcgcctcttattgtattgattaagctatcagacaaggatatcttttttggcatttgattattgtttgaaacaggtggacttttgctgcagtcaccatttattttgggg

SEQ ID NO: 27238 - DNA, 945 bp, Glycine max
  Intron number 1 from transcript Glyma18g39960.1 (locus Gly ma18g39960) derived from phytozome v7.0 (chr-ID Gm18; pos 48318084 to 48319028 reverse strand)
atccacaccctttcccacaccctttcattgttctggtaagccaataccttcaattgttcttatacatattttcttagaacattaaagttttctgtttcattcttcactcattgcccataacccttcaaaaaccatggcttcttaatgattctgcaaaacacccatctttaccatgagtgcatgtataagattttgctttttgaattctgaaaattcattaagcaatgaacaaatgttcagaattgagaaccgtacctctgtttttttagaacacccccccatatatttggtgataataatatatagacacgtgtccactttttttccttttattccgaggcttaaaatatatgtgttgttattaagtcttgtggtttggtttgtatattccgttgaatccagaaagtttgataaatgagtgattgtgtgactccaaaagtttatgcactttggaaaggaattttctgtttcataaactctgttcaaaggattataataatgggtttttggctttgagccattacatgattgctctcctttcttgggagtccatttttttccttagtttataattataataattgaagcttttgatttgaaccctttcatgtttcaataaattctgtgcccccaaaggggtactgctgagccattttttaaatctatttacttgtttgtggattgtccactcagaatctgagcaaagctttatctccgatggatttgatcaccactttgattgtctttctttatgatgctttagcttctttcagtgctaatccgagttaacacgaccaattttttaaattagaaaaatggaaaaccatttacatttgttggttgagaatcacaatgaattcccatataaatattgattggttcatgtggtcatgcaacatattgctgacttcctttggttgtgtctgttaaggttttctgcctgaa

SEQ ID NO: 27239 - DNA, 226 bp, Glycine max
  Intron number 2 from transcript Glyma20g30960.1 (locus Gly ma20g30960) derived from phytozome v7.0 (chr-ID Gm20; pos 39620877 to 39621102 reverse strand)
ataccggagcttgcttggtggaataaggctttgttgttatttgccaaaccacactcctgaacaataatgctgatggaaaagaaaacagaacaagaaaataatttataaaatatcatgttagttttgttgtcttgagtggagcttttgactgttttttgtagaattgttctctggtattgatgcttgcttaactgattagttgtattttgtttctgtaggctggtta

SEQ ID NO: 27240 - DNA, 343 bp, Glycine max
  Intron number 2 from transcript Glyma17g35650.1 (locus Gly ma17g35650) derived from phytozome v7.0 (chr-ID Gm17; pos 39633624 to 39633966 reverse strand)
ccttctccggagccgaagaatttgctaggcaacaggtttacaattgtgattctaattccaacctggttttttactttcttctaaatggcgtaaaccaaaacaaactttgattttgcctttcttctcattcgccaacgaggcgaatgctacaatggttggaacttggaaatatggatatcttaatgacaatggtattaaacaattaaaagtaatggcattattcgtgaacgtgtgcaaatctatgaatttaatagtagcattttaatccctagcaagtagtaaattatagcggttggattgttttccagggtgtggaggttgtggacaacgagtactttatcac

SEQ ID NO: 27241 - DNA, 727 bp, Glycine max
  Intron number 1 from transcript Glyma20g35220.1 (locus Gly ma20g35220) derived from phytozome v7.0 (chr-ID Gm20; pos 43479081 to 43479807)
tcaagcaacaaaagtagtgtttaaccatctgtgtaagtgtagctggtgtagatttaaccttctgttttaaatgttttagccaattttgaacctatcatatatttgatgccatttaatgttttgggtctccaaaagttgaagaagcaagtaggctttttctattgataatttagaggaggtttagggctgagcctcaaaactgaacatattggtatgttcactaactgacaatttcttgagatgttttctcatccttactatttttgttcatttgttctgtgtttctgtttgatattatgttatgtaaaaaatgaagagtgcatgattgtcagagaattctaaaaaataatgcattgattctttaaatgccatgacacattaaaaatcattatatagcaggtggcacaaagtattcatttaaatccgtatgtttgtttgttgactgttgagacacaaatgcatgtacactatgatgctttacttgtttcaagcattctagctctactacttttcttttgtttctcaaatcaattatttagtttatagatggctgctttaaccagttgagacatgagaattaagtggcactaataggattgctttataatgaacaaaataacttccacatatatttcttcacagttcaatgttagttagctgatccatatttcttaccctaattattctaccagatccggtttcacttgtccgtgatcacaacatcaaa

SEQ ID NO: 27242 - DNA, 693 bp, Glycine max
  Intron number 1 from transcript Glyma17g10810.1 (locus Gly ma17g10810) derived from phytozome v7.0 (chr-ID Gm17; pos 8120508 to 8121200)
acgtctctacgaacgacaaatccccccctttgaaggtgagagtaactagcccctctaacttttagtggcttgtgttctccaaattattttctttgtttctttaaattgttgtactaaattcatggatgtgtggaaggttattcattggacatgtgggctaagtggaatgattgtgtattggttccttttctttttatcggcaaatgttacttgttagtttgggggattcaaatccacgacctcccccctcccctttttccttcaccaccaagccagccttatatctcctttgtattggttggttgttatactttattttctccgatcaatttaacactgatcaatttaacaccccctttctctcttttaaaggataaagcaagaaaccggactgataggtaaaactttgaatgttgtttaggtttagtgttttgctaggatttaagaaagaagactacagtttatcagaaattcagatgtccattatgttgttgattaatgtaataaacattctattggttttaattcgttggcttataaaaacagttgtcctttcatttgattattaacagttgaaatttggagcctgtttgattgtgagagaaaattttgcagacttgtgttagaatttgttatcatttcttgcctcacacctaatggttttttattttcccatcagactagcaattggca

SEQ ID NO: 27243 - DNA, 438 bp, Glycine max
  Intron number 1 from transcript Glyma19g44640.1 (locus Gly ma19g44640) derived from phytozome v7.0 (chr-ID Gm19; pos 50003880 to 50004317 reverse strand)
attcaggtcggatatatacagctgcctatacaattaattatatatatataccctatgcacccattttggtcgtaaccaaagatctatctatctaataagatagatattttatgaaaatcttccacattagttttatttgactttgacttgttttttgtccaagtaattactgtttagtatttccccgattatattgtgattgaacaattgataaatctatgctagctaattgatacttgtaaaatcgtcgatctatatatcataattaacattataattaaaatcaagtcccctctctttttgggcaaaaacatgtataattacaaaaaacttaacaccaattttgtgtcgcttcttctcacacatgaaagttgaaacatgatgaaatgaaaggaacaacgtttaattcacacgtgttttgtttgttattcgatcaag

SEQ ID NO: 27244 - DNA, 998 bp, Glycine max
  Intron number 1 from transcript Glyma19g05170.1 (locus Gly ma19g05170) derived from phytozome v7.0 (chr-ID Gm19; pos 5481738 to 5482735 reverse strand)
gttctcttagtcaaagtgtaagactcttcttttcaattacttctgtgtttctttttcggtttgttttttatatgaatagtgttttccctttttctctttctttttcttttcccagactctttggatcattcatccattggattatactttatcagattttgattttgccttgacacctttgctaactcttccttccaattggcagtttctttcctttctccgttcatatgaaactagggttttaaattatactcatgatcaataatttggttgcaatttttgatattgtagtacaattgctattgttgttgtgaaaagttaaaaaaatcttaatgttgtaaccgaaatctcaatcacatactgtttgtaaaatccttggttgaaatcaaagtgggtttcccaagtagcttcttttactagaaacgctagcaaagtcaactactctagttcaattgccatatatgtgactaatttgattcattccacaactcttcatatttctttgactacccttttaccgttcactttgcggtcttgagagacttttatttattttcttttttgtcgtatataagatcagctttgcctttatggtgtcttttatttgctagttatagttgtgattcctcttaaactttgtttcctcatttcatcaactgtatattaatttcccataatttttcagcttcaattaaaaaaattgagcctaagtgcctgatttattaaagccacaaaatgggtggtttaattttttcgacacctttcttttatatttcttttactcttcttctcttttctttttctattacatcatctataatatatcttcacctttttcttcttactttggggacaaacatttttgtttcacaaagctggttagctactagtttattgcttagaaaatttatagccttacctgtgatctctcaaacttcatacacgattttgtgttaatcttttatatttcatttttaatttaggtttcggtttcatca

SEQ ID NO: 27245 - DNA, 575 bp, Glycine max
  Intron number 1 from transcript Glyma17g31920.2 (locus Gly ma17g31920) derived from phytozome v7.0 (chr-ID Gm17; pos 35111902 to 35112476)
taaattcaggtaattgaatattcaattgatagaaaaaaaaccaagacaagaatattggttttaacttgatggctatatttaagttttagatcatttttccagaatctttgattcactttacaaataatcgtgaatttgtgctgcataattttcttttgtagacatcgactgtaaacaaataaacaaagtataaacctgtgaacagaggaaaaaaaatatttatgaggaagttcaaatctgcaattgctgttgatctaagaaatcctccaacgcaaatatcaaatgatataaagataattaacaagaaaacatgcctagaaagtagggtattgtgtctctctgttttatttgccttttaaagtattgtttaggtataatgataagaactataaactgagtaattcattcttgctaggttgtgttatttaacttgagttatagtttggtacctgcaactctgctttattatcaacatcatcttttaattcaatctggtagagtgaatattattaatagttggttttaatcatacttatgtcttaacctgctttacaacagaacataggttgtcttgg

SEQ ID NO: 27246 - DNA, 820 bp, Glycine max
  Intron number 2 from transcript Glyma17g31920.2 (locus Gly ma17g31920) derived from phytozome v7.0 (chr-ID Gm17; pos 35112690 to 35113509)
cagtcaaagtggtgctcctgaatttgtcaaccgcaagtttgctgttatgtgttcattatctgttgattctctggtgtggaaacgatcttgcttaattgttgatagagctattcaggacttataggttatatgtgctttgctaagagtaagatgttttaatattgagaaatgctagtaacactctaaaaatttgttggaaatacaaaattttggaagtcttacttcttagttaatgaacctcactcgtgattttataatttttaataaattttagccaatagcagagactgtgttagaaggaatatattagagaatgtaccactagcattcctctttaatattttcatgcaatgtttgaatcaaactccttgaacctcaaggaacagttacaacttaacttccttggaatagtttgattgccatcttcttatgctcattttgaaatgcagcttcactttacatttttcttttttcctttcatgctcttattgaagagggaggacaaaatatccctctctgctagggcgcagcattgctggagggtccatgcatgaaaaataaattgatacacacagtaactgaatgtcttcttgtattgtacctttctctatttttttttattttttatgttttgtaaactgtaatttctttattcttgatgtagtattggagtcaatttagttatgtgtaattactgtttctgaaacttaaaactagaaactagttttcaggattttatttgatctgtatacacaattctttgtgacagaaaatttgatctatatgcagggcttcttctttggaaccagataaggcaaca

SEQ ID NO: 27247 - DNA, 1028 bp, Glycine max
  Intron number 3 from transcript Glyma18g45240.1 (locus Gly ma18g45240) derived from phytozome v7.0 (chr-ID Gm18; pos 55002757 to 55003784 reverse strand)
ggcatcaaattacaagtatttcctccttttcttggtatggacaccttagctcaaaaagttcttatttcaactgattagtgatcactcatgtgacttgaatggttttcataacatcttccatgttccaatttgcttaccataccttagcatgtgtgtaaatggtttgttctttgttcatatcttcattggatccataatattgaatggggttatctgctcttctgcaatcttaatttagtttttccttttaactacttaaataacaaaatgttaacatcctttactgctggctctctttgttgtgaccaaagaaccttttatcggtaataacttgaccacttgatctttacagtctacacttcacatctaaggcctggtttgaggccattatttatcccctgcagattccttaggagttgcaagactatgtgtttcatttcatcaccatcatcacctctttaacttgaaaattttcaacatcatcaggtggccgttccttatccaagcctttcatgtgcttcatctttacaaacattcaaatttctgttaactttatcatcttcagcttgttttggaggtgttcatttttcatcctcctgcttttcaacttcttcatattcacacaagtcagatatctagcaacttaattgtcaccatcttgcttgttgttgcctgttggagccttctactatttgaaaactagattttcttagtgtgacttttaaatcatttgattggagcctccaagtttctaatcttgctacttgattaagagcatgtttgggtaaacaacttaatttaatgcttattgaatagtttcttagtgttctgttatatgattagtaaaaacacgtaacatataattaacttgtgatattcttcctgttaccattagtctaaacatgaaaggttgtgcatttgttgtgttatttgtagctgccatatcagaatacagtaattatataatattattatgttaaatcttattgcagttctacactctccttgagaccactattgtgactata

SEQ ID NO: 27248 - DNA, 985 bp, Glycine max
  Intron number 1 from transcript Glyma18g49830.1 (locus Gly ma18g49830) derived from phytozome v7.0 (chr-ID Gm18; pos 59151854 to 59152838 reverse strand)
gtttcttaactcccctggcttcttttcccctcaggtgattaatttgaccaataatagcacttttagaacataaaagaacaaattttgtgtattaatttcaaaaggggtgtggtgatttttgtgaagatgtgattttttcgaaagagggggacgggatcggttgatgaggatgtgggattgaagtttcgtgattttggggtttaccagtgtttttttttaatctgatagtagcatggtactctcaacaattcagatttgatctgaattttagtacaactgtaaggtgacatgtgttatgtgtttaatggactgattcagtagtgcctaaggatttatgggttttggaatcacctatgcgcagacaaggagttgatctttagagtttagtgcattcaatatgtgaattaatgaagtcttttgctattattggagggattaatggagtcataggaataggatttttagatcacactaacaaaagttttggaggtatcatgtgtcgtggtaaaatgatttttggttgcattaccttgattctctttgatgataattttgatagggtgttttggcaacaacagaaaattgagacggaatttgcggctgaaatacaatctgtgctagtcacttagtgaaaacaaatgagatgttttcaaagtctatgttgactatggagctgaatgattggatttatttgtcttctaagaacgaatgtttgtacctttgcgttctcctcattcattacttgactgtgtgctaaatttcataaatgttactgaagatctgtctttcccttgtaaaaaaattgtttctttttccgggaaattatgcagggtttgtatcatattacatcatttgttggttgtgctgctggggtttttttctcgttattactatcaatgtgatctttttgccttggggatggtggatatacttgtttgaggttttcactatctcttcaattcaatgtatacagagcccctttggg

SEQ ID NO: 27249 - DNA, 828 bp, Glycine max
  Intron number 1 from transcript Glyma19g43810.1 (locus Gly ma19g43810) derived from phytozome v7.0 (chr-ID Gm19; pos 49380219 to 49381046)
tttccttttcttctcccagtctttctctcttattggttttcattatcagatgcaattttattctgtgaaattgacattgatgttttttttattctgcaaatgataaaaaagaaaatcattttttcttttagaaagcattaaatgtcacgcgattacattgttaagaaaataatttttgtagaaccaaatgataaaaaaaattatgtgatgagattttctattgcttttaatgtggttgttttgtttgttttctttctgcaagttgcgttttctactctctttttttgttgcaaaatgagttgtaagttatgtgtttgttgaaatacctaaatgaaattttagtttgtaatcttaaaaatgcaaaatgagttgtaagttatgtgtttgttgaaatacctaaatgaaattttagtttgtaatcttaaaaatccatgtgtgtgctggttttgggatgcctctctgttcatcatgatttctgatttattttatttatcacttattttctatgttgatatgtgtggtgtgtgttctgtgcaagcaaactctctctaatttacataaattattattatgagttaatttttttaatagtatgcctatttgcagcactgaaaacaggtaacccaacaacatctaagataagaaagtattcttttcttaataggttctcaccatcatcaaggaagttaactgtcagagaattaaaggtaaaacatttcatcggtacatcttaaaactatttttgttctttgatattcgatatggttgattttagtaattttttattatacagctaaagtgataactgatagagcctctggaagatcg

SEQ ID NO: 27250 - DNA, 730 bp, Glycine max
  Intron number 1 from transcript Glyma20g26750.1 (locus Gly ma20g26750) derived from phytozome v7.0 (chr-ID Gm20; pos 36104740 to 36105469)
ccttgcctcatctcagcatcaaagacactcccattgtaagctctcacccatttttcccttttctcaaacatcctttggtcttttgctgtttcttacagtgaaatttaactactctctgtctcttctttggatgtatgtgctttggatttttgctcattttcttcctcctatcttaatgtgcttctcttgagcaactcagattatggcttttctggtaacttatgtcatgtttttatgctgcttgtcgtgttttgatcccgtgccagattcactctgcgatttctagttttatctcttgttctcggtgtttcgctccaagggttgttaacttggtgagagactcggcgagtcacgtgccttctttcaattatttcacttcaagggtgccctactgagaactacaaaatttacaaagaaaataataaaaaaaaaagttatttgaatagggaccaaccaaaaccctgaaaacccggttctatgtgctatgagataattttagcttcctaactcaaataatgttcttaaattgatgctttgcattcaaccctttcgttgtaaagggggaccaacggaccatcttcttaatgaagaataaaaaaatgccgtttattctgaacggtgaaattcagttgataagctattattattaaccttttttttgtttttgtatgttttgttcatggatgcccttgcaggagacttcatccgctcagtacatattgcagcagta

SEQ ID NO: 27251 - DNA, 737 bp, Glycine max
  Intron number 1 from transcript Glyma19g28800.1 (locus Gly ma19g28800) derived from phytozome v7.0 (chr-ID Gm19; pos 36394696 to 36395432 reverse strand)
tgctagagaactggctaaccctgatctattaagcagtaatacagcaaactctgacacttctgataacatcattaactaatttcatttttgtctttctttgatttttgctatcctgcttaggaagtcaatagagtggaagaagcatgtattgtacatgacattttcagtcccccatttttagtctgtttggtgaacgtgaaaaatttgaggagtggcaggttggttatgcatagattatacccaccaactcttagaaaaatgttggcattggccactagtcaattgtcaaaagtaagatcagattaaaattaagggtggttcgaaaagtttatagttagaaattattgaggtgagataagtgacacgagaatgggaaggagtattgaagtaatggtattatagttcaaccatgtaaacttaatgagtttcaattttatcagaaaccttttttctttagatgacatgctatagtgtaggtgaaggatgaagtgaagaattttaacttaaacactcttcttaagtttaatactaatggtgccaattttgtcaaaaatactagtcaatttgaaaggctttctacttttcattagtccactgatgcaaatgtgggttgattgaacatcaagtgtatccttgaaactttgaataattttctgttagatatagtttgaaatgcaaatgcggtgtaaatatcttgttgacctatcttcaaattgcagaactaagcagaaaaccag

SEQ ID NO: 27252 - DNA, 752 bp, Glycine max
  Intron number 2 from transcript Glyma19g33990.1 (locus Gly ma19g33990) derived from phytozome v7.0 (chr-ID Gm19; pos 41607977 to 41608728)
agctacacgattgcaaagttcgcgtcctggttaaggtatgttttcatgaaagtatcaattttcaatgtactatgtttcaagttcttattcccaaacctattttgcattgtgcattgtgcatccattggagcttttgttaactatgacaatctcttgttaattgagagaattttccttttattaattttattcattacaagatacatgtttccctcaatatgtagtgttcaatttctgcattttactttagttgtactcaactttagtttttatttatttttgttgtctttgcactttttacacccaaagattatcttgagttcaagttagaggcattatggtgaacttttgctgcttgtaacttacctgttatcatggagtgtagagtatgtgcggatgttttataataatacaattatttatgagcttaaatccatttactgcatttcgattatcaaaaactggtgggaaaatttaatttttgaataacaattttgcaatattacatgctacataatacatatcggtgatcattttgatgctttcagggaaaagtgagggcagcttatcttaatgttcttttgatgagtgatttgaagactaccattttgtttttgaagttcagttgattaattttaaactagatggcattctcctaattttcctatttattattgaagtaaaagaaaagccccatgttctcagagttattaattccaaacttcatgtgcagggatttaggaaactgaaat

SEQ ID NO: 27253 - DNA, 450 bp, Glycine max
  Intron number 2 from transcript Glyma20g03250.1 (locus Gly ma20g03250) derived from phytozome v7.0 (chr-ID Gm20; pos 2950411 to 2950860 reverse strand)
tggctaataaggtttcttcatattacaattttcttctcttgttagaaactatgaagtgatataatttttgtttatcagttaggactaatgcttctgtgtccatttcacaaaattgttatctgtatcttgaggatttcagctcttattactcactgtatctttaataactactaataacccttgctttctcaagtcaataaaaatagtttcatatttgattcccaagatcattaaaagattttctttttaagaacattgttaagaaataatcaatcaagtttggaagtaaaaagcatttatcttttgtggaaacaaactcctaaaggactaagaaaaactgcagaagaaccacataacccttcaggaatgacagttttatggacatactgtcgataatttaatgaagcctatttaaatgctaattcatgtgctatcctccacaggagccgg

SEQ ID NO: 27254 - DNA, 384 bp, Glycine max
  Intron number 1 from transcript Glyma20g04470.1 (locus Gly ma20g04470) derived from phytozome v7.0 (chr-ID Gm20; pos 4611656 to 4612039 reverse strand)
ttcccacattcgtgtaagtggtcattctttaggttaaattaattttttagttgtttagttttttttagattaaatttggttctctagttttttttgggtttaatttggttatttaatttttaaaattagactattctaaaattagatgatcacaatgaatctaaaaaagcctaaaggatcaaattaaacaaaaaaaaaataaaataaaagactaaattgaacctaaataatagatttaaggacaaaaaattaatttaaccttctttttgttagagatttttggtatatatgccgtaaaatatttttttttactaagaagaaaagtttacaatgcgggtgtgaaatatgaaattgcaggttttttgtgacctccaattctattgt

SEQ ID NO: 27255 - DNA, 760 bp, Glycine max
  Intron number 1 from transcript Glyma19g32220.1 (locus Gly ma19g32220) derived from phytozome v7.0 (chr-ID Gm19; pos 39983547 to 39984306 reverse strand)
cgatcgctgcaatcaggttttttttctctctcttcaattctctctctttccttttgaataattttatatggttatagtgcagctattgtttgtgctgttgcattctattccttgtgcgttgctcttgtgttttccgttatcttccttatgttttctgcctttttggcaacacaaacgttattgtattgaaatcccaagtaaaattaggcagcgtctttctctctctcttgtttttttttttctttttcctcagggatggtgattgttctgcagaagaaaaaacagaaggtgatttttctacaaaagaaaacaggtgaaggtgttggagactttacattgaccggctaataaaatagtatatataatctcaaacttatactccaacaaataaaactatgtttagtaggtggaaaatagaaaggagggggagagaaatagaagaaaaatcctatggatttcatgtgtgtctcacacctcttaacttttacttcaattcaaatattgttttttattttcatcctctttgccaaacagagtataaagataaactaatgtactattttgataagcattttgacttaacgtgtgtacgacatttcaaatactgtgcactgattatgcatgacatcttgagttggaattgtggattactgttctccttgttttcaatttatgaactctttgattgatctaatataactgtatctgctcaatttttcttgcaggtatattgtttgttgcatcgaggttatattaaaca

SEQ ID NO: 27256 - DNA, 797 bp, Glycine max
  Intron number 2 from transcript Glyma20g37260.2 (locus Gly ma20g37260) derived from phytozome v7.0 (chr-ID Gm20; pos 45168697 to 45169493 reverse strand)
ggttcgtccaaggaagcttctctaccttgcaattggtatgtatgagtacaattattttttaatatattttctcattttccctgccatgtaaatgccacatattaacatgattagttgcgcaagtgttggatttccgatcttgaagttaaaccctagggttcttatactctttggtcgtactcttctcttcctccttagtaaattttcattttctagcaaaatgtacttgactcacatgacactgaacaacacaagagtgctcctcttggcaagtactcccctgcagtactcctctaggatggagtgctccttgactcaaattcacattttataaataaagaaaactcgatatcatgttataatcaatagcttatctggatctatataatacccaacaagctacaaaggcaaacatcctgattagccattcctattctaagctagaataagataatctataataggaaaaggctcaagagctctataaagtaactgtttaaataagtgtgtatggtgaagatcaagacagttgctttccttaacatagtcacccacattaaaactctgagcctggtgaatcaaaacttacgtatatccaattttcctctaactacaatccctctgtctgtctgccatgttaagagtcttagttttttagcatgtaattttcaaactgatagttcgtggcttctgtttttactttaaacctgctttctcatttcatctgtttctttttacacgtacctttgttaccccttcatcttttgcctcttgtttccttactttgaaattcgcag

SEQ ID NO: 27257 - DNA, 642 bp, Glycine max
  Intron number 1 from transcript Glyma20g31730.2 (locus Gly ma20g31730) derived from phytozome v7.0 (chr-ID Gm20; pos 40330219 to 40330860)
ggcaagtctctctcaccgttgccatcctccttcaggttctcccctcgttttacttcacagtaccgtttatttccctttcgtcttctcagatctgtctctttttctgtgcaacgatgaattacgctcattcctgtgtcgcagctgaatttcactctcatgcgtgatttgtttttttttttttgtcttgtttgaatcgcgtgataatgctgattttcccccatggatcttgatctgttacttgttttcctttaatgcgccatttatcatttcgttattgtgttcggtttttcaattttcatgattgaattgtcggagtcgaaggtgatgtttcgtgttgcagaaaatgtgctgagatgtatttatttttttattccattttccactcttcttctggagcttaatcattacgaagggttgcgtatataatagttttaatatcattttgattgtgactcgagattgtgctttgcgtttctaattcagtctttggttttatgcttttttatatttagtttttctgatttggttgctaggaatttgtttgtttcggttttgcatttgaccttggcacatattgttgttttgtctgtagatagtatatatttttgatataatcgttccgttattagagaagttgagaaa

SEQ ID NO: 27258 - DNA, 626 bp, Glycine max
  Intron number 2 from transcript Glyma20g31730.2 (locus Gly ma20g31730) derived from phytozome v7.0 (chr-ID Gm20; pos 40331234 to 40331859)
atcaggtgaattcctcaaacaatactgaaatgtcatattccaattttaggggtgtgttcaattttttttgaaaaatgcaagccatggaaacttaatggtctagagctatgatgaactaagttgtccttaacatgcttctttattactttaatttgaaaataatggcactctagaatacttgaaattgaattctagtacatgtatcacgtgtgacaagtttacatttaattgcgtggcaatttgaacttgaaacatcatacaatttacagattgctgcaaattttgcaggacatatgatatgtgataatgtaacatgataacatatgtttagacttcataattacccaaaagcttgaatttaatgaatctaatagtactacaataaagtgaacaaaaataaacggatgctctatcatatatttgactgaacatttaagttggaaatattctgaaagcccctttattcctgaatattacccaagcctcaggttttgtgataatggatcccccgcaaacctaaaagcaccatgaactaaatctttttactgttgtgggggtcttctaagaaagagtttgatatttattttataggtttttgttcgagattttgtgcccagtgctctagc

SEQ ID NO: 27259 - DNA, 726 bp, Glycine max
  Intron number 1 from transcript Glyma19g02360.1 (locus Gly ma19g02360) derived from phytozome v7.0 (chr-ID Gm19; pos 2078388 to 2079113)
tgatagcaccataagtggcactaaggcccatagtaattttcttttcacatcaaagttccttagtttcataaaaaaatatgttatatgttatatttgtcatttgacatcaattttgggtggccaaaaatggttgtttgtctttacgtttttggttatacgatctaaccaagcctcttttttttttttcttttttttttctttttgtgtttgagactgcaaatttgtgttgagaaactacatgaattctgagtttcttgcaataaaagtgaagtgaattattgttgtgcatttgtgctgaggaagttggagatctaactaattcatttgcaaataattatagcttttcaaaatcaaagccacgttcttttctccgttacctttggaccacggcatgttcttttgtatgcactagatgctcggcaaagagccgagaaaaatattctgtaaactttatctgattgttctgagaattaagtattaaataacatcactatacacaccttacactaaattatggtgaaaaaattagtattgacaaagaatcatataattcaatcatataggaaatcataaaagtagctctgaattagcatggacaagtttgtgatgtatttactattttgttatcatacaagtataatgtaattgcaatgaagctgtataaagttaagaaggccgtgatcaaatcatgtaatggtgtccatttattcttgcttttaggtgaaa

SEQ ID NO: 27260 - DNA, 441 bp, Glycine max
  Intron number 2 from transcript Glyma19g02360.1 (locus Gly ma19g02360) derived from phytozome v7.0 (chr-ID Gm19; pos 2079685 to 2080125)
gccccgaggcagtttggagaaccacctctttagaagtactctactaacctttttttttctttggtaaaccttttctatttgtattgcatgtcttcactactgcttgtttaattatgtgtaacacattagaactgcagcaaatttgtatgccttgacatttgacacatatatcaaataaaataattatcatttatcagtcttgagttaaaatttggctgaaaatgagcataaattttgaagcttttagttattcaattcacaggctttcatgcatatagaaaacaaaaactaaatcaaaatggttctcttccaataatgcatttgttctttctgcttggcactatgctactaataaaaaatcatggtcatgattaattctttttctggtaacaacaatttttttatgttgaagggcccctgcctcttccttggtctatcaga

SEQ ID NO: 27261 - DNA, 415 bp, Glycine max
  Intron number 1 from transcript Glyma18g03230.1 (locus Gly ma18g03230) derived from phytozome v7.0 (chr-ID Gm18; pos 2148300 to 2148714)
caagaaaggtgtgtaaagcaaggaatactgtatatgcatcataaacggttaaaaaaaaaacaaaatataagaaccatcgaaatgaaaaacttataccaacaacaaattgaaacaagtaataaaaacttctacgattcaaattctgacattaaatgtcaaatgaataatactagaagaaaaatatttatatcatgtgtatttataattcttaacaaaaattaatttactgctcgtctattcgtatcaatataaaaaaaaaactaacaaccttattacacagtgagtgcagtgtcataccttcacacaaaggcaacaaaatatgaaaatacaaacattaaaaacacaataaataaatacatctacaacagcttacttttcagaccacaattttttttgcaactacattatagcaatt

SEQ ID NO: 27262 - DNA, 850 bp, Glycine max
  Intron number 1 from transcript Glyma18g16790.1 (locus Gly ma18g16790) derived from phytozome v7.0 (chr-ID Gm18; pos 17462182 to 17463031)
ggattgcttggtcaacaggtagttctttgattaattaacgtttaattaagttgctggtcctttaaattttttgtttatcttttaaagttcttaaattaaactggccattttttggccacagtaaagactaaggaaaatatttagtgaatttgatgaactaaaaagtactatttttgttaaaaaaaattagcacattttaatttgaaagaatgaaaaaaaaaaaacacaccttatatttaatagactaaaaatataattagatcattaattaattaataatataattaactacagcaatattgtgcagtatatactcacatgcacacgcacatttacacacaacagttactacaaattaaacattatcctcattttttttcatttatttatagccatgaaaagaaggatccatttattgtaaactttgcaactaattttttttacatttcataaaatttacaataattgcacagcatattattagtctggatttaataacaatacaatgacattttaaagattttttatatttgttaatgattcccatatatctgaaaattaaaaattgttaatttttgtattagttatgtaaaaattcatatatacgatgatgattattaatttattttaaaagccgaaacaattcattaagaacaaattggaatgtccacaagacgtgaccatcccaattgaacagtcacattaaatgtttctgatagaaaacagcacccccagcaaaacaaaatcttgtcaaacttacatatgaaataacgcaaggaaaccaatatgaataagaatgccgttaatttcatatttccttcaaactcccctaaatgaatcttcagatctg

SEQ ID NO: 27263 - DNA, 752 bp, Glycine max
  Intron number 1 from transcript Glyma17g06640.1 (locus Gly ma17g06640) derived from phytozome v7.0 (chr-ID Gm17; pos 4746455 to 4747206 reverse strand)
tcctcgacggcgccgtcggcacctccgatcgaatcgtaagtcttccctattttatttctagggtttcttcttcgaatttcttttatttctttgctagtttatctaaagtagggacatttttttcttactgccttggagtttacaagtttgattctttgtgctcgccttttcgtttttctcagctcaatgcgttacttttcctagtttccaacatacaatttcattaatattgttgtgcgttttggattgagtggtttataagatagtagtatttgtgaggtggtttctatgtggggatttatagggcttaaatgcttaaggaaagcacatgatagtgtcaagggttctaactttactcgcaatgttaagttttgaatctttggggacggctttacctaatcatcactccaattcgagggttgatttcaccacagctatccacagaatatgcttctgggtgataaatgtgtgacattgttgtgttttctttattatttattatttatagcttgcaactttcagtgtaggtgagcaattggcaaagtgaatggaagttaacactgtagcttagttggtctatgttctgttcagatgatgcttctttccagatcactgtttgttttttggtcccttatgtttttgcatagatgaggacatttatttgatttgtgtgtcttgttgtgttttgtcctgatatggtttgaattttggttttaggtactcatatcagggaaggaagagccggaggcacc

SEQ ID NO: 27264 - DNA, 858 bp, Glycine max
  Intron number 1 from transcript Glyma18g49580.1 (locus Gly ma18g49580) derived from phytozome v7.0 (chr-ID Gm18; pos 58963598 to 58964455 reverse strand)
cggcgccaatcgcaaccaggcttttgtcgaattcgtaagtaactccctttcctattcttttcattccttccttattttttagggtttttagccgtgtatttgtttattcatgagaaatttagctctgttacacatgagctctgggcatcacaattaggcctttcattctctttctctcttttcactctgtccgtgcataaatccaaccaatctgctcaatcatcatggactgggtaaaaaatttggatgattaataaaaataaaccattgattatgttttttttaaattaatgagttaagatattaacagtttttgtaaggagtgaatttttaaagggagggtttttgctgacaagtaaagaaaaaggtgatggagatcgaggtctcttgcagctgcagatatcagcggtgggcatagaattataacttttccgggttaggtatggtgttcgtagcctaagaaaacccataacatattcaggtggagcttaaagtctcattgccggaatttactcatgcactgatgcacaccactttggctgttcaattttgttttgagttgagacagcttctcaaagaagccttcttcttatgtttagattgaagatttgatatattgggaatattaagcttgccatgcaataaaaacgtttactttgtaaacattttgtttttgagactgttcatcagttaagcttattttcccttgagttttgattggtattataatttacaagtgactgattagtgtctgaggatgtgttttcttatatttaatgatacccggtcctttttttatgattttttaactctcaagtatacatgctttaccaggtggatctaaatcaagccatttcg

SEQ ID NO: 27265 - DNA, 1039 bp, Glycine max
  Intron number 1 from transcript Glyma18g01590.1 (locus Gly ma18g01590) derived from phytozome v7.0 (chr-ID Gm18; pos 880696 to 881734)
caaaccgttcggtgagatacatttgaaggtttgttcttatgatattatttattacatataagatgctgaaaaagttatatatatatatatatcttttgcaacacttagttatcttacttaccataagcgtaactaagctccatcatggatggatacacacttttttgttttttttttctggtcccaatcacttgcactaaaatattgaaatgcctttttgtactttatgattttcctgctgttttgtttatctgtatcatgaaaccgttttaatttttattttattgttttttcttgtttaaaattgtattttaacgggttcttttgttcggactttatcagagtttaaatcaccgctttagttatgtgtgtgtatgttagaagtgaagttttattagttctccatgctatttggtaaaattttctagaaaagttgcgagaagagggagtgggtaaagggtcatccgttatcaggtcagaggactaggacattgattgttcctatgtcaattaatgcagggtgttgaatgaaacgtctgtaagactgtaactgacgcttacacgtttttgcatttacatgcaagcatgcacccactctgaaatgtgtttaaaatatgtgttctttatgggtgtttaatcgtctgtatcatttctttttaccacaatcgagcagtgatgtatttgaaatatttattaaacaatccttatttatttgcccatataacttgatgtgtttgagttaaattgagtaattgactcttggttaaattatatctgggtcttacgtatctgaaatattgggttcaatgtctttcactacctgctgctgaaattggcatctgcagaagtagtattactgggttctgattgtatcctttcacttttatcattgacaaacaaaaatgatccaatggttttattttattttatttttaaattttaatacatataccagctttccttgcttgtctgttccagtgagtgctaaatctaaatatgtcttgttcacaggtttcttctgttcgttccagcaagtctg

SEQ ID NO: 27266 - DNA, 745 bp, Glycine max
  Intron number 1 from transcript Glyma17g09750.1 (locus Gly ma17g09750) derived from phytozome v7.0 (chr-ID Gm17; pos 7256528 to 7257272 reverse strand)
tcctcccactcccaccgccaccgaccaaaaccaaggtttccatttctttctcttttccctctcctcctattctttccacagttcttatcgttgaaggctgtttcaccagtaatttttgctttcttcttttccggtctttgtcttttctcacaccattaccaatacaaaaagaaagtcaagctcttccactttctgctactacaccactcggcaccgtctggaatcattaaaaaaattggaattataacaattctaaacgacgtgaaacttgtgatcattgtttcttaattcccacgatttgcatgattttcctgcttactttttttttttagattaactacctacgttaatcttcattgggtgccacgaaacagattccatactccatagtttctttgatgatttcttctcctctgtttgattgtcaattcctctttcttccataattgatccctagcttgtgttaggcaattaatagcctacgaacaagttaaaacttggttgaaccttcacgacatggatgatgattggatagagttattgctacgttgttgttgcctttaagcaaaatgctgaaatcctatatcagtatggcttgagtaccgtattacatgaacaagagctgctgcgttgacacctgatacattatattgttttgacttttgatcatgataaaaattgatttgttgaatctcttttttgaggtgtaggttctgaagtcgtgcaagcaacaactgtagatcag

SEQ ID NO: 27267 - DNA, 740 bp, Glycine max
  Intron number 2 from transcript Glyma19g02580.1 (locus Gly ma19g02580) derived from phytozome v7.0 (chr-ID Gm19; pos 2400193 to 2400932)
ccaaaaaactctctgacaaaagcctccctccaagtgtatgtattgcaccaatttcttatacatacttacaaacatacatacatgtatatgacatttcaagtggcaacatgaaagatttagagggactaatcttgatcacttcatattacatgcaaggtcaaaattagatatatgttaagcatttatgcactcatagtgtaataagtttctttagtctataactatatagaaattgtccagccgtcaccacgtatcggctggacagtttttatataattatcattctttttattaatttcattgtcctttatactttttatattttttcttaaaaccgtgcaaatacatggacaattacatagtatcatttaatcacaaattatcatgtataataaatttgttgatttttactgtaattactttaaaagtcatattaatgatgtattcgattggttaatagtgtagaatttttaaactaacagtgtaaaaattaaacttgtaagttaaactaatctttactatccatgtaagaatgaacaactaagattagttcttcttatccttcgtactctcacctaattgtatataggagagagcatggaaaatgtgagaagagttaattgataaacatatagagagataaatagacatagagatagatagatatcgatagacagatagatagaatttgtatttcaattgtggttattcatgtagtgctttgtgtgttttcaggattc

SEQ ID NO: 27268 - DNA, 946 bp, Glycine max
  Intron number 3 from transcript Glyma17g13650.1 (locus Gly ma17g13650) derived from phytozome v7.0 (chr-ID Gm17; pos 10448616 to 10449561)
tcgaaccccttggttctgcttcaattgctcaggtccatgtcaaacttctgacctgctatcttatattcttatttatcattgccctgcccctcggtaatggttgtcatttgaattgcactagtattcttttttctccaagatcaagtgtttatgcatgcttgcactgattaattactaattaggacactagttaattagttatggataacaatttaagttccaattgctgcctggagcttttgaggggagggggatcagctactgctgctcagatcactggaggggtctgtaacttgtaaggctactccaagtctatccaacaccttagttagtgtttaccaaaggaggttatactgtttactttttcagctaaaaggagagacatacctgaaaaataagtaagctcacttctatttataaggtgcaaagattttggggacaggtgtatgtactggcccatgctttgcaatgattttagtgagattttctgttacagtatcggaagataatgcgtgtccattctgttatgggagaatattttatatggggttcctttgctatgtagtgagtttcttgtcttgggtaataattgattggttaaggggatacatggtttacctattgctctttgtaaaactcaggtggatcagccatagggctggcatggtggtaaggtggaacaacattaatatcaaaatatcaaatgatgattggattttttttattcaatttaggcttataaaattaatcattttttgctttgcttcttggggttcatattcatgtccatatctcatataagccctcagaagggtgattagtcactaaaagaagtatattttgcaacagtcttcaactctatattaggatttagtaccttgtaactgacatatgtcttgtgcgaatattaggttcatagagcaagactgaaaggtgatacaggtga

SEQ ID NO: 27269 - DNA, 491 bp, Glycine max
  Intron number 3 from transcript Glyma18g53020.1 (locus Gly ma18g53020) derived from phytozome v7.0 (chr-ID Gm18; pos 61418510 to 61419000 reverse strand)
tcaactcagcaggtagggtttgcttgtacacaccaacacagaattgtgttcttctatctgcgaggaaatatgttatgcaaatgtccctatttcagcttattgatgtttcaatattataaataattaatggaataatggtagctgttatcatcgttaggcttagaccttgggtcttttccttttaactctattaagttaaatgaataaacaatttgccgatatgtacccaaaaagaaccctgacgcttatgatttagttttctgctagggtttgattgtgcttgagacttaagtcttgaacttttggtattttgtactcgttcaaaattcttgtcattttacttatgtatgtcaattagatgtctatttctgggataatagcattcactgtattagttatttttgtaaactgcatggttctactccttggtaaagaatcctttcatgattgttttaacattgatgtaacatcaggtctgttatttagtgaag

SEQ ID NO: 27270 - DNA, 797 bp, Glycine max
  Intron number 1 from transcript Glyma20g12020.1 (locus Gly ma20g12020) derived from phytozome v7.0 (chr-ID Gm20; pos 16886777 to 16887573)
actttaccactgatcataagtaagtaacgcctaatttatattagaggaaaaaaattatatatacacaattattcaatcataacatatcatttatattatttatgataaatttattaatttttaaaataattaaaataataatttgtgattgaatgataatataaaataattttagactatcaatatatagacattaaattatttatactatcaatgatgactttggttttatgtaaaaaaaataataatgattagttctttgtatattttttacttaaatatatttttaatctataaatttagaatctatttatttttgtcctctaactttaaattactttaaaaaaattccccaagtcttttgtccaaaatccattagagattttgctaatgtaattaatgaattttaagtcgtttaggtgtcaactcactttgatttttatatttctcttattaaacattgtatcacatgtatattttcttttcaaaatattcattttgacaacatcttgatataggacatttaagcaaagagaaaaaaaagaaattttttaaatttagaataccaaaataaacttatttcaaatttaagaaacttaaaatatatttaaatctatatttttatataatagttaaaacaacaaatttgtcttgaagaaaaaaaaatagcagtatattttgacttgaggaaatattatttttctttttattcacttgtaattgtctcttttctcagatttaactgtttttaatgtcaaatttaatgattgcaattgctttattcaggattcacaaac

SEQ ID NO: 27271 - DNA, 641 bp, Glycine max
  Intron number 1 from transcript Glyma19g33640.1 (locus Gly ma19g33640) derived from phytozome v7.0 (chr-ID Gm19; pos 41220582 to 41221222)
ctaaggttaaggggttccctgcttggcctgcgacggtgagtgctgctcgttaatttttaagtgaatgcttgaattttttggattgattgtgttttgctgtctagaataacagaacactctcttggattgcatgttgtactgattttcctctgctgtagtatggtttggtgctaagtgtttgcccggtgataatcgattaattttagtggttgttttatttttgttttgtttttttggtgtgtatattggattttattgaaagattttgggtctgaccttgattatctgatttgccttagcttaagctgtagttgtactgtcgaatttagatattacacggagattgggttaatcaaatgattatatttggagattttttatgaatgacttgatcggggcctagaggctcccggaggagctgtggagaaggtcagagactagggaccgtaagttaaacaatacaaagccatgctttgcattttctatggtcctgtatagcttatatgtttgttttggacagttggacacttttttcccctgctttttgattgtatgttatgaagattttctttgctgattaagttgctttgttttatcttggggcaggtgagtgagccgcagaagtggggttactctgctga

SEQ ID NO: 27272 - DNA, 246 bp, Glycine max
  Intron number 1 from transcript Glyma19g27960.1 (locus Gly ma19g27960) derived from phytozome v7.0 (chr-ID Gm19; pos 35329015 to 35329260)
gaaccggtgagataactctcaagacgcaaacaatatatacaaacttagcatgaggtcattgaccttgatagaacaagaaacaatcatgaagagctaaaatttggtaaatacatcaatttagacattttatcgagcaactaatttgagagaacaaaatagaacatgtaccaacaaacaagaaaaaatattaaaccagtaacaactcaaagctcagaaccaatacctagccacaaccagagttgggaa

SEQ ID NO: 27273 - DNA, 718 bp, Glycine max
  Intron number 3 from transcript Glyma18g52720.1 (locus Gly ma18g52720) derived from phytozome v7.0 (chr-ID Gm18; pos 61237270 to 61237987)
ttctgcaaaaccctcacatccatattgaaccatatgtaagtttgcctcttgttgatttagggtttagagttgacatagtacgatctttgtataatcaacatagtattattaatatttacataaatgttggttgttttatcattttctatttggaattctgttgttcattgaattatgaaagcatcctgagatatttaagttgacttgtctataaagatggccctaacaacccatgacctgtttgccccataaatttgaaggcaaataaaacaaatgtacttactgctatactttcttgtctcttgccgtgtaggctgccccatcagcttgggttctgttttctggtatggtttttttcttgcaagatagcaatggggcagattcagaaagtcatgtccatttgttagtacttaatggcttttattatctaataaagtggtttccatgtttatattttaatttgtaaatatcaatatcctagtttaataatttgtagggttgtgaaatgaagtagaatgaataactagaaaagtctttccatatatgtggggttagctgcatggatcaaatgacaccacagtgttttgtcataaaatgtgttttccgaaaggccatttagatcttagtatgttacttggttcacatgaatgagttaatgtgaaaccatctctttacctctttttctttctgtttttgcatgcttcagctacaccagttg

SEQ ID NO: 27274 - DNA, 740 bp, Glycine max
  Intron number 3 from transcript Glyma19g03110.1 (locus Gly ma19g03110) derived from phytozome v7.0 (chr-ID Gm19; pos 3217605 to 3218344)
gaacagtcctcactagaagcgaaggtaactatcttgtataggcattaataacctctacattactggaattatgagaaaataactatgtttcctctcaagtctaaagttgtttaatgtctggtttgggttgcatgctgtctaataacaaactaaaatatttgaattaaaccaaattggctcacactgcagatttaacctaaattgtgctattaagatttggttttgttcattattggcaatctggttaataatgataaaacgtggtgacaggcagcaaaacatttgtagaaatacatcttcatataccaactctatttcaaattagattggagaaagaaattatgcatgggaaagaaactcaaatgaaattgtttccagaattgtcaaccattaactatgtgctcaagtgaaaaacattttgatttgttagataaaagaatataatatacccatttattattcaacaccaaacataaacaacaaatatattatcagattaactattgtaataatgaatttgtttagaacagcactagctcctttaaactatatgttgattactagatttggatcatgaaaagttgtgttgtgctcatggatattctttcgtacaatagatattatttgttaatagttaggtttactatgggtcttatggtgatgtctaatacatcaacttattctgtaatcactttcaacttaaaggaacttcaagctgccttcgtctcatttaagacacg

SEQ ID NO: 27275 - DNA, 412 bp, Glycine max
  Intron number 2 from transcript Glyma18g08140.1 (locus Gly ma18g08140) derived from phytozome v7.0 (chr-ID Gm18; pos 6852805 to 6853216 reverse strand)
ttctgttggagatcgcaaggccatcacacatccaggtctgagtttctttttactttttgtttttgtttttggttccttttactttttttttttgttagttctgtcaattcataggcattaaattcttagttttttcttgtggatagagaataatcaacaatcttagattctgtcgtgtatttgcatgatgttgttgtacatggttgtacaatgataattgccaatagaagatatcatggcttatgttatgccactttgtttgcatcttcacaatttctcaaagttgttttgctgtgaaattcagtattttttgttttaagagtttttctcatgttgtctgatgagtatatatgcttttttttttttatatgatgcagaaataaaggacaaagtgttaaagaacaacgaggat

SEQ ID NO: 27276 - DNA, 996 bp, Glycine max
  Intron number 1 from transcript Glyma17g13490.1 (locus Gly ma17g13490) derived from phytozome v7.0 (chr-ID Gm17; pos 10319459 to 10320454 reverse strand)
tcaaataactcatttgtatattcatgtagcatttctcctttaataatttaaagtaaattttcatacaaaacattttattttttagattattaagatgaaactttaattttaattgcttaacgatacaactagcacctgtaaaattgtacacgagttttatcctttgaagtgagaaagttaaatttattcatatgtttttttttctttaatttaaaatatttttaatttttaaactttatatccaaagtcagtgtgtatttagattaaattattcaaaaaataatttcagttattgattattcatataatcaatattgtttatagaaattgattatatgaaatcagttctatatttaattatgttatattaaaaatatttttaaaacagtctacttcctttggattgtttaaaacatgccgttttgtctatgataaggttaaaaaagtgaagttatttgtaatagtacgttaactttaaatttaacttaatcaattatgaaagataaaacaataaaaaaaatctattagctattaagagttgaatttttctgcacgatataatgagggatttttatactattaattaatcagaaataattataagtataataaaaaaataattattaatttttaccaataattgaaattatttattttatcaatgaccttccaggaggaaaaacccaaaaacatagcgcaatccaaacatgctgaagtaaccgtattcttatttagcagccaagttctccctttccctccaaacgagtgtgaccgaactgtgcggtggcgaaggttgtggcggtgatcggtagagcagataaagtattgctgtatgatggaggaaatcaccttcgagtgtgtacaacccttaaatcctttcctccctctcttctctttacaccacaattttgattttctaaatacctacctgacttattcttcgttcaaattgggtacacaggatctgattcattccattttgaagcgcttttggac

SEQ ID NO: 27277 - DNA, 303 bp, Glycine max
  Intron number 1 from transcript Glyma20g16480.1 (locus Gly ma20g16480) derived from phytozome v7.0 (chr-ID Gm20; pos 22960025 to 22960327)
agaatcctcggtacacgagatcaaaacccctctccgtaagccagcctctgattttgatgtcattattattaatttctaatatacaaatctatggttaacatttgttttctgaaagccaaaatctatggttaacattgtcagtgtcttcttttatcgggatcctcttcccgcatggtatttgtctttacaatttgaccatacggactgagtttcatcccgatacaaaaacattcaatgcacatatatattttaattaattaatttgttgtgttgaacatctagtgtcatctaacaaggaggaag

SEQ ID NO: 27278 - DNA, 452 bp, Glycine max
  Intron number 4 from transcript Glyma17g10290.1 (locus Gly ma17g10290) derived from phytozome v7.0 (chr-ID Gm17; pos 7709935 to 7710386 reverse strand)
ttaattatatccagtcactgcagcatcaggttgaggtgggtatcttcttcatccatccttctgttctgtctctcaatgctctttcctgcttttatcctccgccactgaaatgaatctaattgtgtgcttagctgaacaacttttacaaaattaactgatttttttttaatgaaattgatgttgattaaaataaattttaaaagtgaaatgatttatgtttttatttcaaaaattagaaatgaaaatcgatataaaacttttaatccaacacaaaaaatactttaaattgctttaattcataatcgattttcgactcaaaattaatttctaaatatgagaccaaacatgtgaacgtctatctaaatattttgacatgattttgaatgatttgatacactaattctgtgcaaaataacttttttttgttttttgtttttttgcagttcctttct

SEQ ID NO: 27279 - DNA, 909 bp, Glycine max
  Intron number 1 from transcript Glyma18g08150.1 (locus Gly ma18g08150) derived from phytozome v7.0 (chr-ID Gm18; pos 6872724 to 6873632 reverse strand)
gtcgcttcttctctcaactcctacggtctctctctctctctcttaccctttagctttgtgattgtgattttggcttgtgcagcacgtttcgtcttgaaagtttcgaccttggtacatggggtggtaaagaatgtgcatgagaaaattgttcttgctttttttgctttgatcgttaaaatataatgttctttggggtttgatcatgtgtgtgattcttctttcagtatgattaatttattattcacaaaaaaccccaataatgttttttttgttttccttatttttcttctaaaattttgttatttttacttggttgttctgaatatcatgaaaggtatcttcttgctggaacattttaaatttcttaacaatgtgttaaattgcccttgcggtactggaagcattttcgtggcgatctttaatagtacagtatcccaaaaccctagaaattgtagttttgaaccattttttgaaaccttttttgtccacactttctaagcataccaatcaaacaaaactgttgcagctgaatatactgttaaatttttatcagtgagaagtcagtgacttgtgaacttttaacgtttctagtaaaaagtaaatattttgccttttatttggtatgtgtagcaactttcaaatttgtgttggattagttaacgtgatttaaatacttttttttggtattttaagttgttttaagctttacaattgagctgcttttttttgtagctttcgacctagttctgatttccacaatttggagaaatgattctgattaactatgatgtgttttttactgcatacacaggacagtctgtgtcaatgactccacataaattattttttaattatttcctccattgattgctccttgtgttcaaaatccaaatgctttctcacatgtag

SEQ ID NO: 27280 - DNA, 892 bp, Glycine max
  Intron number 1 from transcript Glyma19g37680.2 (locus Gly ma19g37680) derived from phytozome v7.0 (chr-ID Gm19; pos 44788799 to 44789690 reverse strand)
cggagcttccctcgccgagtcgccacccaactgaggtttgtcttttttatggtaattgtattattattatatttatttatttttattactggtttggtttgtggtgactgagttgaagaggaaaaaaacaggactcgtgagtcgtgagagaagctttatggttttttgtcggtaatagccggaatgttgcttttcggtgacaatcatagctgcccagtctttccgaaaattgttaaagaacagggcctgtgggactgtggggagggttacatatgtcaatttcatgtttttgttttgtttttctgaatttttttcataattgtacttttcgatcgtgtttcagtcatacaaatcttctctctcctttctagtgggttgtttggtaaattgctttcttaaagggtgacaaattatgtttttcacttctagtactggcttggttgttcggtaaattactttctcaaaagatgataagataaattatgtttttgtttgttctcttgtttgctgtctgtctctctctgtcgttagatcccacattcgatttactagaacaacatagtttctcatttgtaattttgtttgaattacttagagggtcctgtagcaaataaccccaacaaaaaaggagtgaataactatctacttatgaaagagttgttaaagtctaaatatgttgacattaaaaaatcatgataatgttagtattcaataaaaaaaaataaagaattagagacataattgagtgataaaaaattgtgtctttgttttctcattaataatatgtttataacaattttaataaaaattatattattttgtcactagttttaatatttttagtgatactaatgaaagttttttgtggatgtttaataggagaaagaaagta

SEQ ID NO: 27281 - DNA, 929 bp, Glycine max
  Intron number 1 from transcript Glyma20g33990.1 (locus Gly ma20g33990) derived from phytozome v7.0 (chr-ID Gm20; pos 42423011 to 42423939)
ctcaggagtatatcagtaaatccactttgcagctggtatataacttaatttcttgtttcttatttttgttttcttcgtcctgtttggttgttccgattcttctggagctgattgacatggctgctattttgtttttgttgataactaattcatttcgaaattcgatggtgttttaatttctttttagttgttgttgttattattattatgttgctattcgttttttatgaattgacgttttggtcttatgatgatcccgcgccttttgtgatatctgaactttgtgtttgcatgtgattttaatttttaaatatttgtggtgaagaaaaagagaaggaagaaggagggtgtgaattaagcgaagactgttaattagctgagcgacatgctgcgattttgtttttgttgatgactgaatccatttcaaatttcgatggtgttttatttatttattaagttgttcttcgtttttggtgaactggcgtcctggtcttgtgatgttgccgcgccttttgtgatatctgaaaatcatacatttgcgccttttgtggtaagcttatctagaagtacttctagaaaaagaaaacgagaaaaatgaaatgaacttagattatgcataagctaatttgtagaagctctctaataaagcttctctaaaatatgaaagattttttataaattaatttgtgcataagttaatttgagcttatggagaagttcattttattttttcttctcctagaacttattctggataagattatccaaaagaccctaaatgatgaagaaaataaggaggaaagagagtacgagttaaataaaaattgaaaactgtcgcttatctaacggctggtgctgcattgacatgtgtaattgttagttgattacatttgatgtaatctgtgtacctgggtttttgcagtttgatt

SEQ ID NO: 27282 - DNA, 693 bp, Glycine max
  Intron number 3 from transcript Glyma19g28220.1 (locus Gly ma19g28220) derived from phytozome v7.0 (chr-ID Gm19; pos 35600609 to 35601301)
agatactccattctctggaacttgtatcagattgtgtaagcacacttcactcaaactctcgcataccctttttcatttttcaccatttgttggaaatcccagtcatatagctaaatattatgtatataattggagggcaagcacattctaagatgggttagttttatttatttatttaagttcaacctaaatctaaattttaaaatggcatcaaaatctatactaattatatatagatgttcaggcttacaaattttaaattttatgttaaaaatgttcattcctccaccatccactaccaatatgattaaaataatacataaataaaaattttaacattaaaatataaatttcaatattttttttcatgttactatccaaaaaaattagttcaatcttgaggtgtaaaagtaaaaacttggagatatgtagtcggcatgccgagggacttaaaaggattattttggtagaatgaaaagaaaataaattaaaattcaaagtaaaatataaaatatgaattttatattttaattgtttttttctttacaaaccaatataccataagggtgaacggaaaagaaaaggattatgggtttaaatatttgggtctcaaaatagaaaaacattaaaaacttttgacatgttgagtgagaaagattgaaaagttgggggtgtacaggttctttgtggacg

SEQ ID NO: 27283 - DNA, 562 bp, Glycine max
  Intron number 2 from transcript Glyma19g01920.1 (locus Gly ma19g01920) derived from phytozome v7.0 (chr-ID Gm19; pos 1576097 to 1576658 reverse strand)
ttcaaacgcccctttgcttcgtcacgtgctgattcgtatgtttcttgccctatttcttttttttttatgtgccaattttgtatttatgactttggaattgctagtttgccctattttgtgctgcgtgaatggaacatgggtctgttgttaagtgtgtgtgtgtgtgtgttttcacatgtggggttgaattgttgttgagtttacttagggttgtgtttaatttaacttgaattgacttcggaatgggttatctggtgggatcatgggatttaaaagaaatggacgtgttaattagggtatggctaaaggaatttgatttgttctagttgtatgtgtgaatcttagttaccaggcaagtaatgcgagtagtgttgtaaattacctcattgattaacttggaagatctctattctttcaacctgtggaatgaggatattataaaattttggatagtttggacgttgaacaagtgaaatgtttgatggcttgtagagattaatattatgattgctaatattctgggtatctgaaagtgcatgtgtttatgttttgtgctgaagct

SEQ ID NO: 27284 - DNA, 905 bp, Glycine max
  Intron number 1 from transcript Glyma18g46990.1 (locus Gly ma18g46990) derived from phytozome v7.0 (chr-ID Gm18; pos 56652905 to 56653809 reverse strand)
tctcacccttctcttcatctactctttccaaaaggtaagctattttgcttgcatccttcgctttttctcagctttcatggagtgtaactggtcatctacttgccacccttttgtgccttgcaaatagggttttatgctctaaatttggttgtgatgctttttactttccacccttttcttgtttttttcaaaaggattgttgttttgggctgttttggttttgtgggtcaagctgttgtttcctctgttatgccgtgtgtctgatggtaaattttttggattgtttctctgcccctcttcttctttctatagtattgattctttggattgtttttctgtttgtaaagtttatttttttgataaaatttatatgctagttcaagtaatctgtaactgggatgttaatggtttttgttaaaatacagtcataatagacatgaagattgatgttccgtgccaaggtatttatgtctatattctattgcaaccattataatctagtacaaagattagatggagttcctttggtgcttttggtgttgttctccgatttgaattggagtttcaccccgaaaaacctatgctggcttttaatataaacctttattacacaaagtattgaggtaaaactctaattctaatttgagaacattatgagttttttcttataatctatatgctatatggctttattatgtacctagaataatttctatggaaatcttatggattctataatcatttctcaaaatgtagggcttggcttcctataacctgttttaccttgtgtttgtttgtgtaatttgaaatatctatcaatgtaattgtggctttatgaaatttaaattcatttcttatgtggattaatctttaatactattatttggcttgtcatagcagaattg

SEQ ID NO: 27285 - DNA, 619 bp, Glycine max
  Intron number 1 from transcript Glyma19g41220.1 (locus Gly ma19g41220) derived from phytozome v7.0 (chr-ID Gm19; pos 47524371 to 47524989 reverse strand)
tcttcaagacctctgtgtcgcagaccttgcctcaggtttctattttcctttgatcttgatgatgcacactttcatgcatacttccacttttccccttaatcatttgatttcatcctctaaccacgttaatccaactcactctcttcgacctaccaactactttaattctgctttttaatgactcaaaagtttaatcatgtagtgcagtatccccaccatatgattaacttttcttcctcctcccctgtatggctgcaattgaaacaccaccacataaacagtgtccttttcaattcaaataaacttattaccaaattccataaatcattgcatatttttgtagcatgatttatacactaaacttttaattcatagacaatttattgggtgtgaattttttgagtttaatagactgaacaaaaacttttaccatcttaaataatcagaaataatcttcaattcatgtttgaagtaattattataaaaatcaataagattattttacatgataataatttatgattcaacaaaagacagtggtagtagtacatatatatacaattctttcttattgttggtggattgtaaattgtgatggtaataacagcggttaaagtga

SEQ ID NO: 27286 - DNA, 937 bp, Glycine max
  Intron number 1 from transcript Glyma19g35180.4 (locus Gly ma19g35180) derived from phytozome v7.0 (chr-ID Gm19; pos 42728359 to 42729295)
actggactgactagaaaggctgagtgaagcatcataggacttcgttggctcttaagaggttgagatctcacatagactagagataatattaataaaacttaggcaatcctcattataaaagtcaattttatagagttgagttaaacctaaattctaaaaggatcatgtctaatgtgggatgtgactaataataaagtgtactaaaaagagtatctaagtaatatttattatagtggtattatacatattttttaagttctgtaatattgttgaaagtcaacattcttcatggatatatatacgaatgactgagatattgagtgaagttctataaattttcttggacaagactgaagggagaagtgttggaatcttgaatgacaaaatttaaaatttgatgcaatgattcgtacaatctacatgtactttaggattcagtctggctgttagtaaaacaattgaaaatttccaagaactgttactaactatggcaggttttatctgtttggtttgtcgggtaaattttaacaaccttgtttaacaaaagtatagtagcaagtagcaactcaacttatgctgtagaaactacccacgttgtgaagggaggcacgcagagttatagttttacatcagtagactaaaattcttcagttgtagggtaattttttaactttttaattgtagtggtttaactatataaaagtgattggttacatttctcaacaaaaagtttgccatgtgacagaggtactgtttcattttgtgatatttttggttctaatttttctcaatgatgttctcagtgtcataccctttatagaaaacagaataaatcaaatagttgtcaattttttaaacacttctttgctgaggggattatcacttccgttgtgagttgtgactatttttttttttttttattcagtcaagttgttgg

SEQ ID NO: 27287 - DNA, 583 bp, Glycine max
  Intron number 2 from transcript Glyma17g05770.1 (locus Gly ma17g05770) derived from phytozome v7.0 (chr-ID Gm17; pos 4057809 to 4058391 reverse strand)
ttggccgtgcttcacatccaggtaacattcatccatgccccttaattattctaaccctcaatttggtgtcctttttttttagattcttacataactgattctaatcggttataataataataataataatttcatagcttttgtttgcattgtattgtatgaaaattttattcttaaattttagtgtgtgattgatttcacttgcataattgattttaagaaatttttcatatgtttaattttacaatggaaaataatttatatttgattttgagattaaataactttaagtatcttctctgatagaaaacaaaattatactaaattttacttcaaaatcaattttctcaacactcatttaaacacacacttaatataccaaaagggttggtggtgaactccattcttaattttgcacacaaatatgtgcgtatatcataacatccttaattatgtttttgatatggtatgacattcagtttttcagttatctgtgtttgttcactcagaattttgcactttcattgattgctttacttgtgaaacagtgtatcagcctggtggggctgcacccatttcgtcc

SEQ ID NO: 27288 - DNA, 666 bp, Glycine max
  Intron number 1 from transcript Glyma19g03600.1 (locus Gly ma19g03600) derived from phytozome v7.0 (chr-ID Gm19; pos 3640073 to 3640738 reverse strand)
gcatcatagattctggtaagtgtatcacatttcacaagtcaatttcacccaaaaaaaacatttcactagtcaactatatgttttctttgcctatttttacaaatagaaaaaatatcacatctcaaattgtcaatatgctatgttggttggcttttactataactaccttaaaagtcatatatagtatgattttaattagttaacaacctaacatgtttggatttgcattttctaaccatgttttcgagtcatatgatataataatgcgtaagcaaccttatgttgctttggaaatgacacatgtgaatccatatgaaacgcgcatcaaaacatgctattaaaacattttgcgatatataaaacttaaaatcttacaaataactataaaattgttatcacatttctattttttatatttgcaaataatagtacaactatcaattggtgattatttcagcctaacttatgattttaagcttaagttttcatatacagttgtgttaaatactcaaaggaaaaaatttggttgtccatagtagtcttactcaacttgagctagattgtctctggtaaaaaaataattacaagaaatattaggaataagatttaattttgttgtttgccactgcaggattcccaattacacaaagaacatttcaaatatca

SEQ ID NO: 27289 - DNA, 409 bp, Glycine max
  Intron number 1 from transcript Glyma20g23890.1 (locus Gly ma20g23890) derived from phytozome v7.0 (chr-ID Gm20; pos 33618380 to 33618788)
cagctttgggctcactttaatcgactccctacgtggtcattttcctcgcattacactacgttgattaatcctctatagcatttttatatatatacttctttcttttttgaaatataaatctcatttacttcatcgtttttttttaatttatcggaatccttttttctttcttttggacgagtttgttaatgtgaggttttggcagtagattgattggatttcgtttgaagcgtgaacatacgcagtagaattaaccattcgtacttgtcttgaatccgtgtgtacggaagtacggaagatctttgattttaatgaacgtttgttgtgattgagatttttttgtttggtcgattaggtttgtgattttggatttttggagagagatttgagggtgttctgtaatgcaggt

SEQ ID NO: 27290 - DNA, 454 bp, Glycine max
  Intron number 1 from transcript Glyma18g05710.1 (locus Gly ma18g05710) derived from phytozome v7.0 (chr-ID Gm18; pos 4355356 to 4355809 reverse strand)
ttgaagaattgtatgaattctatcttctacttgacatttctatttcataaatgacatattaacattttcaggcttccatttcctttgtctatcttttattaatttctcttcttttatcttacaaatagattaacagttttatgttgtgggtcaagcactttcttactcaatagtttatactacgtatagtggaaatcagtataatcacctaaacaggatgggaattgtgggccaagtgtacttctttatgatgacctttttagcatattttgatgagtttgcatgtcttgatcaatcttgttcatcaatttccttttaattcaatacttaatgcagagctatcaatctctgtttgagaattgagagctttcttttttcactgctactcctttattaagtttgttttttcttgtctgtaggcaattactgagattgaacttgttgggaactttgg

SEQ ID NO: 27291 - DNA, 532 bp, Glycine max
  Intron number 2 from transcript Glyma18g11780.1 (locus Gly ma18g11780) derived from phytozome v7.0 (chr-ID Gm18; pos 10530654 to 10531185)
ttgtgtggggtttcgaagattgattgggttggtgttgtataagttgttgtttaggtttgggtagggtgtagaaggtaaggggtttgagtttttgggaattcctcattgctggacagtaggattattttctagtataagaaataaataaataaattattaaaacacttactgacaatttttaaactaccagaatgtctaaaagtgacatatctctcctactgcttcaatattgttagcttaatttagacagaaagacttaattaaaccaattttaaaaactaaaggaccaaattgaaccatttaattattaggggaccaaatcgaacttcaaaaataaattagaggacctaaacaataatttagcctttttttttcttctatttccttttttcacgtctttgttgtgcccattaaggaatacatagtgacaacagaggaaattgaagaagcgctcaacttcaatttcaagggttacatattcgccaaggcccacatagtggaacaagccttggacacaaccattgcactactc

SEQ ID NO: 27292 - DNA, 825 bp, Glycine max
  Intron number 1 from transcript Glyma18g03220.2 (locus Gly ma18g03220) derived from phytozome v7.0 (chr-ID Gm18; pos 2142846 to 2143670)
gctctcaccggagtcgcgtggcaagacgccggaaaggtaacgttttactgtctcttgcctttaactgattctgctttcgaatacccttttgctctgttcttttgggtttcgccgttttttagagaccatgcattgttttcaattcggcaatttatcgaacacttgttgtgaattgtgattattgttcattagcgtggttttacgcttttattagtttgattctcctttcgttaacgacacagtgatcggatatctgcgtgtggaaacttggatgctgaactttagtgacgggacaataggatttgcatggcgatgttgatttttttattttttattttgtgagatggtggtgttttgttgtgttgtgtaaatgagttatggacaacgtaagatggtcccccatgtcagtgacggtaacagtaacataccttggacgtgtcttattgttatccactggattgcatatagtgcgaccagatatttacaataaattaatataatatattttttacaaatttaaatttaatactttaacaagttgtaaaaataattacaatctcatcttcgtcttttggtagacggtgcttctgtggtagacagtgcttcagtcttgggtttcaaagagtatttatgaaaataattatgtttatctcattctaaagaaatgaatagagactcaaaacatgtaacctatcaaatacaagacttattccacttatcaactccttgggatttcttgttttctttttatatgcatatgattgcaaaaggttatccgattagcactcgaggtaggtttggcacttaacatttgtaggtaaattt

SEQ ID NO: 27293 - DNA, 697 bp, Glycine max
  Intron number 1 from transcript Glyma18g08550.1 (locus Gly ma18g08550) derived from phytozome v7.0 (chr-ID Gm18; pos 7277799 to 7278495 reverse strand)
aaaaggtaattgcttcaaatagatcatgtactttattttttcattagcttcttcggcaacttaattaagcatgttaaagttgttgatttttataattagaaaaaaatgtttttagtttctatatttttgcttaatttgattttggtccttttattttgaaactgacaaatatagtcctccaacttttgaaaatatatgaatttagtcaattttcacgtttaaactaatatttagtggtgattttttatcaccactaagttggaggagggattaaattcaagtattagcaaaagttaagggattaaaaatcaagtttaaccgaaagtataaggaatgaaaacatatttttctctttttttttcttttgaatttaatatatttttctctttataataactactttaaaatcatacttaacatgattttttgattgattgataaataataatgcatagaaattagactctaaactatgagtaaataggacatacattggctctgtaaaatggtctttacactatcattcaattatcaaaattgtcatgtatagtaaatatgttgaataactataaaattggttgatagtgtaaaaatttacactaataataaataaaaattgtcatgtatagcatttgagatttgttgagtcgatataaacacaggtaaaggctttggagctacctattattttgctagg

SEQ ID NO: 27294 - DNA, 505 bp, Glycine max
  Intron number 3 from transcript Glyma20g16430.1 (locus Gly ma20g16430) derived from phytozome v7.0 (chr-ID Gm20; pos 22786462 to 22786966)
atcacagaattgttcacctccggaagtttgaggcagttgagtttttttcttcctataaatactcgttcatttagggtttggttgaatgtgattgcatgaatgagatgagtgtctaatcctattaatttttatctggtaaatgtgtgccgaggcccaagggtatttacattgaaatgtgcttattttttgttggaaaatgtcagaattgattttctaaatttaaaacaatcctgggcaaagtcttttgctttccttttctcgtgagttgagttttttgaattcgctctaaacactaagtgcatgattgattcacggtttggtagatttgattttgttgactctgatcaaatgtgattgagatttgagcctatgctaatctgcatcacttatttatcttgaaggtgctagaattgatgttttaaccctaaaacaaataggggttaagcttttctgctttcctaagaatgtggatcttgcctgtacaggtaccggaaaaagcataaga

SEQ ID NO: 27295 - DNA, 696 bp, Glycine max
  Intron number 1 from transcript Glyma18g47750.1 (locus Gly ma18g47750) derived from phytozome v7.0 (chr-ID Gm18; pos 57324021 to 57324716 reverse strand)
atctgacttcaatagggagcttggcgtgtttcaggtatgattttgtctctgaaaattattgagttgttcatgtaatatcctttttaatgagaggagacttgtatatagtgttggtgttggtgttgaattttagatctatcactcttttattatcctattcaatgtccctctaattgaaaaataatacctcaacaatattaacagaaacaaaatctttttccttcaaaagaaaattttctgataataatatttcatttttcacaataaaaccagacctgctttatcgcaatttcttacttaattattactttgttgtcgttaattgctagttgctaaatgctgataaatagtcctagcacttattcttgcataatcttatggttttggacaagtattaagaaaatcacagcatctggttcactggctggttatattccgttcttaactatgccataacttaaaccatataatatggactgaatataagttcaaagatatcatagtttgctctaccattactcaactataggatttgattattttgctttatgtttaaaattgtgtcaacaaggagagaatagaagggaaaaaaaaagagacttcattggtaggattgtgtacatgatctctaggatgtgtttcttcaagagttaattagagacattttgcagttgactgcagaactcctatctgtga

SEQ ID NO: 27296 - DNA, 669 bp, Glycine max
  Intron number 1 from transcript Glyma18g43540.1 (locus Gly ma18g43540) derived from phytozome v7.0 (chr-ID Gm18; pos 53093806 to 53094474 reverse strand)
cttctggaatcgctggtttaactgctgcttactgggtacataaattttactcttatcatatttgcttcaaatatctaaaagctagctagctcccttagccaaagttttaaattgcggtggcggttgtagttttggtcacgatttttaatatcgtgataaattgtggaaagaagatgtgggcatgtgactctggttttattacgatctttgatactgtgagaaattgcaaatcaaacatctctttaaaagcatgctcttacctaatgggagttgctatggtacctaaggaaaaaattatctttggttgttggttgttagttttcaacagagatactaaaattgttagttgttggttgttggttgctagttattttcattttggtagaaataaccgttttttattattaatattttaaaaaaagatatattctttttaccaattttgatagttattaagaaaaataatgttattttccaaaagcaacaatttccaaacttgttaatgttaatcaaccaattaatgtttggtcattaattttgggcactaaaggaaaccctcatgctgattcattcatttatgtatgccaacttggtttttgattgtgggtgcattaaatatgttgtacatgtgcaggttggaccaaggttgaagagtgacagggagaggtt

SEQ ID NO: 27297 - DNA, 382 bp, Glycine max; identical to SEQ ID NO: 26427
  Intron number 1 from transcript Glyma20g31580.1 (locus Gly ma20g31580) derived from phytozome v7.0 (chr-ID Gm20; pos 40203652 to 40204033 reverse strand)

SEQ ID NO: 27298 - DNA, 763 bp, Glycine max
  Intron number 1 from transcript Glyma18g01410.1 (locus Gly ma18g01410) derived from phytozome v7.0 (chr-ID Gm18; pos 746268 to 747030)
gccaatgtattcttcaccataccatttcttaattaaattttaatcttatcttagtccttcctgttatttatttatgctttggtaccctcttagtatcgtatcaggcagcaccactgctaaaataatggttgcagctaaagataatatatctacaaagacacccttgatagaaatctcgctgctgttatctacagagtaagcttttcccccacttttctatctctctgtgtccatattatgttgattagcgtgttttatattttattgcattggcatttggtaaccagaggcaactaacacggaagaagtgattttttttttttaataatgaaattgattaaaagaaaagaaaggagaaatggggcgttccgagaattgaactcgggacctctcgcaccctaagcgagaatcataccactagaccaaatgcccaccttgaacaaaataaattattataacaatgtgaatattttcttattggaatatgtttactgttgtcattttaaaaatgaataatgcttggtttgtcttagtatggagcacaacaaagtttgttttgttaaatgtcaatgtgaaacttgttgaagtaaatcagccaagtaatgtcataagctactttcttatgtccaaataagctctttgtaagttctcccaaaaacacaagagatcttgtgtaattactaattactatactgggctgtgctttcttaatttctcattgtcctgtttttgttgctgactgctttgcttcaactcaaatagg

SEQ ID NO: 27299 - DNA, 570 bp, Glycine max
  Intron number 1 from transcript Glyma19g42400.1 (locus Gly ma19g42400) derived from phytozome v7.0 (chr-ID Gm19; pos 48394399 to 48394968)
aacccttcccctcacagagttcgtcaattctttcggtgccttatttgttctttgttgctgttattgtgttgtacaagtacaagttcaatttcaatgtattctctatgttccttgaatactctttgctagcatttggaggtctcgtttttccatgataaactgcaaacccatttatgttgaattttaggtttatcattagtgtttgcttggttgtgaatgatttatgtgagttctcttttggttctgcttgtgaggtcttaatttgaaatttgaaccaagttatggcatcttcccactgtgttgagcgtgacttgatatttgaactgagctatttttctcttaaagtcattgatgcaatgaaattgatttgagtggctagctattagctggtttgggaatgacattttgtttccactcttttaatgactaatgtcacattccttgcgtagtacctgtgctgcaccctttatttttgggtagatgctgaatgctgcagtttgttaatattacctgtttttactcatgacatattcaggttgaagtttattagttgaataatagaacagtcca

SEQ ID NO: 27300 - DNA, 582 bp, Glycine max
  Intron number 1 from transcript Glyma17g33600.1 (locus Gly ma17g33600) derived from phytozome v7.0 (chr-ID Gm17; pos 37530305 to 37530886 reverse strand)
ggtatttttttttctgttaccctttcgttttttccatgcaaagtttgaatctttatcattaatagctgtttttttttcccatgttggtaatgtttgttggaggtgggggcaacccttactccatgagctactttttgggttcagtttgtcacgggcaaattttaagatggttagcataggctatcttagctgtagactgtagttgttgggcctatcaagccacatgttatggaaccactgcaaatgtccagtcttgcaaatttcatgtctgagatgtctagtcttcgacttgaagggagttataaggttgattgagtgctaaaaagagaacggaggggggaaagttgtgggtttgattctccgctaacaaaatactaacaattaacaactaatatttgttgataaaaaaaagtcttcgacttcaagtgtgtgagtgggagattctacattgactccacaagctagtttttgaggttgatataggttcaagtccataagaatgtttgatggcatgatgagttttcttcatttaatttgcaatttgcagctacctgacagaacttttggcaaaggagggttttc

SEQ ID NO: 27301 - DNA, 461 bp, Glycine max
  Intron number 2 from transcript Glyma20g38740.1 (locus Gly ma20g38740) derived from phytozome v7.0 (chr-ID Gm20; pos 46270312 to 46270772 reverse strand)
tctgtcaagctttaggtgcttttcttgataaaaaggtaatccttttcttttcttcaacatttgtggcatttaatagcaaactggatctggatttgtttttttaatttagtcaattggtctgaaatcttttgtggcattatttgtttatttatgatgttatgcctcatattcttaatcatgaatgcacacatgaacgatcgtagttatgtctctggaaaaatacttttgttctgttttggaagtattttcctgtgttttttttttttgcttatgtgatgatgagatgacaggatgtaggaattgttcattcatcatttaggccttcactggttatttgggttcaagatattattgaaaaactacaatctttaatcgcatgtcaaagttatgctggatacataatcccatcttatctctttttgttaggtagtcacctgccttcgtcaaccatcgcaaggacc

SEQ ID NO: 27302 - DNA, 914 bp, Glycine max
  Intron number 1 from transcript Glyma18g42640.1 (locus Gly ma18g42640) derived from phytozome v7.0 (chr-ID Gm18; pos 51936608 to 51937521)
caatatctggttcaacagtaaaaaggtctttaaattttatttatactatagtatcagagtagcctctgaagaactctgaatcaagagaaagaaaaacaaaggacaacttggaataccaaaacctcaattttgagtgagtgagttcattctttcttcttttttctttctctctgttctttccctgcttttgcggcttctcgccgcctttgccgttcggttctgcctttttctgcgccaattggtggcgcgcattaaagtggtgctccttttattttatataataaatatatattttgcacagttttcaagctccattcatcaacaacaacaacaaaaacaagtgtgtaacttaacttcattcattatctcattgcatttatagcttcctttgccatttccatggatagagaattcttaggcatattaacatttaagtgatttaacacatctctgccactgactctgctgaatagcattgaataacaaaggccatttctttagtttttgaagatagatagagtcaaagagagatcaaggggtagcttaaatttttcagcttttggagaaagagacatcactcacgcaccaccgaggttagtggaaagtgtgatagatatctgcattactgtttcttttgggcgtgtgaaacatggaattgtaaacacaaaatgaccactttttttctttgtagttttcctattctatctttttgtgtggtgggatttgttgtttttttgtgaaaaggctgcaaaggaattttcagttatctggatctggggtggtgtggtgtgtgttttttcttcttggctttcgttttctggggtagtgtttgatctttttttttttttgtctcattaagtgtacttttttcatgtgtttcagatccattttttcaagacagttgaagaaaaaaa

SEQ ID NO: 27303 - DNA, 559 bp, Glycine max
  Intron number 1 from transcript Glyma18g36350.1 (locus Gly ma18g36350) derived from phytozome v7.0 (chr-ID Gm18; pos 42673487 to 42674045 reverse strand)
ctgaggtaaatgaatttgtcatagaagtttcttttctatttgtgtgctttttctcttttaactgctcaatgttattgctttagaggtgttaaataaatggaatattatggtctatgttgttcatatcttgttaaatgttgatttatctgccagaagtgcagtttctattttaccttaattgaggaatattaatcatgcaaagtgcatctaaaacattgtctggagtggcattttgtagcttcttcctcaataatttacatgatttttctttctttgaagtattctatatcttttcaatagagatcccgatatttgattattattgatgttcattacagagattcagtaaatgcgctattaaaggattgttcgtctaaattgccattctttgatgtttgaaacctttttttcctacaactttgggcgaaaattaaaatatgtatttttctagacatgttgttgtacaaaagaaatatttttagacttgcagtatattaaaggctggtgatgttttcatgctgcaggtttctgaaagccagaaagttcgacattgataaaa

SEQ ID NO: 27304 - DNA, 645 bp, Glycine max
  Intron number 1 from transcript Glyma19g03390.1 (locus Gly ma19g03390) derived from phytozome v7.0 (chr-ID Gm19; pos 3392588 to 3393232)
gtccttttctcaataggcgcactattaggactgaggtaatgccatcttgctttgtcttatgtttggtttggattactattatgatcactgaattgatttggttgaggttttctgttcattgagttacctatctatgacttgtttttttatttgctccaactttttctttttgagtttaatcggcgcatgcacgtaaaagtttttacactttaaacggttaggaagtcccacgtctcctgttggtttggtattggatgacagtgttaaaaacctttacaatgtctacatgtatttattctttttttttcttctaaattctctaggaacataataccatgctgtataagatggattatgtttttagaattttgattgaatgagcaatgaagaaattcctgttacttgatgtgctaacctctacttttattggattcaagtcaaatgcttttagccacttggtgaaataagttttgttttggctttgcatgtaatggttaatggcatgtaggtatttcctagtacatagaaatcctgtctgttatttcttgggaacatttttctataatttttctctggaaattctgttttggagaccctaagagctcatattctcttggtcatgctgtaggctgtgaaggattgtat

SEQ ID NO: 27305 - DNA, 756 bp, Glycine max
  Intron number 2 from transcript Glyma19g23610.1 (locus Gly ma19g23610) derived from phytozome v7.0 (chr-ID Gm19; pos 28975951 to 28976706)
aggtttgttcctttattttgctatatatatatatatatatatatatatatatatatatatccacttttctttatggaagctaaattgattaatcaattattcagttcgtgctatagtgaaaagggcaatttgtgtttgtcactatgcactattcctatcgtgatatgtttgataatttgatatgcttgtgttggtgacttcaagtccgttgcgttgttatttggattgtccgctctggctcttgcgagcggcctacacggttttttctttaataagcattttggtcttgtcctttggctctagaagtaggcctaggccacacatggggccaacatgccctctaaatctcgaaaaggctttttaaagacaaaatggttaagactctgagaggtaaagcaaacaatacctcggatgcaagaactagaaaacttggggctggaataacttgtaaattaatctttatgattgatatctttgttcttggtatatggtgtatattctatcaagcttcaggcatatacaacttatggaaggctagaagtttttagaagttgtcgtgttcctaagttctagatttaaaaatgctcaaaatgttgatggttagaatgttgaacaagtcacaagataatatgaatatattcattgatttagaaaagatcactctttttcttttccttgttgaataactatatgatgatatatctgcataaattcattagctaaagtccattctgcttcattttttatttatttcag

SEQ ID NO: 27306 - DNA, 998 bp, Glycine max
  Intron number 1 from transcript Glyma17g23890.1 (locus Gly ma17g23890) derived from phytozome v7.0 (chr-ID Gm17; pos 24019132 to 24020129 reverse strand)
aagaaattgtgagtagtttattaataagaatgtggaacttacctgtagattttttttcagagaatatttcactaacattgaattttagcctgcttagctagttaatgtatttcacttctgttgatcagatggttgtatttcactattgttccctttttaatgccattcacttggtggagcataggtaaaaagtgacaagaatcattgagtttagttggaataaatgctgagaagtgaaactcaattgtggttgaatttgattgtgtggcagttgtggcatagactgtttgttattgctggactggtgcatatgaatgtgatatattatagtgttacctgagattcccgcctcgcattgctattccctagtatttgcagagggattggaaatctctatgggagtatgatagtggcttacaacaaatatggtctataggaggaataggttgggcagcagagaatcagtggcattattctatgtaacaaaatattaactactgttacttaggtaagttagctaactaaaagggaagttggtgaaagaggggtaccaagagaggagtagcttgtattttgggaattcaatagaagggatagttacaggtctcttgaatacctagagtgtagagaggagatttattctattgtacattcttgatcactgccctgtatcagattgatacttgtcattgggtgttctttctgtaataaagattggctgctttccctaatttggaatatctgtcgcattatttaaaatgataccttattctcgatagtacttttaaatgtttcttggaattatataaggataatattgtagggaaaacatgtagctcagattagagctatacatgataactaatagtaaatagtacagctactatttcactggatgttattatttcatgctctctaacttttaacttttgaaccaactagcacttatgttaataaaaattgactttgtttttcttattatgaggtttagagttcag

SEQ ID NO: 27307 - DNA, 634 bp, Glycine max
  Intron number 1 from transcript Glyma17g31920.1 (locus Gly ma17g31920) derived from phytozome v7.0 (chr-ID Gm17; pos 35111843 to 35112476)
catcactacctgttactgttctaggcacaggtttgtttcaacttattcttgctcaaatgtaaattcaggtaattgaatattcaattgatagaaaaaaaaccaagacaagaatattggttttaacttgatggctatatttaagttttagatcatttttccagaatctttgattcactttacaaataatcgtgaatttgtgctgcataattttcttttgtagacatcgactgtaaacaaataaacaaagtataaacctgtgaacagaggaaaaaaaatatttatgaggaagttcaaatctgcaattgctgttgatctaagaaatcctccaacgcaaatatcaaatgatataaagataattaacaagaaaacatgcctagaaagtagggtattgtgtctctctgttttatttgccttttaaagtattgtttaggtataatgataagaactataaactgagtaattcattcttgctaggttgtgttatttaacttgagttatagtttggtacctgcaactctgctttattatcaacatcatcttttaattcaatctggtagagtgaatattattaatagttggttttaatcatacttatgtcttaacctgctttacaacagaacataggttgtcttgg

SEQ ID NO: 27308 - DNA, 1020 bp, Glycine max
  Intron number 4 from transcript Glyma20g25590.1 (locus Gly ma20g25590) derived from phytozome v7.0 (chr-ID Gm20; pos 35251677 to 35252696 reverse strand)
ctgtcacggtttggtaagttttatgcttttggtagtatcgattgatcattagccattttgcctttatttgttattatattcttattcttgtctgtttgacatttgtcattgcctaaactacaatgtccaatcattgtttaatggggtggggggaggtataatatttggatttggaaattcctgttgtagcctgatattatattatcatgatgttcatctatggaaggtagctttcttctattctgctgttgaattggccaaatattaggttaatcattagatatcaagactttgaatcaatcttcagtcaatgtttttactttgggaggaaaattctatgcaacaacttgtctatgaaaatcattagcctactatctattttttcaattttgattgagtcactgacaataatccatatcaatttcttagcccaacttgaatattcctcattcgctattaacttacttgaaacagaatcaactataaatcttgacaaatcacaataagatcaaacttagaactttatgaaatttcatcgttatattgattgaatatatgatcaagtataatcctattaaagatagattacatattaaagtctttatacatgattagtcttctgaataagaggtgacaaaaaagtcaaacaaatgaatttatgtttttttttataaatgaaagtaggattcaatctgtattatatctgctggctgatggattcttacatagaatgatcttactcccaaaatcacttctacccttctattttgccataacacattttttgtgttgcaactttggtagctacttaaaaaaactaatacacagtaacacatgttactagtaagcatagaagtgtaaatctaggacaagcagggcatcacctctttacatatactgacacatctgtattttcatctgcttagacatgtataaaataaatatgtaagttatttacttaatatttgttttaatttcatgtaaggttttgaaggaaaagaatccaacttggctgcagta

SEQ ID NO: 27309 - DNA, 854 bp, Glycine max
  Intron number 2 from transcript Glyma19g35140.1 (locus Gly ma19g35140) derived from phytozome v7.0 (chr-ID Gm19; pos 42694586 to 42695439)
gttgtgtgcttttatcttttacctttttactttgaatggaattatcctgttttaaattttattttggacaaaaaattcagcagcagaagttaaggttagaggcaaaacttgtaggtgcataatctagagtcaagacctaatatttaagtgatttattaaccagcaaatatctaatgccagacctagcagctatttctttttatgattttcctattcaagttgcatatcattgttgataattagtgttttttcatcactggccatataagagaaaaagaaacgagttttaattatctacaggaagaaactttacttttcatgcattggtagtggagtttaaactttaataaagcagtaaacaagtggtctagtttacatgttcctatcaacagaatagtttattaccaccatctcaggactaatagagtagatacataatgctattttggtatttctgttcactttaatttcaagtggcttgatatatagccaagcttaaacttgtaatttgatatggttctcaatcattgataaattgaataaggagcacgactttgattttggaattttgagaccatatattttgagccaattctgtaaatattctttccttcagttattgtaaggattaaaattgatgttgaaactgttctgttgatggatgttctttatattactaatccaatgcttaatgtatatgtatgagtctttgaacttttttgtgttcgtaatgcttttgctattgttcatgaacacaccattatcgaaccaaattatgactataccccattcattttcattttttattaccattagcagctgccttgtctgctgaagaagaccgactgtggaat

SEQ ID NO: 27310 - DNA, 804 bp, Glycine max
  Intron number 1 from transcript Glyma20g30140.1 (locus Gly ma20g30140) derived from phytozome v7.0 (chr-ID Gm20; pos 38856439 to 38857242 reverse strand)
actccgtcattggcacttttgcctttggtttcgttagtgcctttgtattgttttttagatgttgttctgattagaatttaagttttattttgataattacataataagtgtttacattaaaggccagcttaggatctcaagatgaaaattcaattctgttctgagaacagcttgaaaaatttccatataagtttcttccttattttaatcttatggactttacttggttctagctaaatactgaagggggttcctttgttctcaccgtccctaattgaattttccttcatcttacttggtttttagaattttaatgattttaattttcttaaaatcataattcataagcaagatcaagaggatctagctcggttgattgaataatgtacttgagttgttgtgaactccctagtacctaactgagttcaatttctacggataaaaagaaaaaaaatcataagcaagaacaaagccttgtgctgtgtatttctcagaggatattgcaggaaagcttgcttagagaatagaaaccaactggtttcactagtataaagtgaagggagtacactttaattatatatgatatataactactaattaaaaaatgcccaattaatgtatttgatttcattaccattttaaaatgttatatacgtatgtagtttgtgagtgtatttacatgtcttcatcttaaagaagacaaattcaaaagggaagctgtagaaattgtaattgttagttgtctgtttttttttttaaagaaacacaaaatctaatgatactctataaaacctgtagcttggg

SEQ ID NO: 27311 - DNA, 889 bp, Glycine max
  Intron number 2 from transcript Glyma18g53840.1 (locus Gly ma18g53840) derived from phytozome v7.0 (chr-ID Gm18; pos 62120258 to 62121146)
cttctctgtctttgcttaatttcagtaaaatatcaggttcaccatcttctgcacttctgttttttgatgctaaaaatcttgccatttttggtatgaacttatgtgagaacaaagtacacagccgattatcattctttccccagttttatatatatatatatatatattatgctgggatgattttatccccttttttcttttcttattccatataatgtgatggaaaaatgatgatatttgttacaggatgtggtaaaacgtgaagtttaataattttgcttacttatttcgcctattccttttttttattttttatatatatgccatgccatttgaagacaggtggatatgttccctttgtaacctacgtaggttgttctaatacgtttttcttcccaataggtaattccaatgttttaatttggttctttgagtcaaagaccctctttcaaattatcgatcaaataccctttgaaatggatcaaacctctacgtgaaaccttcacaacaaccaaccaagacgtgaatctagattcctagaatgctatttcttctttcttaataatggaaataagatttcgtaaaactgttcttctaggacctttggacaagactaaataatattttactctgagttttgcttaaccaattgttggagaatcatctaccgaagataatattaagcaagtttttatgagacttagtccatttttccaatttcttaagaaaaaattcattgttgtcttgtgatattatgacatagggtgtgaaatatattcaaaaggatgataacatgagcatgcagctacaccaagcatgcataatttatattatgctgtttaacgctttgtaaattgttttaacagagtgcaaaacgcttttgaagact

SEQ ID NO: 27312 - DNA, 714 bp, Glycine max
  Intron number 1 from transcript Glyma19g39640.1 (locus Gly ma19g39640) derived from phytozome v7.0 (chr-ID Gm19; pos 46258181 to 46258894 reverse strand)
aaccaagaagaaacgaaatcttcctggaaccccaggcaaatattcagctgcctcaacttcaatttttgtttctatcccgtaattacggcctaacaaatcaagatatcatgtttgagaagttgaattttgctttgaaatgaaaatcatgtatactttctctactggtcaaattctaggctctccgttgcttgcttaaacattgaattttgtagtttggtagaattagaaggtagtcaagtagtgataacaaataacgtacactaaaccaacatagtatgacatggttatcagataatcttgtctcttaacttaagcctgcagttagggggtttgatctctatgtcctaatgtcaggaaaaacatctattgaaaaaaatcagtcacttaatgagatcagtctttggctcttagctgggaattatccttggttagaaaaaaaaaaaacagaaactgtaaacaactgttgctttattaagcttgatattcttacttttgtttctggctatcaaacaattaaagttaaaaagaaagcatcatgaaatgacaaaagattccatggttcgaattctatgtatactcttactctttatgaaatggttaatctgctcaatctttcctagttttcagaagagggactaatcctctagtaatggctagcaatattagtatttgctaaatttctgctaatgggtgtattttatgaaatagatccta

SEQ ID NO: 27313 - DNA, 933 bp, Glycine max
  Intron number 1 from transcript Glyma17g15060.1 (locus Gly ma17g15060) derived from phytozome v7.0 (chr-ID Gm17; pos 11793969 to 11794901)
cttgtgtctttcacacaggactcttcgtcttgaaggtacataccatttcatttttccaaagaaaaaccctacaatttaactatctactaaactgcaatatagctccaaatttcacataaattattgctacctttaaatcgtgttaaattaatgcttcaatattgtccttctctatggtgtaaagcagcttaataaatcaatattctaattaaggtgattcatatacggggaaggaaaatattgactcccttttggatggatttgattaatcgttttaatagtgtatattacctcaaaagataaataatagtataagctgaagaaagtaatattatcagtgctttgaaaaaaggaaaatgttttgttgataggtgctcttaggacttaggagactcgtcaggaaaataagaaaatactgtattcaattaaataaaattattatactaagaaaattatttcagtcttgattgatttgatagcatttaatagatcacatgtcagttggcaaatatcttcttcttctttttttttataccgttggcgaatatctgtggtagatatctataaagtaaagtatattaaatgctactccttaactagcatgacacacttttttgtgttaaatgtttcggggagtttcgattctgaatgaattaattttataaaattaattttgaaagtgatgttatctatatttgtatatttttattttagtataaatataaaagttatcgaaattattttaatttaaaattaattctgaatcaaaattaattgttgaatatgtcataagaaaaaaaaattattcaatataaaattaaacatgagaacatttatctaaaatcatattaaaagcaattacacatgaaaccaaacacacacttgattatctctattttatagtttctaattatttgatatttgcagccatca

SEQ ID NO: 27314 - DNA, 369 bp, Glycine max
  Intron number 2 from transcript Glyma19g26950.1 (locus Gly ma19g26950) derived from phytozome v7.0 (chr-ID Gm19; pos 34126085 to 34126453 reverse strand)
aatttcgccttgtgtcgaaatcacttccttccgtaaacaatacaacagtatccactgtcattattactaaaaattataaacatacattcactccttttatcgtctaaattttactttttcttttctttctctacctttactgctcttcttttttctctcccttctttttacctctaaatggggtgaacatttataatgacacttaccatgactctaattaaaattgaccacatttaaagcaatgcattttatttcaattaagcttacgagttgcatttggtttttgagtcttgtgtgtgagtatctaatgactgaattttgaactctaatgtaggtgtcttctgtggctgtgtaccgcatattcgagaa

SEQ ID NO: 27315 - DNA, 475 bp, Glycine max
  Intron number 1 from transcript Glyma19g26950.1 (locus Gly ma19g26950) derived from phytozome v7.0 (chr-ID Gm19; pos 34126647 to 34127121 reverse strand)
tgtttaccaaacagtgccttgggagctgccaggaggttggtctagaacacaaacacaaatcctctctttccatttgctttcaatttattttttattttttgtaccatctgactttctagtggaacccaaatgtatacctattcaaatttcgatcttttaggttagttacaaaactaatcattagtttcaagtttggtcacacttaaacttttgtgttcttcataaaaatttattctacagggatccaactaagcctttgggtcaagtttgatgtgtgttgtcgctgaattattgtttttttttttattgttcttttgtcagtgaacaatgtgtcttgtcttaaaaaaaaatccaatttttccatgccccaatgaatgaacaaaccagttggatcaaaatggtgttttgattgagtttaatctcgtttgttttcttttcaggtggtaataagtatttgaattggcagaggtttttc

SEQ ID NO: 27316 - DNA, 788 bp, Glycine max
  Intron number 1 from transcript Glyma19g35000.1 (locus Gly ma19g35000) derived from phytozome v7.0 (chr-ID Gm19; pos 42598179 to 42598966 reverse strand)
accctctcgacttggtctggctcgacacaaccaaagtacgttgtaatctctctcactctcgcttcgtttttcttacgtcgttttggattctactgcatgaggatcaaatcttgctttttctgaaacaaaagtattaaaatcacaagagatttttctttctcggcaatcgatgtttttgactcttaataattgtgactgttgtatcaatttgtatcaattctgtacgtgtgtttatagtgacgacgacctagacactagaagaatgagtctgagagaacatcgacgtataaagagtttgtgcatttgctctgcttggaacgtagttttagcacggaaatgattcacgcactcatatgctactatacacctaaaaatagaaagaaagggatataaaagagacaagtatcgtaaggaatctatgataggtaatgtgatgctacaaagggaggcatacagagaaaagatgaccgttaatgaggtttttgtactattgacgtgtccatatatgattacttgcttagcaccgttgtccactgtgtatgaattttttttttgattggcaaatgttaatggttaatttgttagtcttttttagtgggggactcgaacccgcatcctatccctccctcctttctcccttcaccatcaagccaaccttatatctcctgctgtgtatgaaattagctctaatgagctgcgatttaaagagttaagagtgtggtatgtgagaaactgagaattaatgttttgcagcttctttctgctgtcaattgctggcttaagtgcat

SEQ ID NO: 27317 - DNA, 648 bp, Glycine max
  Intron number 2 from transcript Glyma19g40650.1 (locus Gly ma19g40650) derived from phytozome v7.0 (chr-ID Gm19; pos 47005593 to 47006240 reverse strand)
ttgattcttgacctccattcccgttggggcaacaggtattatcatttatgtttattattcattaaattttttaggttaaaatattccttggttcatgtaatttttcttatttttagtctcttgtacaagaaaattgtaaattttaatcccttcacatgcatccatgtttgctaaagttttggttcgcgtcactactaacatatatggaagactttttaggttttagtagtataaagcagccacaaacactttctccaattaatataagccgctaaaaaaatgttgtacatacattaaaactgaaaaatgtttgagaaacactcaatataccatcatatacttaatgagaaaaatatagataggaggtaaataaaatctgattaataattatttttatcaagaagcaaactcaaatattattcaaatgattcaaccttaatttcaacagcacatgaattacttatgctgaatcccctaattaggtggtgatttcctgcacagaactgaaacttaagatgaagcaagcaaatagcagtttgaccaatttttaatctgttagtgatagaacttggtaattgaagtgatgttgtgttatttgttttataaaatgaaggtggtcgaaaatagctgaacatttaccaggaagaa

SEQ ID NO: 27318 - DNA, 874 bp, Glycine max
  Intron number 1 from transcript Glyma18g06690.1 (locus Gly ma18g06690) derived from phytozome v7.0 (chr-ID Gm18; pos 5286730 to 5287603 reverse strand)
gagggccaactgggtatcttgcttggaaggtatgtaagcatttgatgtctgatgtctagcttttttttacttggttggatagttagctctcgtttgaaacttaagaattgatggatgacttagttgaatgaggcattgtgggggttatttgtcctttggttcccttagatgttttgttaattggagcttggaatttacatttttctggtttgcataacttggtttgtgttggtggtcttgtctgatattgctccggttttagtcaattgatgacattgttgctggtggtttgatttatataattaggttgttctttcaaggaggggaaatgtgtctcctcccacttgtgttttttatttttaatatctaactatgagtggaatggaatggaatgcgatggaaaggaaaccaaataatcttgggttaccattccctctcttccccgttcaaatgtagaatggagctcctaagttattatgaaaagaccttttggaaactagaaaagcttgttttttattgtttgttcaacttcattttcaaatttactaccttgttcaacgtgtaagtcgtatttgtagcaagagcactctgtgacttgttgctgactttgtttttagtatcttaagcctataatgtcccatatgcatttttaccagtttttctttcctagggtcaaagaaggttagggatttattttttcctgattacctgttcaattatttagcctggtttgtggaacgatatgaagatgacaaaattgtattgccccattgttataactcttcttggatacttgttgcagtttcatttcaggactatatccacaagtgttaatttgaatgttttcttttgcaggctgagggtgactatagga

SEQ ID NO: 27319 - DNA, 993 bp, Glycine max
  Intron number 1 from transcript Glyma19g38070.3 (locus Gly ma19g38070) derived from phytozome v7.0 (chr-ID Gm19; pos 45085125 to 45086117)
tcggggaagagaaagaggaagttgaaattgtaagttatattcatccttagtcccaatttgaactttgcatgcttatagggacatgaagcatttccacagggtttcaatgctggatcagtacggatttgtaggatgtgttggtttttcttcagttctgtttttgctattgagtttgaatttcgcaaaaatgaaaaaaaaagttgtgtggccctaattgacttagtttgtgattgagaatgtttgctagggtttgtggatcggatcagtgttggattttgacaattgagttgaagaatgggttgacttaatttgaatggctgagaattggaatttgttacttgtaaatatgttgtgtttgatttcagttatctagaataatattatattatacttactacatgtatgttatctccaatttgatgaatttttcatatttcattcacacttatttactgtatatgaagtttgctattgatatcttgtcctttctcttggagctgtgattggtgcgtcatgactggttctatgaataaccatttctagggttgaggcttgtgggatgctcctgtagatccatatcattggtatttatagagttcttaatggtggcggtatgatattgtataattgtggtattgtatacttgtcatcacataagcctgcaaatttttgtacctcacagaaatttacaagttttgagaagagatgcaagttggttgaatgtctatgccattgttctgtttattttttttttcctgttcttcatttgatatttttctaaactgctagaagttaaattggtatacatctttgttgggatggaaaactgtttctagtttccaaattctggctcttttatcattcttgttgcataagttcatttgttgaatttgtttcacttttatcttgcatgcacatctctaatacttattatttaggttaagcgatgcaatcacagataatagaagaacagttgctgaggtgaaaagtgaa

SEQ ID NO: 27320 - DNA, 723 bp, Glycine max
  Intron number 2 from transcript Glyma19g32470.1 (locus Gly ma19g32470) derived from phytozome v7.0 (chr-ID Gm19; pos 40210931 to 40211653 reverse strand)
agacagagaagttcaaacgtacagcacaccaagaggttggtgtaacaaatccttcgacctgaggaatcctaagtgtcaatcatgcaaatatttatttatcttttgttttaatatatatatatatatatatatatatatatatttttttttttttttttttgcatggcatgaatcagcccaacttaactatttgtttgtgcttttcaatatctttatatttctctttcatgatgatctaggaatatgccattgttggctatgcttcttttgtactacaaataaacctgtcatctggatatctagttgaataatgtaattgaatctccactgcagaaacaaagacaatgactttagtaaatttgcattgaattaatttcattgatgaaatctggtaggtgatatgctgctcattactgttgtctcaagtgttgatcaaacttccagagaagaggatatttgttttgtcaatgttattatgctcactaaatgctataaacaccataagacatgtcattttcatttttgagccaagtgccatcttaatattggttttctgtagatatgagtgtgtattcataatatatttgcctttaaaaaaaaaaaacagtattcttaataatgatttcatggacttcagtcctaagaggttgtgtgaagctgatttcaaatgattattttctgtctacccacatgaaagtgactcagttcctctttccattacag

SEQ ID NO: 27321 - DNA, 459 bp, Glycine max
  Intron number 1 from transcript Glyma19g32470.1 (locus Gly ma19g32470) derived from phytozome v7.0 (chr-ID Gm19; pos 40211684 to 40212142 reverse strand)
gccttcctcgttcttcacaagtccgagaaaaagaggtgagtcaatggcacctttaactatttcccttaaccgatagaagatccatttgtttttccagtgagaaaatggacaaccccatgaggaaaaaataattttttttcttctggattattgtgttcaattgttggagttgaggcctgaaacctttcatggtagttactagttagcttttcaggttcaattattttcctggtgaactgtagaacatggatggttggatattgttttttttttttttttttttctgttaaatgatggacaatccgagagagaaagtttgaaaatttgtgattttttttccctttctattttgagatggtggtgtttaattgttggagttgaaaatccagataattgagtagagttagcttgtcaacttcgattgttactcattctcataatttcatatcctcggtaggt

SEQ ID NO: 27322 - DNA, 438 bp, Glycine max
  Intron number 1 from transcript Glyma18g46730.1 (locus Gly ma18g46730) derived from phytozome v7.0 (chr-ID Gm18; pos 56434424 to 56434861 reverse strand)
ctgttggtaagaaatgttttaacatctaaatttgtacttctgaaattgaccactttgcatttgtgtgtatatctatatatccacaggaagggtatctttatgctaaatatagtataacaaaatgtgtttgtgataaataatttggaatgaaaaaaattggaatatacttctgtgctattttatatatcttttctatggtcatgtttacttttagaagcaatgctgttgcaaatgttttctatcagtaaatgttttacaatgttttttagtacaaatctgtcatcatagtatgctttccttgtgtatagttatcaacttatcatgtaatattttgtagttcaactgtcctgcatttgcggaaaagaatcacaataatctttgaatttcattttgttttctgcaggtgctgcacttaccaagaacaagtttgaagtgttg

SEQ ID NO: 27323 - DNA, 636 bp, Glycine max
  Intron number 1 from transcript Glyma20g27580.1 (locus Gly ma20g27580) derived from phytozome v7.0 (chr-ID Gm20; pos 36718919 to 36719554 reverse strand)
tgccactgatcaggttaccacgcccattggagaaggtttgtttcagtcctcttttttatgcacataggcacaaacaaataaatttgagaaaaaggataatgcatataatatttaatcataatttatcatatataataaatttattaattttaaaaataatttaaatgataatttataatataataataatataaaattattttatcttatcaccacataaatatttaactcaataaatttaatcatgggataaaaaggtttgaaaactagctactagtacttaacaaaaattcactttttctctttcattttatttaattattaccttatttcttcttcttaattatctcttttgttattctctatcacattatttcatttcactttatccctacaatataaggtttaaaagttacaggtaattaattatactactggttattttattaggtttacgaatttcaatatttttattccttcgctatatcatcatctatcgcctgtttagacttgtcaaaatatctcgtaacctcaaatcatcaactaggattttgttattaaaaaaaatcaacttgggtctactttttgattttatttccagaaaagaggaacccatcacgaaccatcattgcgata

SEQ ID NO: 27324 - DNA, 952 bp, Glycine max
  Intron number 1 from transcript Glyma18g05230.1 (locus Gly ma18g05230) derived from phytozome v7.0 (chr-ID Gm18; pos 3954680 to 3955631)
gaattcacggcgaccaggtctctgccatgttcttttctgcctttgctccttaacagtgtgtttgtttttacgtttaaaatgctcaaactgatgttatatccaatccaacattttttttaataaaaaagaagagaagtgccatgaggatgacatcccgattgtattgacaccccatcaacatctccctgtaaagcacacacccatatatcattacactgtaaaagaaaatctgaacaagcgtttgagaggatcaaattgagcccaaagaatcaaaactaagagaaaacaccaaacggaacacactaaattgtgccattaaattgatttgcaaaaaataaggcttgaattgatttttaaattttttatggttgaatagtgttttacttatataggttttaaaatcaaaatgtccatgtttgtatacacaacataagggggtatgaaatgagaatttttttctaaagtgagaaataaacattataatctgagtcatgtaacgttgtataaatgataagaatacttacaaaaagtctcatgtacatttttttttattttgcttttagttattcgaatgtgatttaatggtttatatttataattttcatttcttataggaagaattttgatttgatatgttctccacaacttaaaatcaaatataatataattgtatacgtttttgagggaaaaaaaaaaaactcatttgatagtttggtatgaggattttattctaccttttcacttttaataacaaaaataccaacttattttcatttgattttttcttttcaaaagtttatacaggaaatagtgaaaacaaaatataagttgttttctttccatacaattttttgaaaacatgaaacatacaactcttaggaactttgtagttgttatggtgaagttttaattttgggtgatgcattttggctgctttcagacttactctgag

SEQ ID NO: 27325 - DNA, 789 bp, Glycine max
  Intron number 2 from transcript Glyma18g43080.1 (locus Gly ma18g43080) derived from phytozome v7.0 (chr-ID Gm18; pos 52413809 to 52414597 reverse strand)
aagttttctctaaggtatcgagcaaacatgttcattgccacctagatatatgaattcgtttgtatacattggaatctattttctctctcttcaaatcactctattttattttattgtcattaagttaagaaggattgaattatttgaataaaattaaattttattccaaatgtgaaatgtatgcatgagtataaagaagaggatatatatatatatatatatatatatatatatatatatatatatgatgtgataggaaatgtagaaagtcataacaaaaaaaatatggagtgaaaataagatgaaagaaaaattgagtgtattataaatataataccctaatgttctattaaaagaatggagaatttggcaggtaaatatgatatctaaaatttgtcttaaaagcagcatggacctacatcgagccattggcctcactcaatttcaatttcaattttaatattactacaatattaactatcaagttgttatttaagttctcttcacacacaaaaaagaaccttaccattaagttttatttatctacattattcaaaataaataaatcaagtgaggtaactagataggagatattattttgtcctgattgtccaacatctttggattcgtcactgcttaattgaaaagtgcattattttgtttttagtattgacggttagcttcatctttagataatgtgataaattcttttttttttttttttgggcgattcttgttcatgcatattgaattgtaagtagaaacccttgttattttcttgaccttagg

SEQ ID NO: 27326 - DNA, 639 bp, Glycine max
  Intron number 1 from transcript Glyma18g43080.1 (locus Gly ma18g43080) derived from phytozome v7.0 (chr-ID Gm18; pos 52414627 to 52415265 reverse strand)
ggggtgctattctggcaaatttgtattctagaaaggtctttttcttttctcttttatcatttgaattctattaatcgtgacacattatatattctgcttttctttatagttttctttcaaactaagtgtttagattcaatatacacttcaagagacaattaattattaccaaactttgtaaaatgtgaaaaacttttattaattactattataattaatttaaccaacaaggtccaatactaaataattggattctttatgtatgttattactggttcgatttatgatgatgcatatgaagaagattctattaagagaagtaagattcactttcctatccttggtaggaattattctctcaccattcattgactgatattattagtatatatatatatatatatatatatatatatatatatatatatatattattgaaagactagtgaaaaataaagtgaaaattttgaagttttaataaaaacatatcgagtaaagttggaaaagaaaaaaaaaacaaactaaacactagccaagtatttgatttgatcgatataagtgaatgaacctgtttttcttatatcttgctgatgtggccatacaggcggacataatattgcgaggatactcaggttggaa

SEQ ID NO: 27327 - DNA, 625 bp, Glycine max
  Intron number 1 from transcript Glyma18g18230.1 (locus Gly ma18g18230) derived from phytozome v7.0 (chr-ID Gm18; pos 19612670 to 19613294 reverse strand)
atatcaatatcatctccaaatacgacgtcgttcaggtacaccttctcaattctcattatgtggttccgtttcgattatatatattcccaattaattagtttttggtctgaattttttttttacaaacttcatactataaggacctttttttcttaattattttagcgttgtgattttagcataaaaacagaataacaggattcaagagaataacagaaaaaaaacaaacccaagaggtgtgtttcttgtgtacatcattgttttgtctttttgtattcctgttgcttgttcttgactctgaatttccatatttttttttcttctaatgatatgaaattgcgtttcccattgggaaccttcgttgaaaagcctaaatttgaaaatcagggaatgacaattcattgcaaagggattgaaatgaaaaacaagtgtttggtttggattaaattttgaggaaatgattattgtgtagatttgaaagctttttcaagaagctcacaaaaaaaaaagtaattgaaatgagcttaaactaatgtgagtgaattccatttctcaaactgagtaattggatatagtaggattatttttgggtgtgtgtggtgtcaggttggggttttagcacaag

SEQ ID NO: 27328 - DNA, 758 bp, Glycine max
  Intron number 1 from transcript Glyma20g35340.1 (locus Gly ma20g35340) derived from phytozome v7.0 (chr-ID Gm20; pos 43626386 to 43627143)
taatctctatagaccttgccaaacagctcctccaggtttgttttgcacttctttaatttctttcaaaaaatttagtcatttcttctcaagtcataatactaccggttatgctcatgatcatttagctctcacttcatatctattttaagttgtaactgtctagaatgcatgactctatggtctatatatatatcttcatgtggccatccaaaattaaaagtcaaaaggagttcattattcatgtaataggatgttcaatataaacatcaggtggggccacatgcataaatgtttcttgtggcaattttctgccccagctgtccacatgtccagttggtcatgttcttcgtcaatattggtggcagttttgttaggttagcgattttgccaccctatttaatacggtacacgagcgacagtatccaaatgaaatggacctttcgtggatgtgtttacgtatgctttaacaaacagttgttcacttgtacaattgggggaaaggaagctttcaagttaaaacaccgtatcattaaattgaaagttataaatgatcttaccatctatacttaaggatcctgttgtctatgacatttataataatagtgactggatcaaaagaaatttaatttattgatagttttggacatattagtcaattttagtgattatctcaggattgctctatagcaaaattttaagggctagctattaactttttttttatgataatttatacatacaggttcatccaaactctt

SEQ ID NO: 27329 - DNA, 581 bp, Glycine max
  Intron number 2 from transcript Glyma19g35370.2 (locus Gly ma19g35370) derived from phytozome v7.0 (chr-ID Gm19; pos 42904418 to 42904998 reverse strand)
atttttaggttgaatcctgttttgttgtgaaagtgatgtttgatgtcgattaacatcaatttgcggttgctggattgaaaattgacaatatttttgtcatgaggtttgtttgaggcgtgtgaagttagctaggcgctgagatgagatcatggtattgggagattataatacatttatgttgcctagtcaatatgggggaatgttgattgggtttgttgatcatggatacttggcagtgtggtacttgctggaaaatttgtgcatgatttggatggatggtcatggagcatgggagtttgttgtcaaaattttgtagtttctgaccttgaatgtcatacatcttaacactatgtttgagtttgacattgtaattggtcatgctactataataagctaagaatccataagtttgtcaatacttgaatcatcttcaaatttgttttcaccgaggcagaaatacactcttccccttttcaagttgaatttgaagttgcacgtttttttctgtagaatatctctcttatctaatgtgttgaatttggccagtggtagcaacgtatttaatttgcttgcaaggaggg

SEQ ID NO: 27330 - DNA, 322 bp, Glycine max
  Intron number 1 from transcript Glyma19g35370.2 (locus Gly ma19g35370) derived from phytozome v7.0 (chr-ID Gm19; pos 42905046 to 42905367 reverse strand)
tcttcttcctcctcctcgcacaattccaacagcaggtcgcgcgatttgtttcgctttctttttttcgttttcttttcggaacgaaaattgattttaataatccttttgccttttgtcaatcttggtttcaatttatcgtttcgcgagacggacgggaattttggattgtttgttgtgtgatttcggggcgattttcaatttcgcctaattctgtttttgtttgtttcttctattgtggtttatatgtttggatcgctttttgattaggatagtggaatgataataatgttgttgtcttttgaaggagctgaaattgagcttg

SEQ ID NO: 27331 - DNA, 620 bp, Glycine max
  Intron number 4 from transcript Glyma20g39280.1 (locus Gly ma20g39280) derived from phytozome v7.0 (chr-ID Gm20; pos 46647362 to 46647981)
agcaaggctcataaaagaattttatcagctggagggtaagttttggggtttccggtggttgtggtgggtatagagaaccatttgacggatcttatttatcctaaaatattttttgctcatctcctgttatgtattatatatcaaatgacatttaacttggtttgtattctttttaaatctgtaatttgctggtcatatcaacggctgacaatatcattaaagttttggcttgctggcagattgtcttgcacccttatgttgcttaagtaaggagcacaatttaatcggttgaaaggctgtaaaacaatgaatgtaataataaatcccacacctatgtttatattgattatgtctactaataaaacataatacacagttattacttgtataagtgatatcttttttaacccttaaaaactttatgtaatgcttgcataagttcctgaacttctatttttcatatgaagtctattatgtggagaactatacttaataagattaatatttgagtcagagaatctgtcttgctgtgtgtgttatgcactttttaattcttaggctagtgtttgtttgttctcaatcttctctagaatcattttcaaaaatcattggaagtcagc

SEQ ID NO: 27332 - DNA, 720 bp, Glycine max
  Intron number 1 from transcript Glyma19g42980.1 (locus Gly ma19g42980) derived from phytozome v7.0 (chr-ID Gm19; pos 48797090 to 48797809 reverse strand)
tttcaaggattctcctactcttctctttttacctggtaaataaaaaaacttacacttctgcactgcactccatgcatttaatctcttgcagattttaattgtcagactctgtgtgtgtatgaggcttttgagggatgatggagttttttcttttttcttgtggagacatgttagcaacattctttctaacacactctttgttatccgctgaaattcattatttaatgaacctcagttttgattctgtagttttataaaaaaaacaaaattaaccattaagagaggatatgttataacttataaggagtgttttgctagtgctcttttcttctttttttcttttcttcatgcttttctaggagactgaatgattttctcttgatgttggttccatttctattcaactttacggctgtagttgattgtttttaatgtttgattaatctacaatttcgttgaaaggggcaagttgcaacttgtgttacttggttccctcagaatgcaggtctatgtaaatttgacctcaaaagtgtaaattcatcctaaaagactaaaacactgatttgtaaagatgaacacttttagttttaggtgacagagtggcagaaattgctactttcaagcaccaacttgaaattgtgtattaactcaatgttattatattgaatgctaaaattaaatacgcagtgttaaaatttctttagtcttactcgtgcaggg

SEQ ID NO: 27333 - DNA, 705 bp, Glycine max
  Intron number 3 from transcript Glyma18g04390.1 (locus Gly ma18g04390) derived from phytozome v7.0 (chr-ID Gm18; pos 3129774 to 3130478)
tatagtatgtagcttgaataaaatttaaatcctttaaacatgacgatgttatgtacctgtcatttatcaaccatgtttctcaatgtgcaccaattttcttttagtaagaaaactagtgttttgaatttgatgcaacaaaagattaaattaattaaaaagtccccgttctgaaccaaatggggaaaaaatgatatacaagaaagggacaaactgtaagtctctttggtgattattggtttggatgctccagttcatttatgtgtgaaattgcccgataatgccaaaagaatagtactagtagttgctataatcagattttcaaccttcctttctctgtccttttttttttcttttataattttgttatctttatttgcacgtctatttcccaccttgtaatagcatgtttgttttcactggtgtctattccgtttcgcatcaaagagaagctaaacgtgtttctagtttcttcctctgtcaccaagcagatgaaaatgaaagttcgaaacacaattaaaactttgtcaatctaaaatactggttttctcgccttttttagtattcaaagtggaagtttactattattcggatgagggggcatgagtacgaagcaaaataaaatggaaccatatagttttttttccccagtaaattattacgatataatctatctatataatacctagggtatttatttacattgca

SEQ ID NO: 27334 - DNA, 960 bp, Glycine max
  Intron number 1 from transcript Glyma20g01140.1 (locus Gly ma20g01140) derived from phytozome v7.0 (chr-ID Gm20; pos 795419 to 796378 reverse strand)
tctttgtatattcgccatttcctatttcttcactcgtaagttattccctatcccccccattccttctgtcttctttttaatctcacgttctcacaatgattccttgttgttgcaaaatgaaccacggattttgacagatactgctgacatggttaatgtctaaaatatacgacacaagatcaccacatacatacacgaataaggagattttaattaaatgaaatatgagaaacatataacaaaatatctatattaatggaatattcatttttttaaaccaaccttctatgttttctcaagtgtattgttgggtaaaggtgatgacttaagttaatcaagcaaacaagtaatttttgaatcagacacctaagaagtgtagtataagtttctgggtatgtcagtgtcggaaacgtgtctgacatggcgatactttgaacaagagaggtgtccatgcttcatagattgtaattgctgttttattgcttttctatctgggttttgctttaaggctccaaattttgagtctttaattgaaacttgcctttttcccacctgggttttgctttaagactccaaatatagagtcctgatcgaaacatgccatttttctataaccaaaacttagatgcagacatatccttaagtgcttttggtgttgtacttctgtcagaatttgagtttcaactcggtaagttatggtgatatttaatgcaaacctttattaagcagattatttaagtgaaactcctattttgattagagaacaacaccaatagtacctaaggaactgcatctaagttttgtccttttcccacctactgcaaaatttagagtctttaactttaaatgtaaattttctatttttctatttgggttatgctcttaagagttaggactgcccatttttatttattattttattgttgttctttgttgtacaccacagatacaagtaaatca

SEQ ID NO: 27335 - DNA, 644 bp, Glycine max
  Intron number 1 from transcript Glyma20g34150.1 (locus Gly ma20g34150) derived from phytozome v7.0 (chr-ID Gm20; pos 42604498 to 42605141)
tggcgaagccccgcctcctccacgtgccacgctcggtaattcacttacatgtcttcccctgatgtagactttagccattgaatgagacaatgaaatttgattttgttgatgtagaaaatggttttgtggattgaaaaggaagagatgaattatgcagcattgtacaagttattttgatttttcactattggtttgcataatagattcctataatttttcctgttatacatggtattgtgctatttatgctttaactattgggtgggatttatgcatttggtaacttgggggaaatttgatgcctgtacttcaatcctttgtgtttaaggaggagtatcaatgtgcttataatgtaatccattgtttgggagggaatgtagtttcattcttgctgttatgcttatagtcactctagaaaggattttgctaacaagtgccatgaggagccggttaaggagtgttcttgatataataaatgttttttttccaattaaaacttaatacttttgattccttatagtaaatggttagcatgtgccttctggaaaagatcttctgtttgattaagcaaggttcaatttggaaaaaagtgaactgaaccttcttcatattcttgtgttaaatgtatatcaggcgaggtgata

SEQ ID NO: 27336 - DNA, 393 bp, Glycine max
  Intron number 3 from transcript Glyma17g09120.1 (locus Gly ma17g09120) derived from phytozome v7.0 (chr-ID Gm17; pos 6752611 to 6753003)
gaagttatctacaaaatcgaagttcccgccaacaggtaccttgatattcttcatatttttttgctgcatatagaaatgaacaaaatgtgcttgtacgtttaatctgtcttgctgctagatatataaatgattaaatatttttaataatgttcaaccatttgttctcagtttgtgtaaaaaacaaagtttcaaaagtcataatgaacgatgtggcacaccattctctcattgcaaattgcaaattcgctgaattataaaacatgctgtggtaacttataaccattcaaagcacagtattagaccttgtctccattcataattttttctgacatcattatccttaatgcaaaaaatggttctaacttttttttaaataatctattttgcatagat

SEQ ID NO: 27337 - DNA, 832 bp, Glycine max
  Intron number 3 from transcript Glyma19g02470.1 (locus Gly ma19g02470) derived from phytozome v7.0 (chr-ID Gm19; pos 2201980 to 2202811 reverse strand)
gtgtcaaagaagcttagacaaacatttgttcaagagtatgtcctaaattcaacttattgttttgtagaaatttttatttgaatatatcaataaatgcattatttagttaaatttttatagtgcttgtatggttcgaagaattttatttgtttttattttaaattactcaaatgtcactatttttttaattagaaataaacctgccgtaatatttctccattgtttcaatctcacaaaaattacagtgtcattgttgcctataagtagtgcatggtgaaagtctttcatcttgattgtgcaggtaaaacaataaatgacattcacattagtttagacaaatttgttgtgaggctttgaatattcttgaaaattcttcatgggacaaaacgtatacaaattatgggcatgattgtaaaaagaaaagtgaccgacgatttcttaacaatctatgataaaaaaaaaatcatatttttcttcaaatcaaatgtaaatttatttctaagcctttgactttaaatatggaagatattttgttattctaatgatatttttcaacaaaaagattctgatggaattacgggattgaattacaagtgcttcatttaatctcgtattaccttgtcttattgtcctcgttcaatgaacaaaatgagaacaatcccatatgaatttacctttatgataatgttacatgtaactttttcttttggtatgggtttctaatttatttagcttaacaactaggctaattaattgatatccatatgctaggcatatatcgttgaattaacaagtaatattgccatgtatcagcagcaactaagcaccttac

SEQ ID NO: 27338 - DNA, 967 bp, Glycine max
  Intron number 1 from transcript Glyma20g24080.1 (locus Gly ma20g24080) derived from phytozome v7.0 (chr-ID Gm20; pos 33780687 to 33781653)
ccattgctcaggtttagttttcttcaatttctgttccaatttccaacgacaaacaagtatctatgagaatcaaattcagcttgcacatgcttgttagaattgaagtttcactttaggaatctatgctcaaagttaatgtaaacattcattacacgaattcacaaggtgaaattccaattttaattttaataagaaaacagcaccaaatatacttaaagaactatatctaggtcattcctctaggtggtgattggtcagtagtgaagctaggttatgtttggataaacttctcaatagatattatagactgtgttggttataaggtatcaaaaaggatttgcaggaaagtgaatatcacatttcttggtttggttcaagttttgacttttgaataaatactattctcatagttgttgattctgaggaatataaaatgttcatatttctcttgtttcttattcccatggtgaaaggtggatattggatatcttgtatttctatggaatgtaagatattttctactataactatctgttcccatttcattcttttacttttccttttcaactttttaattagtaactaaagactaattcaacatgatcataggagcaatatttgtgggcataatattcatggaaatgtgatttctaggcatacatattataccttgaaacaaacatcccgtaatgaaaacaaaaattaaggcaagtgaaatgaattaagttcttttcacaacttaaaatttgcttatggataaattaaaatcagcttttagagaagctaaatgaaagaaattctataaattagcttataaataaactaattttctcctgtaagtgcttattaagaagtttatgcttttcagttttcagttaccggttaactctttctggaattctggataaagtggactcttgtattgatacaattagtgggtgctttttaggttgaggctgcatacgac

SEQ ID NO: 27339 - DNA, 665 bp, Glycine max
  Intron number 2 from transcript Glyma19g36740.1 (locus Gly ma19g36740) derived from phytozome v7.0 (chr-ID Gm19; pos 44000485 to 44001149 reverse strand)
ttcaactctttcgtggtgacaccatcttgatcaaggtattgctggttttgtgctgtaatatggtgtttacactgtgtttggttgtgagagaattaggtttttttaggttgtgattcttgatttaaggccgggagtatttgtttatttgggggataaaaaatcgtgttttgtattttgaatcttttgttgtttataagtgtttgttagctaatataatgtgccctttacttctaacgagtatggttattagggtttgggcacaagagaaagtaactgttttcatgtttgtttgcttggtatgagaggctgtgtttgttttgtatctagagaggggtgggactaagagagaacagtgctgattattgtggcttgaaacagattgttaacattctgtgctaaatgtattgacatgagttgtaactaatttgtatgtcaatacctctggtaatttctttttgcttaatttgacttgaaaaagagatcattctgtatcgtgggttttgtcccattgtgttttttgtaatgaaaagacacacatactacatataattgagctgtttcatttttcccttcaggataacttgttccctatataatcattatgtttcttttctgtgtttggttctttagggaaagaaaaggaaagatacagtctgtatcgcact

SEQ ID NO: 27340 - DNA, 457 bp, Glycine max
  Intron number 2 from transcript Glyma17g37430.1 (locus Gly ma17g37430) derived from phytozome v7.0 (chr-ID Gm17; pos 41190896 to 41191352)
tgattcatattctgttccctttggtttctgtaaggtttgaaaattcttcctttctttcttctttcaattatcataagtaatttatgtttattttttttacaaaacttagatacataaccataagtattattggtatggttcttctctcataattgaagtttcatcttaataatctatcttgatctttgacgaaacctttattatgtgtattacctaaagaaactccaattctaatagaagaacacaccgaaccacatcaaaagtatcaatggaattgtgtctttttttttgttatgttagttcttagtttttgttaacgaggtaattcgaacctgcaatctctccctctttttcttatcctttcaccactagatgaatcttatatctcccaattcaattgggtattttttatttttatgttgtttgtatattttgtaatgagttgatgaactgcaga

SEQ ID NO: 27341 - DNA, 640 bp, Glycine max
  Intron number 1 from transcript Glyma19g22690.1 (locus Gly ma19g22690) derived from phytozome v7.0 (chr-ID Gm19; pos 27639989 to 27640628 reverse strand)
ttagccactctcactttcccttctgtgtgggcaccgtaattttccattccctttttatgtcaatttcttgactcaaactcatcattatttattcatttaagttttacaagcttgatgattttacgtgatagttgctttgttttcctttagtttgtaattgagattgagtctagatttgcatttaccaaaagcactttgtgtgaatgtaggaatgtatttggcttctcttagattttttatttgttattttggcaaatgttagttattagtttgtgagttctctcacttcatttcttcctttaatcaccaaaccaaccttataacttctttggtttctcttagttattaacaagaaaatcaattattgatatttgaacatgttcatgatttgttatgcatatacacataacattatgagctctttgattttttaattaatgactgagataacttaatttaccctttagagtgaattgctcactacaaaggagctagatcttgtaggaattgaagctttaggtctatacactgttttttaatttactttctgttattaacatcattgttggatatttggttactttcaacttgtttgtttgatgccaaacacagggttatatttgtttgctactgataaagg

SEQ ID NO: 27342 - DNA, 548 bp, Glycine max
  Intron number 1 from transcript Glyma19g33400.1 (locus Gly ma19g33400) derived from phytozome v7.0 (chr-ID Gm19; pos 41035464 to 41036011 reverse strand)
atcaattgaattcaaatccttcccttgccctccaggttcattttttatcaactcagtttaaaattagttgtttttttgggttttgcttattgcttcctaattgcatgatataataataataataataatagagaaaacaataggctatgcactgaccgaataaatgttgaaactgttgccattttgttttatcatcaactcaatttaaaaatggtttttaggttttttggttttgcttattgcttcctaattgctcctaatatcgtttgtttcttttagtttctctgtattagtatcttgaaaatgttgctattttgttttttcttcttctgtttgattttcgatcaatccagttttgttcagttaatattggttcactgaaacttatattattgcaaaaaatgaatgaataaaactggttttaatggtttgggttttttttttctggtgtcctaaatcatagtttgtgggatttgaaagtgaccctctttctttttggattgtgttgtttaacattcaggtgtttagttggagaagaaagagatcaa

SEQ ID NO: 27343 - DNA, 924 bp, Glycine max
  Intron number 2 from transcript Glyma20g36630.1 (locus Gly ma20g36630) derived from phytozome v7.0 (chr-ID Gm20; pos 44689549 to 44690472 reverse strand)
ttcatcagggtattctacttttcctaacgatatcagtgagtcatttccctcatcctttgtttgaaccgtttcttgtttgattcttttaacttcttttttctttgttttgtggaaatgaggttgtggatgcagggtgcatcttcctctgttttcatgagacttctaaataatttataaaacatggccaattcaagaaactttgaaactgggttattaagaattactgcatttttttttgtcagcagagtatccataggaatatttattgctttgctaataactaatctccaccttgaccgcctttagggagctcttccctcccaaccatgttttttttttcatctacaattacttaaggggctccaacacaggaccattcggaccaacaacttgttgctaagaattaataatttaaaattttaaatacataagaaaatttaaaaggggggacttgggggagggaaaaccaattttatctcaccttttgttcttgatgtttcttattttctttttcatcttttcttgaagaaaaagaaccgggtttattatgagttccaactttttctttttaaagtttgatgtattcaaggaaggacgtttatccgcgaagcaaaattgatgagaacttattcggcttgggcatgaagcaactttaattagtaattgctgtctttacgttaaccatactctaataaccattcttttttgactttggactgcatattctagagagtatatacattgttttgcgtagtcagcattacaattatggcatgcttataataactatttatttatagcacaacgagacacgtaaaactgatcccaatgatgtagtaatactgtgattaatccgattgattgtgatgaaattattaaatgtaattaacgttggaatgtgttgttcgctttgttttcttagac

SEQ ID NO: 27344 - DNA, 671 bp, Glycine max
  Intron number 2 from transcript Glyma18g48000.1 (locus Gly ma18g48000) derived from phytozome v7.0 (chr-ID Gm18; pos 57525707 to 57526377 reverse strand)
gctatctctggtattttgttctgtcactcatgtagctagttttggttgttcaatgtactttgattttgattaattaattaaattctttatttttcttggaagaagaatgtgtccgttcttgattcttgctgtttgtagtgtggctttttgtcattcaactgagattgggtatcaatttatatttctaatttccgcatcattgtagtacgtgttggtttgttattgcttattcatataaattgccttcttgaacatctgagttagtacattatacttttcttgaaatgaagaagacaaggtagtgcttatatgaagcctgggtgtcatgtaaattgtaaatatatagtttggctcacactaatcatctcaagaattgagttatgtactttgttattcacttggcaaccaattagatgttataactatatctttaggtaattattttatttgtaaaaaaggtttaaaattgaaattctgaagttcttgttttaatatgatgtcagtaaaggctacatggctgatactataccgatgtttgccataattgacacatatagtagtgttccattgtatttggcctttaaaatagttttttatttgatcatgtttagggaatgcgattgtttgtttgtttaatgagtattttgataaagttgggttgtttttcagaa

SEQ ID NO: 27345 - DNA, 607 bp, Glycine max
  Intron number 2 from transcript Glyma20g24310.1 (locus Gly ma20g24310) derived from phytozome v7.0 (chr-ID Gm20; pos 33978504 to 33979110 reverse strand)
tttgggcaataggcattgcacagtaaacttttttttttccctttcgatcatgaaaattaaataaatgtataggcattgcatagtcatatactcatatgtgtgttttgccctttaaagagaataatcatttagatggaaggaatttttgcatgccctctcactggtcatcgtttagtaatttttttctgataagggttgcctctaggaagggtttaccaatatccaacgttaatcaaatgatggagagacagagtgccatataaatatgtttttttggtaatgccctgttcgaataatcttctccataaataagtgcttatatacaagtttatcctaacctacttgagtattttgataaccgtcaatagaaaattcagaggacttatatatgttagacttcaacacaaacgtctcccaaattgagtggttgattgctgagctttattttttcttacccaatcttgagtgtgaaatagctattagatgcaatgggatgctattcgataagtagaaagatgcatggtcatgtgaaatagctttatttctgttctgttgaagtcatcttacacttttgtaatggcaaatcagatcgtaacactggtattat

SEQ ID NO: 27346 - DNA, 848 bp, Glycine max
  Intron number 1 from transcript Glyma17g08710.3 (locus Gly ma17g08710) derived from phytozome v7.0 (chr-ID Gm17; pos 6423674 to 6424521 reverse strand)
tcgtaaatcgcgtcttccaccaatcaggtacgcacgtgcgtgttctcatcaactcctttcttccccgtagtaattgtcggatactctagtttttcagttatgcttttgttttgcactagcagcttgcttgcttgctacctgatctgtcaatactgcgtcgtttaggaccaatccctcaccctccaaggatgtacgctactattttgttcttccagccttttcccacttttaaaattctcacttaactcgaatggttctgatgtagactttcattttgtttagggtttttaggactttataattctcatgattttgtgggtttttgtataatttgctttaatcttccagtgttccatgtttctggattaggatcatgattttactgttctctagtggcttgattagggtgttatattacgtaagcacttagatactgttacaaatttgctatatagtcctcacacttgatacttggtaaatgtgaagtttcattccagtttatctcttcaccctacatttgtgttttcccctccatttgtaggtcctgatctgactctttgcaattgttttcaccctatattatgatttcaacacactgagtgtgttttttgctgcttcttaagagagatttttttgtaaaaaaaaaaaaaactattattttttaaaaggattttgttttgtcctttttctgacatactatatgttatgcaattcttttgttaatttgagatgggggtggggcatagcagggtggcaagctgaaatatttctcttgctttccacaaccaagatttatccatcattaatgatttttttgtctttacattaatgtaaatttaaaattccag

SEQ ID NO: 27347 - DNA, 884 bp, Glycine max
  Intron number 4 from transcript Glyma18g50270.1 (locus Gly ma18g50270) derived from phytozome v7.0 (chr-ID Gm18; pos 59460710 to 59461593 reverse strand)
gtgtcaaagcagttgtctaacaccatttcaaggcatgttttaatctttgctgtcactctgttaggttcaaatatttcagatgatccaagaaactattctatcaaattcactccaactaccttttttttaccactaaataaaaaaaggaagcagaagaaaaagaagaaaaataaaaagggagtgttttacattaggctctaagatattaagaaattttttgttgatatctgtttgtaatttatttctttgaattctacaaaagccacttcaccctcctttccttgagtaagctttatactcaacgcaaatgttccctttttgaacaaggatgagcagaagtaattgtgcctaccccctgtcacatcttttgatatattcttactttaaagtacattgaatcatgaatgttaattgtgatcatgagagtgtaggaacatttagctgaaagtatgctgtttaaagcagttagcagattagataaaaaatttcccccaatttgaaatcctttctatggtttgcccctcctgctgtctttatagatttgtatttgtatcatttaatggtatgttttggacacatgattttttagggaaaaggaaggggtaattttctttgagtcaaatattttttaatattatttttttagaataataggaataaaataatagataatcaatttatcatgaaaccttctaatacaaattgaagactttacattcccttccctttccctcaaaagcccctccatccaaacatacagggtctatgttaacattcacggtgatcaataatctggataacttgtttgatctgtcaaattggactccagttgaaattaacctatcctttttttttaacctatactttttttctgcagttccaga

SEQ ID NO: 27348 - DNA, 478 bp, Glycine max
  Intron number 4 from transcript Glyma18g22860.1 (locus Gly ma18g22860) derived from phytozome v7.0 (chr-ID Gm18; pos 26046851 to 26047328)
gaaagagggcaaggtaaggctatgcattcactttttctcccctgtcagcatctacaacttttattttgcctttttttttaaactttgaaacataatccttaaatgtacatggattacccaatgaacttgatcatgacaagaatgggaacaagtgggctcgtattgatattaggttgatgcctaaatttttattttcaatgttttagcacattaatattataaacaaagaaagccatggtcatgcatacattttagttttgtaaatgaggtcacttgagccttttctttttgaaaaaaagaaaacataatatactgctgctggaggctggagttttcttgacctacaaatttgtccgtgatcacaacttcatgcattacatttgaattgatcaattagtagataaaaaagggcacctagttagtgatgcctgcttggaattggattactaaaccatattccacttttgattcagaagac

SEQ ID NO: 27349 - DNA, 475 bp, Glycine max
  Intron number 2 from transcript Glyma17g06360.1 (locus Gly ma17g06360) derived from phytozome v7.0 (chr-ID Gm17; pos 4521724 to 4522198)
ttcttggaagtggtggatttgggcctgtctatcaggtataggtactaaatctaatgtcacttgctttaataggcaattttgtttgttgattttgagaacctgatctcttaatcatggtgcacctatgttagatatgagtccttttaaagaataccctaagggcttgattaaggaataataaatagaaaaaatttaacagaaatcaggtggacttgtactggaaatcatggtcgtgtgtgttagtaacactttttccataaaagcttttcagttttgattcattaagaagagcactaaaagcacttgttaatattctcctaactatattaagaaggcagtggacaatttgttgaaattcacattaatggggtgttaaagaacttatgtttggtagttgagcctgacataaatgtatgttctcctattgtggttaccgtactgaaattcaaattgttttgacagggaaagttggcag

SEQ ID NO: 27350 - DNA, 981 bp, Glycine max
  Intron number 1 from transcript Glyma19g11770.1 (locus Gly ma19g11770) derived from phytozome v7.0 (chr-ID Gm19; pos 15030152 to 15031132)
gaggtgaggccgtggacttgtctagtgatcataaggtatatttgtttccattttcttaattatttaatttctcaaatttctactctattttttatattccttggacagctcattttagaattgttattgttaatttttagagtacttgaaataacgtcatattctttattaatcataggaaaaaaaaacgtcgtattctttaaatttgttaactttaccataattattattgtaaactttgattgattttctagttttatttataagaatataaaaagtaaaatatttttgcactataaagtaaattgtcatttattttaaatattaaaggtgtatagaaattaaattctataaaaaaaagtacatttttgaattttccttgcataaaatttgctgccatttttcaagttttgatttcatgtatatttatgttttcactatgttaaaagcgggcgcagcactattttgattgacaattttgacattttcttaaaaatatccatacatatgtgaacatgtaatgcaagtcaatgctcttcaatttgatgatgaaaatggttattcagcaaaaattgttgctggcagtgaatgtctggactttgggggtgtgtatttgatgtgtagcttccaaaagagaaagatgtcttttggtcgtatcgtagagaattgagatcatctttgtaatgggtgcatcaaagcttttatagtgttaattattgaatttaagacgtatgcaccttaaaacttggcattcaatcacaaataattatttgaattattttaagataattattttaaaaattaacaaccttatcattcatgattgtgattagatgattgtgtaaatttttttacaattattaatgcataatccttattctcttaattatttctgtcagattttttcgtagcgaagcaatttattgtaagaaaataaatggcattatggtttcctattgtgtgcacagccccacaggcccg

SEQ ID NO: 27351 - DNA, 488 bp, Glycine max
  Intron number 1 from transcript Glyma17g10780.1 (locus Gly ma17g10780) derived from phytozome v7.0 (chr-ID Gm17; pos 8109513 to 8110000 reverse strand)
ccaaagagtaccttgacgtaacccttttcctcttttcttttcttttcttttctatttcactgggtatcaattacacttcactaaccatagcgaattgtattttatagaatttagattccaattgctacaaatccatttatgattttttattttagtttattctgcaagtgatcaaagtttcagacctttccactagctgcaaatcttggaccttagggtttaatgtacttgtattatgattaaattaattaaccacttatattttgatttagaacgacaaaaattgaagtgtatggatgaattgttttgaatatctttacaaagcatttattttaatgaagaatgcttgactgaatttttgtgttggttcttgcagcagattctctgttatatctgtcaatggaatcttattatgtctctgtttaatggaagatttaactctgattaggtttatctttactttcctttgcagaatataatcggtcagg

SEQ ID NO: 27352 - DNA, 861 bp, Glycine max
  Intron number 1 from transcript Glyma17g10930.1 (locus Gly ma17g10930) derived from phytozome v7.0 (chr-ID Gm17; pos 8215995 to 8216855 reverse strand)
actacgaccacattattccttactctaaggtcatgcattccctttgtttccactttttgatttaatttgtattgtttttcatttgaataattccttgaattgcaatgtggcattgtacctgtctgtcttaggagaagaacatactctgcactttcatctgcagtgcatactttatatactacatatctccagattggtgcagaaacaactccgatagttgtccttgttgaggctttgctgcatttttaggattaatctctgtcaagttttaaaaaaggtcgcacgtgaatttgcttgcaacaacatggtttttcaagtgtctgctactgcaattggggctgcatttgtccagtcatttcccgcaatatcaataaacgtgcggcaaaaccttgactgatatttaaaaccttgaattttctgtaaatagcactagattttaactttgtgacttatctgtggctatgtgttgatggtggagaaagtaagaacaataataaaggggaaaggaaggtttgagtttaacagtcttctttgctagtttattattaaaggagatgatgaattgatgatgatgaatttttatgtgatcctcctccaaacccgtcttagttatctttgcaaacactttgaagtttcatcagttttgtatgattataaccccactcccctccaatttttttcttctattccactgtcttccctttataacatccaaacatatgccactcaacaaaagaccatcaggacaccattaagtaaccaattcattttggttttaatttcttttttgcttattattcatttgggatgttttgttaaactacaggggggagaaagcacgctggaaaactgtcaagtatt

SEQ ID NO: 27353 - DNA, 895 bp, Glycine max
  Intron number 1 from transcript Glyma17g36960.1 (locus Gly ma17g36960) derived from phytozome v7.0 (chr-ID Gm17; pos 40872223 to 40873117)
ggagattccaattctaagctactgtaaagttaaggtaccatcaaaatatctctgttgttttggttatcatgaatgccaatatcactaacaagttttaatttctaagcaaagggtgtctctcagttatcaaatttaggaccgacaatcttaaatagccatctgataatcctaaattgtttctaggaactgagtttcagacaaaacttagtatgcttgggtaagtttatccataaatacttttagaaaaagaaaataagaaaaaaaagagtttttctcttaactcaaattaacttatggataagctatattagattaggaagaaactcatttaattttttttcttatttttttatttattttagaagtgattttggataaatttaaccaaacagactcctaaacacagttccataagtacttttagggctattcttcattcagaattagagtttcactttgttaatctatgttaacctttaatagaaatctttattatacaaattaccaaggtgaaacttcaattgtgatggaaaaacaactgcaaaaacccctttgatgcatctaagttctgtccttgaattccaagactgaaaatgaccaatagaagaaaaaaaaaactcagcattttagacaatttgtattgaatagcaaaattttcattacctgataatctgattgtagaaacaccatagtgttcaattactaataataatgttatttatatatatatatatatattagatgttgaataagtgcagctaaaatagttgatgagttaatattatttactgagaaacagccataagagatgaaattatgtaaaacatacgtatacatcaccattatgtgattataactcattcatattttcatttccgcaggtacgcggtgcagt

SEQ ID NO: 27354 - DNA, 1005 bp, Glycine max
  Intron number 1 from transcript Glyma20g02450.1 (locus Gly ma20g02450) derived from phytozome v7.0 (chr-ID Gm20; pos 2071864 to 2072868)
ctgtgtttcacaaaaagcgtgttgctgttagtttcttcactatttcttacttcctacattgtgtaattacttactccctctggtctcgaatataaggaaagataaactaacttacattgtcttatgcttatattcgagactggagggagtataagtgtttgtccttgggtcctgtgcggataaaattcaccattagcacttcagtaagaagaaaaactgaatttgggtacttcatttttatagaagctctctcatctaacttcttcagagaagctaagatgcataagttaattttaatttttaatccgttggagaaactcaattcattttacctttttgttgtctttttactataagtgtttgtatagaagtttttcctaacaggatcttaataaatctcatttgcattaagtttcacatgactgtcattgtattgattaatgttaaaaatggttttctatgcctgggaatttgaagcaactgtgtcaagcacgtgtgaaattatgaatgtagttgttggcattcgatggtaaacgagagggtgagttcagtcaacatggcttctagcttaaagaaacatatttgtttctttgttatttggaaggtttgatggctaattttattaacaaggagtgtggatgtttatgatattagcctattaggtgtggaagttaggggacacaagagtggtgggggtgcaatattgtatgtttgaggggttttttgcagttgtggattttttcacatgtgataggtcatagagtagaaattaaatatatctagaactaataatttttctttaactatgtgttataggaacatttgtaaactgacatatagatgtagctcaagtagttagggtagatgttctaggattgatttccatgtcatttgaaaagaaaaagatttcaagcattgttagtttgaattataaactggaatactgactgattctttgtcattgtcccagttggctttgcagattgttattgttggagctttacg

SEQ ID NO: 27355 - DNA, 975 bp, Glycine max
  Intron number 1 from transcript Glyma19g24620.1 (locus Gly ma19g24620) derived from phytozome v7.0 (chr-ID Gm19; pos 30270482 to 30271456 reverse strand)
ttttgaccattcaaccttcgcctttgcctcctttcgtgagtccactcttctcttctcttctcctcaggtttctttaatccctcgcaattgcgtctctattgtattttaggttccccttttaattttattattaattgttgtttgtgaataagtaagatgttgtttaatgtggagtgtgttgttttaaatataacaatttagagcttatgatgatttttaatttgggttatcagaaaattgcgagagttacttattggtgaaggcataatcttgattcagaaaatatgctggttagaattatatagtagatagccaaagttgtgtcgtcgaatagtggattattgtctgtaaatttttattattattttttgcgtgtgtgtgtgtagttgatgtcatttagagctacatcccttccgcatttgctacgtgacggatattgttattgttgttgttgttttatcaccatcatcgttattacgctgttacctggttagttttggacttatgcttgtttacgtttttagggagtaagaaggtaatcattaaatcattctttgtttggcattttagatcatctcatccatttttgcctttgtttagggttctcttttttatatatgttttatatagaacatatatgttgtgattgagtttggaatttgttcagcaattaatatgcatcattttaaagctatccacatttttctagagtgtttaaggctattttgttgcctggaaatcatctaagcataattttgcgttacatttataaatgtgatagcatttcctgtggcaagtcacattgctagtttacatgattgttctgttgcagattaaatttgatttattgtttgttactttcacatatatgtttattttttgtaactttatgtctagtacttatattagatggataatgctaattatttattatctgtttgtgtatttttgggaacaacctacagcgtgactgag

SEQ ID NO: 27356 - DNA, 578 bp, Glycine max
  Intron number 3 from transcript Glyma20g24160.1 (locus Gly ma20g24160) derived from phytozome v7.0 (chr-ID Gm20; pos 33870886 to 33871463)
aggttcggaattgaagtaaaaggtaataataatgttactaattccacggatgttgcatttaacccaccaattgaaccaactccctcggataattcttgtaccagttattatgtatctgaaagatggggagtgattaagaatttgactcctttaggattattattgttcaactattatttttgataaatggtcaggtacttaggtacgtggatttgattatttatttctgcatatcgctttcataagtacaattttacaattcattaagtacaaaagagggggtcttcttctaaaatggcagtataaaaatgaaaattagactactacctgggtcatccatgtgtttggtgtgaaggtcaagcaagcaatttatgatggttaagggacttttgtgtgtgaacaaaaagcatatatacccatttatgtctagctatcaaaacatgagcttgcccaacattacatgtggtctatcccgtttcccatgtttacacgaaatcttccatgatacacagccatttatagaaagagcaatacatggtgacataaactcttcttgtattttgtttttttcagactga

SEQ ID NO: 27357 - DNA, 913 bp, Glycine max
  Intron number 2 from transcript Glyma19g24850.1 (locus Gly ma19g24850) derived from phytozome v7.0 (chr-ID Gm19; pos 30514596 to 30515508)
aagagcataattgattatcttcaaaagcaatcttggtacgacaacaataactaatttgggagtatggacgagcatttcacactagctagttactgtataattgatcactttattgtttcaatcaccccatacaacagacctaataaataaaatttaatgtatgggggttattaatttttatacataatatttgttctgtttggagtttgatttgatttaatacatattgcttgagtttaattaataaaagaacctattcttgctggagtttctgtttgcgagtttaatagactgtttgtgtgtcaacagtgagtgctatgcatcttaatatgttaattactttccctaagtctaccaccacgggcctatttaggtcgccccctattttgtgcccataaataagacttgtttctttgtgtgctaacaatctaattaattctaaggttcatcataccaacgagtaacgacacccaatgactacatacatttgtcaacctcacgagtgtcattgcccgtcaaggacttgatgcatggcttcatggctcactatttaggcaaagttcatgtctcctgctgaagacaccactcatggaataagaaagataatatatgatactgtagaaaaatataaagacctacaaaatattcttaaagaaaatttaatggattgaaatatagatgtaggcaccagcccatgaaataatgaagatgatatgatactgtagaaaaatattaacaactataaaatattatattaagaatttaatggatctctgctgtgtaaagacatcaaaggagtcataccaataagctttttatgggcaaaaaaataagtaaaatggaagtctcccataaacactccttttcttatatttcataattcccctgtataactcccctgttaggaggcatc

SEQ ID NO: 27358 - DNA, 993 bp, Glycine max
  Intron number 2 from transcript Glyma18g49290.1 (locus Gly ma18g49290) derived from phytozome v7.0 (chr-ID Gm18; pos 58650716 to 58651708 reverse strand)
tcttaaggttcggaaccagaaactacaggcagaggtaataattaatgatttaatggttctagcttgcttcaagctaattattatctattgtgctcggatcaatcgttgaattttccatggtggtttctttttttttttatcaaagtaatgaacttttttggaaaaatcgataaatacgaatttattgttcaggatctataactaaattgttgttcttgatcttgattcagatatatattcaatattcattaaacaaataattagccattaatttgtatatggaccatgatagcagaatagggctgcaattctaaaattcgttctttgaaaataaaagaatgtggtttctcattccttttacattttttaatctaaatttaaattttgttctctacatattctcgtccttgacttgcttgtattcaatttgttatattgtgagtaggaagttttcctactccttattgttctatatgaaatttcagtgctgtcttctttaatggttgtataaattgagatttttcatgttggaagaaaagaaagcatacccttgtttgtttgacttttgttagctagaagaggaacacccttttccttgtttgagttttggtgcgtttcatttctaaaactccatttcattttttgtattactatatactataacacatgtactagtgactttttaataaagtggtcattcttgattataagttggtcattcttgtgaagaatatctgtgttactgtcagaccccatatcagcatcttagtacgtagtaattaatgtttttgttttcaatgtcttttgatttttactatgaccaacagacacagttacactagatccaagtaagcctttagcacccatcagaatctgtctaccaaaggcatgtggatacttgataatattgacttgtttttaattacattttttcctcctactatatgttgtttgcagttacaagctgtaaaaagtagggattgttgtgaagct

SEQ ID NO: 27359 - DNA, 540 bp, Glycine max
  Intron number 1 from transcript Glyma18g49290.1 (locus Gly ma18g49290) derived from phytozome v7.0 (chr-ID Gm18; pos 58652044 to 58652583 reverse strand)
cccttcccctctttgccaccccagcactttcaaggttcaatcatctatcttttcctcattttctgctgtgaataatttattcaaaattcaaaatcattgaaaaaatcaaccaacttatagtatggcggtttataattagataacagtgcatataagtacatatattattttctctttgtgaataaatttaatttatatagttttaattaatcaattagaaattatcgttaatatcagtttacgatagtaattagaaaaaacaataaacttactatatattattgtttatcattggatgataatataatagttttatattgttagtaaatatattatttatgaagatataagatagatcggatggttaagaaggaagaaaggataaaaaagattaagaattcgattttctctgttaataaaaaaaatttaacattctaacaagcgctaacatttgcagataaaaacaatactatttactctgtcgttttgataacacaacattgtaattttgtgttttatgtcgtagggggtgcacctttc

SEQ ID NO: 27360 - DNA, 569 bp, Glycine max
  Intron number 1 from transcript Glyma19g41810.2 (locus Gly ma19g41810) derived from phytozome v7.0 (chr-ID Gm19; pos 47981561 to 47982129)
gaccgctagtgcccctgcttttgccggtgtgcaatgtacttcgttctcgttcctcgatctactgcattttcacctctctttagcttttcctcaattttccatttctcgattaaattgttcaatgttttgtgtgaatcggtttttttcccctcttttgcctaccgacgaaatgtttctctttgaactgcattatcgtaattgctgatatattggctcgtaattaattcctttggcggtgattttgatatttcacttttccggattaaagtagctttatttttatttattttttgtctgaaacttaggctttggtttgtttcacggtaatgcttattcgatccgttcttctagattaattgcttcatgctagatcttattttggatataaataagtcacgttgactgatgtgtcacacgtagatctagtagatgacagctagtcttttggatttttattaatttttcttcgaataggtatgttttcttgctgcggttctggaaatgttgaattctgaactgagataaaatgagtaggatagaactatcgagggcgaagtcagcgccggttc

SEQ ID NO: 27361 - DNA, 674 bp, Glycine max
  Intron number 3 from transcript Glyma20g30060.1 (locus Gly ma20g30060) derived from phytozome v7.0 (chr-ID Gm20; pos 38796257 to 38796930)
ttgcttgcacaagtttcttgctagagcagaatctggtaatttttttttacctaacttaataatgaaaaatctgtaatgttatttttagaaggaaaaatctattctgtttacctatagactcctcttcttcctcccttctcatgtgggttgtttataagttaggtttgtttgttgttcaattcattgaatgtcataatcttgtatgatgttagtgatataaagtcatgctagaggccttcttcgccaaatagctcaagttttgaggagtgttggtcattataacaaaagccttagttggacaaatgcatgtacatacacatatgcacatttagttcttagtcactaacccaaaaattgtggttttctttattagttcttagttacagtaatgatgaaatatgaatttcctttcatataggtgaaggcctggcttgctgacaaggatgctgaagcattgagatgccagaagctgctggtggaggaagaggaagctgctcagaaaaggtacatttagtgctatgactagtttgtccttcaacctatccttttgtggtaccttttcccaatctttcccttttttctagtgcctttattgatataagattaggtcttgtcggtctgcgtctgccttgagtgattcttgattttcatttgaatttttaggttcttgagga

SEQ ID NO: 27362 - DNA, 781 bp, Glycine max
  Intron number 4 from transcript Glyma20g30060.1 (locus Gly ma20g30060) derived from phytozome v7.0 (chr-ID Gm20; pos 38796934 to 38797714)
gcaaatatttcaagggtttgttgggttgagtttcatatatacaaaaatattgtctaatcttcaatttatttgtgtctctaaaagtttgtcttgtttagttttgggtgcttgatttttcattgtccctcctttacagggcagtcaccatgattggacgaaatttaggattaaaagtggagcccgagcataacaatttttaattcttttaatagcagaattgaggaaatttatatattcattgaatcaatgcagctgaaaaagcacaagcaaaaaatctaacttggtttcataggctcttgcggtcatgagagaaacaaattccaaattgattaactgggatcagtttctaagaaagataggggtgttatgatcatgcagcataactcatgcatagttttagcaaaatttgactagtccaactgcacagacagaacatcataatgcaacagttttcactttgtttacccactgtctagcttgctgtcattatgaatatttctagagactagaatagacttacattgacatatgatgcttatgtactgccttctatttctcttgcttttgttttgtctgaattttctaatggcatctgtgacttctaatgtcctacaacaaataaactaagctgcattatttttaattatttgggcatctttaagtttttcttatagaaaatccaatgaggtactagatatattgtggtctagatgtactcttttgtaaactagtcataacgtgtgggttctttatttaatttttcgctctatttatagaaaat

SEQ ID NO: 27363 - DNA, 971 bp, Glycine max
  Intron number 1 from transcript Glyma19g23190.1 (locus Gly ma19g23190) derived from phytozome v7.0 (chr-ID Gm19; pos 28595446 to 28596416 reverse strand)
tgcctcgaacaccatcaggcttgcctccttccgtattttttttttttaacttaaccatccttttgtgtttgattaaaagagaaatgatagcaatcctctgatactatttttaatactctttacaattgcctgaaagttgttagaaatcactaatttaatttttgaagattttacttctcatttaataattttttctcgtgatttagatgtaggacacaataattttcagtcgatcatagaaagtatcataaagagtgttcctggcatttctctcgatcaaaatgttgtgttttcttaaatttatctttatttaaattttattcccttttaattaaaaaaaaaaacttgtgccacatttgaatatttttcggtacaattttctaatcaaattttgagtttcattttgtaatcagtgttgatctttgatgtcaatcttccaattttgagtacatcactaaaagtacttgaaatactacatacacttaaattttgtctacttataaattatacgatcatttgtactgtgtgtagttgctgttgagagattgaaaactcaattcattatttttgttgctctagttgaatatcaaaaactaaaattgaataaaatttaaagagagtataaggctaaaatatgtcatattttcatacttaaggctactttttttcccacgtaagtgttcttctagtctattgttttgaccatgcatgcgacgtgcacagcaatattaatggtgaacgagtgttcttcactaattatgtgtttttttggttgtgtgcacttaatttttcaatttgatgtcccaagttgtgctgctagagagatgaatgataacatgcaagtgtgaattgcccttgccaaaggaatcatatctccttcaaccccctcctccatcaccagcaaaaaaataaaatttccatttgaatgttacttttcccattttaattaatgaattctcggatgtaatcag

SEQ ID NO: 27364 - DNA, 672 bp, Glycine max
  Intron number 3 from transcript Glyma17g17470.1 (locus Gly ma17g17470) derived from phytozome v7.0 (chr-ID Gm17; pos 14326442 to 14327113)
acggggataatatcaggtatgagatcaatctcttcattttttatgtatatgcaagttaatttgtttccatattccccttattttttgagctcttgcttggggatatgtcttttgggcttcttgtgtttgatgctttcttactaatttactaccaaatccgagtattattttcttttcaatttggttcctaataagatttgattattattgtgtttttttttcctttagtccgtgcaatcaatcttaataggcatcaaatcactggtagtttcatgatttttgtattggttctcgtcgtttttcatgtacttaaaaaaataatcagttttggacctttgatcttactcattttaaaaaacagattagggactaattttctcttccttgtgtggtgattcttgaaattataggctatcattttctcgcatgaagatgctgactccggatttatactaatattattgtttcagtaatacgcacaaaaaagagacataatgatcttccttttgtgcatgcttgagaatcttaaatagcataaattgcatgccatatttttcttctgtggcatgttcattaaatttttcttgtaaaattttctattttcattgtttcttcttcttgatttatttatttcatttaaaactaacatgtacctgcatatttttgtcaggt

SEQ ID NO: 27365 - DNA, 922 bp, Glycine max
  Intron number 1 from transcript Glyma18g01120.2 (locus Gly ma18g01120) derived from phytozome v7.0 (chr-ID Gm18; pos 565951 to 566872)
atcctaaggtaagattatcactcttctttctttttatttatcattcactgtttgtgttgccataagaaaactgctttttgtcgccaaaatcgataaccactcttccgtttagctgcgattttttcatttcctgaatctcttctgattcgggttgcccgattgtaggaaaccccatttcagagatacactataagaaattttaatcactgtgtgttgttgaacatcgagatacggaaatgtctgttttctgcataatttgtcttgtatctttgtttagctgcatcaaatttttcagtggaatttcgtttagggtatgcttttacgatgagcgtttgtgtgttggggatacagttattgccaattaccgttgtattttagaggatttggtgaaccttagcgaaaaagtctcatttatctccgagcaatccttttccaattttaggtattgagtacagattcgagcttttatttccccttttttttttgctgtgcaccaattactgcactgagcacagattacagttgtaccatcgtgattgattattaggcttaatgtttgtcaagggctctggagaatgaactatacttgatgtttggatggttctgtttctattctctgatggctagctatgatcttcatgttttgcttggcagttaatgcatggaatataaaatattttgtataaggacacgagagattcttgatttattactgagagtgatacccttggatgatttcaatatgtaatctgcgtattttatgttagactgtgttttctggtataatcatatgactactagtatgttgtgcatcttgtagcagagctatagatctagagtttttctcttttttttttctttcagtattgttatttggattgatagggtttgagtatttttctttatgtttttgcttctttag

SEQ ID NO: 27366 - DNA, 913 bp, Glycine max
  Intron number 1 from transcript Glyma19g08720.1 (locus Gly ma19g08720) derived from phytozome v7.0 (chr-ID Gm19; pos 10258519 to 10259431 reverse strand)
tttgtggacaggtacctttcttttcttttcttttcttttttgctttttttttcttcaccagattgagtttttgtttaattccactctactctaccctttttcatatttggctgtctttttttttttttggatatggttttgatgagtttcctctgttgggttttactggcaatgcaaaatgggaaatttgagtttaacgattttttttcctgaattgtttgttttgaattttctgtttgtttgtgtcaagtttaactcttttcaccatccaatttaattttgttcatcgttttactgtgcttctctgggagtttttggtaatggggttttttgatggaaggaaatagtttttccccttaatttgttagttgtgtgtttgtattggagatgttacatatgattaatttgtgtattgttttttttctttcgaattttcggtttatgggtttatgctttgattgataggctgtttcactcctatggaatccataatttctcctttttctaatgtttctgaacctctgaaggggttactgaattcaattttgaatgtgtggttccttcatcctttgttcccctttctaaacgatctacctatgttgtgtgtgttttttgaacaatagtaggtttaaattttatgtttatctactattgggaatcccgtttcctatttttcgaagatttgattatagaacgataccaaaaagcagctataaaactgtgtctaagttctttccttgtgaaaataatgacagtgtgtttaatgccttttttctttttatcttattttacatgtccattgtcagtctttatacttttatgttgttatgcgcagtcaagcatatggtatgagttttatgatccataagttatccgtgtaacttgaagatttgttttgtgcttactatgcaga

SEQ ID NO: 27367 - DNA, 714 bp, Glycine max
  Intron number 3 from transcript Glyma18g38130.1 (locus Gly ma18g38130) derived from phytozome v7.0 (chr-ID Gm18; pos 45475741 to 45476454 reverse strand)
ggagaaaggtaaattaattttcaatctcttggttattttcaaccctgtgcttatgatgcatggcatagaagaccatgtggaatgagataattcatttatgataatgtcatgtgaactatacagctatactgtaaccataagtccataacagattgccataatgatcaaactgctaccatattggtgtgtttggaatagattcacagagaaaaaataaaaaaaaaattcatggtaaaggtgaattaacaaatatgtatttcaactttttcatagttttacctgatttgtagggtaaaatcaattttgtgttatccaagcacattgtgagacttttgctaatactttgagcatgcttgattttcttttcaccttttgattttaaaaaatattttctaaaataatgtcacactattcagtcatcaatttcgcatttatgaagttttgaaaattatttaaaaaaaaaaagtgttcaaaaaacaactagaagatattttctcattttttttctgttttcgtctgatttaacctcttcctggatttcacattctgctcctgtgccttgcaccattatgtacaagttgtctgaacaaccttatttagtcgcattttttaaaataaaaaagtttttataaaaagaaatcaaacacacccttcatctttattaatttcttattttcttaattgagtttatcttcaaattctttccaggtctta

SEQ ID NO: 27368 - DNA, 1054 bp, Glycine max
  Intron number 1 from transcript Glyma18g52280.1 (locus Gly ma18g52280) derived from phytozome v7.0 (chr-ID Gm18; pos 60929285 to 60930338 reverse strand)
ccctcgcggactccacgactgttacggggttctaggtaatttttggaatctattgacatagattttcactatttttttttcatcatggaataggaacctgcattttgcttttacattagtggttgtggttaattgtggtttctgctttgctgtgatgttttgttccattttttttatattcttcgtatgtgtattgtgtcccctttgctctaaagatgctattactcaatttcattcagtgtgcgtagtagtattttatgttttttttttccttttctgccaggtttagtaatgtttgttagaatttggaagtaagctaggtgtatcttgtggctctcttttttgagatttggactgatgatgcggtaatatatatatatatatatatagttgaggtgggttttttggtgtattgggtattgcttgctttttgagggcagctgttggaagatggactatagggtttcgcatttgcaagctctagagaccagaggcaaaactttttttccacactgaattaacattttttttccccgtttttgggttctgtgtttttagaggaagaggtttcatagaattgatgcttaggttttacatttgaactgagtgcgtttggatttctgccttatttctacaaatgagttttttggagcctgctcttgctgaagtttattgtttccaagttttcatattgctgtattagcctcctgttgtgctgtgacttcatttgtatgatgttttctggtttaggaagctttttgtaaaatttttgtggtccctgaaatgaagttcatttgtcctatattggtgatcatggaagttcaaagcataactatgactttaaatatcatataattttcttcatctgttaatctctatctttttttttcaccatggaggttagctatgtttctgaactgtatgctttgagtatggcatcctttctactaaattgaaatgggatttcatggatcttgtcttaattttttttgttctttttctgttatatatttcttcaggtcaagaagataatattgcagagtactatcagcag

SEQ ID NO: 27369 - DNA, 796 bp, Glycine max
  Intron number 2 from transcript Glyma18g14980.1 (locus Gly ma18g14980) derived from phytozome v7.0 (chr-ID Gm18; pos 14976055 to 14976850)
ccaagtgccctgtcactggaaagaggattcaaggggtatgtatgcaaatttttcatttctcatttggtctttaactttttgaaaaaagatcttataatgctgcttttgtatgttatgtgcgtgttagtttgattgaattaaattgggtagaaagtaaatgtgttttgggaagattggttcatgcttgtgctttttctttcttttttaatgtcattgggattttgaaattgtttagtgtgtgaatgaactttttgattggtttaattcggatagtttgcttggttagagtgaatttctgacgtgtcatgcaatgtaatagatgttttggtatcaagtagtccaaggctaaatgcacacataagactgaagtttttttttttgtcttgagggaaaaaggcgccaaaaagtgcatggcttattaatgaatggtgttaaccatggttttaaattgtgtggttgcgatattgcaaagaatttcaacaaatgtggtcaatggaactacaattggggccgtagagttcccaaaaaccttgacattgaaattgtggctgtggactgttttttaaagccttggtattatttgagttggtttgacaaataaattaactggtcaaacttaacatttgtagcaaaagataagattaagattatgatgttcaaagttcctacaactagttttttctttctatgtacggtaaaggattatgtaagtgaatgatgcatggtatatcataatggttattaatgagtggaaattgcagattccacatttaaggccagcagagtataatagatc

SEQ ID NO: 27370 - DNA, 535 bp, Glycine max
  Intron number 1 from transcript Glyma18g09610.1 (locus Gly ma18g09610) derived from phytozome v7.0 (chr-ID Gm18; pos 8492383 to 8492917)
accctcacaccaacactgcgttcatcatcgcgaaaggtacgcatgccgtttctctccatcgttcttcaatttttttttcctttcgaaaggtacgcaccgtgtcagggttctgtatttcgcggttataattaattatatcataatatatcccttagtttatcgcattttctattgaatactcttttatcggaatcgttaaatttggttttctattgtctctcttgattatcaccagtggattgtacattcaaatattcttcgcattcagcatttttagttcactcgttagttgaatttgttgtgacttgtgagtgttgttaaggttttaaattgcggttacggtttcgtttcgtctcgttcatttgcgaacaaatgtagctgatggtcacacaattgcggtggcggactgtttttaaaatcttggtgttactctttgatgtattttttttatatacaaagtaacagtttttttttttttttttttgtatttttggtgcttagttgttgtgtagttagttttgaggggttaaaaaga

SEQ ID NO: 27371 - DNA, 707 bp, Glycine max
  Intron number 2 from transcript Glyma17g37800.1 (locus Gly ma17g37800) derived from phytozome v7.0 (chr-ID Gm17; pos 41528443 to 41529149)
tataccatcaccttttgtccttcccccaccaccaggtttctttctcagctttcatataaataccatttttagtacattaaatagactttcccatattagaaagtgcctgtttatttactatttcaataatatttaatgattttaacgtcagtataaattgatcacaaaaacaataacagataaggatgtgtgtttttagtaaaattttcagcttctgattgttacgaatggagtgatattaattcttctttttataaagaagaacaatattaattgagttgatttttcagaatgaaatcaaagacacactttaatcatcaaaacaagaactatttgttagcttccacccaagaagatagcgaagttgaaaatgcggtaattcggctttataatacttgggtagaaaattcgtatcaaaccaaaccatatatgtttggttatagaagcaatctagcaagtgagtagaagagatgaattcgtactttgtagagatgcctgccgaatgaataataataacgtccccactctatccaatacaattcctaacgtgattggtctccttagacagagatcaattattgaagtagctggttatctctgctctctgcatttcatgaccattattggttttgttttcttcttggaatattagcatttgctcattattatttattttctcaacagtcagaaggcatcacaggggcaag

SEQ ID NO: 27372 - DNA, 510 bp, Glycine max
  Intron number 4 from transcript Glyma18g45480.1 (locus Gly ma18g45480) derived from phytozome v7.0 (chr-ID Gm18; pos 55229427 to 55229936 reverse strand)
gaggaaaaagagaaaagtgaggctctcgattgtttttgtggttcttgaaattaaagttaaatgcttgttaaataattgtaggtagtgcggatgtttacatagtttttttttagttcctgattcacatggagaatgataacaaagtaatttttgaaaataatacttcttacaggatattaaataattagaaggtttgagatgtttggagttcaaccaaaacattataataagttgcttaaataaaagaatttctgcatgtatgtaggtaatttatttttttggatagctacatagctaatctttttcttcagaactttggtgggaatctatattcaatgtttaagtttgactatgtttcattgcatcttttgtgaatgtaagttcaccacagcatttcaatgcctatcactagatgtatctcaatttcatttattcttcttctctattgatgatttgggtgtgaacttttggcagatgaaactctttctgaagaagttgagaaattgctaa

SEQ ID NO: 27373 - DNA, 525 bp, Glycine max
  Intron number 2 from transcript Glyma19g28240.1 (locus Gly ma19g28240) derived from phytozome v7.0 (chr-ID Gm19; pos 35630811 to 35631335 reverse strand)
cagtaagttcttgcctccattaatgagtgtctaattttattgtaaaataaaaacactaggtaagtgaatatagatatacaggaagttatcatatagatatacttccagaattatgtaacaagaccaaaattttcaagttattatcaacagttcaacacatctattgattacatgttaattctagaaaaaaaagggtcctttagattcatattttgacttttctagcagttattataacacattaatgtgtttgcatcaaagaatacacacttcaattcatgatcatcattttatacatgtctgggaacaagatagatcagagtttgaactaggcctttcatttgaatatacatagaagaaacatggaaaggaaacagcacaagggtgaactaatgaattgttaattatacatgatggtatccaaaaagttaattagaaaagtaaaaatgtgaagtgtttaacaatgttgcatctatatgtacttttgaaggttggaagcagtggaggatacaagaagggtgtgac

SEQ ID NO: 27374 - DNA, 992 bp, Glycine max
  Intron number 1 from transcript Glyma19g41360.1 (locus Gly ma19g41360) derived from phytozome v7.0 (chr-ID Gm19; pos 47641458 to 47642449 reverse strand)
cagcaccggtatctccctcaaccacgtccccgccggtcggtaacctccctttttcaacttcatatctatatccgttttcacttctgctattcctacctccccgatttagtttatcgactgttgatatcttcaatctaataaaacactcctcctgaactctataactgcatactgtcttttggattgaagttaaattatgattatcaaatctctacagctggcaattattataactcttaatagtttgaagtttctttctcccttctttgagtggatgtgaagggactggtgtacgtggttatttgactatcatgagaaattgtaagattctgacgagctgttagttttctctcctgaaccctgtccatgttccgtggttgttgttctgtagcatttattgaaattgctagaagttgcagataaatatggccgatgcggccgtaattgcagtcagacatcccaccagaacctttctttttttatcagaaaatgttaattgttagtttgttagtttttgttagcatgacggatagaaccggcgaccttttcctcctttcctttcttcttaaccacccggccaaccttatatctcctaaaccttgatgtcgcggttttgtcacattccacagcatttattgatatttccagagattgcctataaatatgcctatgtggctatcattctggtcatagacatcgccaaaaccttgatcttgtggttttgttgcatttcttgatgttgtaagaaattgtagataaatgcgactgatgcaactataattgcagtcacaggcacagtcaaaaccctgctcacagaccaattttggaaacattagttttctgtttttggatcaaatctattgttatttatttttatttttttttgctttgtaggttctgtgaaacttgaaacttctattttttttttgtaactgacgttttaatattcggtgataggcgtgaaagacgcaagtgacaagaagattcttgtt

SEQ ID NO: 27375 - DNA, 753 bp, Glycine max; identical to SEQ ID NO: 19165
  Intron number 2 from transcript Glyma17g11850.1 (locus Gly ma17g11850) derived from phytozome v7.0 (chr-ID Gm17; pos 8898581 to 8899333)

SEQ ID NO: 27376 - DNA, 630 bp, Glycine max
  Intron number 1 from transcript Glyma17g37370.1 (locus Gly ma17g37370) derived from phytozome v7.0 (chr-ID Gm17; pos 41132052 to 41132681 reverse strand)
cttttgctccttccctttgcctacttcttggaaaagttagtactctttcaacattttttgtttctctatatattaatctacatataataaatactactcattctaattgttgcttaagaaaaaaaaatatttgttctacgataatttttattttaacttttcaatatattattaaatattcttcacttatgtcatttataatattaataaaaaataatcaaatttataaataaattcataataatataagattaattttataaaaatattttttctttatctatttattatttttactttatttgtataaaaataatttatgatgcctattattttagacagagggagtaataaatagcatacaaaaaggtcacacataagtatatatatatatatatatatatatatatattataagtctttccatttgtttgcatcagtctattttaactaaataattgtttaatttttataaagttttcacaagtagtaattgataaagattaactgatatttatacgtatttactgttctaaactaattagttatctatatgtctatttatgaatctcacgtgcaacttgttttcctttgattcttttccttttgtccaggaaggagaggccagcc

SEQ ID NO: 27377 - DNA, 668 bp, Glycine max
  Intron number 1 from transcript Glyma19g34590.1 (locus Gly ma19g34590) derived from phytozome v7.0 (chr-ID Gm19; pos 42162956 to 42163623)
gctgtgtctctcacatttttgccttacaacaacaggtaccattatatatgttattacaaacctcatcaaaacttttaaacttttttttctctagaaataatagatcttgtcatgctcatctttaatgtttatatatcctgttagacatcaaataagtaacacattaacacctatttaatgtaggacaaaacttagatggagttctaatggtgtttttgatgttatttaatcagaattggagtttccaaaatacctaaagaattgtatgtaggttttattcttttatggttttcaataacggaagaaatagacttaaatatctaaacatttgcactagccgctcgttcatgaaattctctttagttagaacttggtgatttttctttcttgtctttttttttaatgtatgttggaaatttggaaaaccattcaaccaaactagctactcctgtctttttctcttgcttgaagtctagctacctatctttggcttctatgatgcctcaagggccagtgctccaagaataatatttattattattgccattggctatataaaatacacaccagtcaatgtatctagaaacaaacaaattctctaatgccctctttaaaattctgacttttctaattttcttacattttctttatgatgaaatgcaggtggc

SEQ ID NO: 27378 - DNA, 1041 bp, Glycine max
  Intron number 4 from transcript Glyma20g26360.1 (locus Gly ma20g26360) derived from phytozome v7.0 (chr-ID Gm20; pos 35851282 to 35852322)
ttacctccttgagtacccaaaagtctattactaaggtgataatcttatttcaaccctattattgttcttaagttgggttcattgaactgtggaaggacttcacttggtttgtaataggtttaaattaatggctaaataactgaattatgctgggtattaggaaacattggtttaaaattaaaatgctatattgttcatggacatgttgaagacttctcagctactttcttgttctccactttacaactttagatagggacagactgggcattgtgtcatatgttgaatacacatgtgatgcctgctctcacagttataattaggcattcacgtaattttgattggtgatgcaacatgtaagtaacactcatttgatgcagaaacatatcatagggcttaaagaacgcgcgaggacattctatagaagtaactcgttgtattgattaatatgaaaagatgatgatacaagagggaactatatgtatttataggagtgtaatggaaactgacttatctcaactaatataactaacaataaataacagaggagttttttgtttcattttagaaagcatgtatactcttcctacaagtaattgttgatgaaatgttgtgtacacagttgatgcattggcataaaatgacttgaatgcctgtttaatatttgatttacaggacactctgcagatttgagactaatagaaattttaaaatagaataacattttatatgtatttttttcttttataaaggaagactttcatgttccaatgtaatgcagcaaacttttgaaccatcttgaactgatggattaacttttatggattttatcagttatcctaaatatttttgaacaaatctttattgaggatgccctgaagatttggttgctgtgttgttgtattgaccgagttgtgtttcatttaagagatatgtgctcctctagttttatcacttttatgtgtgtacgtgttattgattttctgaaaatgttgtcttctgtcagaaaaagaaaaagagcaaacaacaaaggcggcagaa

SEQ ID NO: 27379 - DNA, 809 bp, Glycine max
  Intron number 1 from transcript Glyma18g09940.1 (locus Gly ma18g09940) derived from phytozome v7.0 (chr-ID Gm18; pos 8785874 to 8786682 reverse strand)
ttgtggcgccctcaccggctcccttttcggctgtcctctctctgacttggacttgcatgtgctttatgtttactttttgtgatgttaccatttattttttctgtttttcttcgtcattctcttgtttctggtattttaaatttcttagaagcagtaccttaggtacttttaatgttgtttttcaatcataattggagtttcacttgtaattcacataataaagatttgtattaaagatttagaaagtaaatctccatttctgacaggagaataactctaaaggcacttaattaattgcaactaaatctaagatttattcttaatcaaataggctacacggaatttgcaatttgaaattgttttttctttcttgaatttatagcatcctctgagaaatttgtaatttgggagtatatgccgttttgtttatatcctgtacacaacttaaagaggaatctattggtagataatttcaccttcaaatcttttctgttattagttatttattacctttgagtgaagatggagaggagtgagtgtgtaacatcacttaaaattttgaatctatataatattttcctaacaagtaactagagaaatggattttgaactaaattttctgctttattcaatcataggtaatatttgtgtatctatgctatctttgaaatgctggcagaggattatgatcaagaaattcaaattcttagagtttgatagttggtcgatatttctgttcgtgctcaaggatgctttcaatgggtctgttttcaggtgctggattgattaagaagaaaggctttaaagga

SEQ ID NO: 27380 - DNA, 1004 bp, Glycine max
  Intron number 1 from transcript Glyma18g03360.1 (locus Gly ma18g03360) derived from phytozome v7.0 (chr-ID Gm18; pos 2254240 to 2255243)
tcaaaggcaccgtcgacgttaccaacagctacgccggtacggatctgatctctctctcttttttctttctccaatacttagggcatttttattcccttttccctttttgtttttctctctctctaaaattagatctattagttgaacatcagtttcgtttggtgtgctcgaaaagctttttcgaagagaagcttaaaataccacgtcacattgagttaggttaacttgttcgattaaatttctaaggcttaaaacaagctgagctgactttgaaaatccgagctatccaattgagataccaactgatggtttgatacttctacatcaaatttttgaagtgcaaatttaacaacgtatattggttagttaatgagcttataatcaatttcattttaatagtaatatgccaccagcataacattgacatgaaaaattggcaactgttttcgggtttaagcatgaggctgatagatagcgttcttcgccaagttcttccttagctccaaccgccatggactctgcgtctcctaggcttacacccaaacctacattcccgcacatgctatggcttaatgcaaatcttagttctgaggatttgtgccctatctttaaccagatatagtagagtagctttttgttaagtgcgacgtttaccatcttagctttgttatgtgctagaagccttcatgtgaagagattattaggactttctcaaaattttaataataatggaattaccccttgcagacagctttgggaaaagttgtgaattgttaaattaacattgattgttatctgttatgtataacagatgattgaatattgaagtttcccgtggcactagttgcttcattgttatgtttactatgttggatttccaatttgaatgcataagattgttacttccaaaatgaatttttgagatgtttcaatgtgcaatttgacagtgaattgtctgtctctcactacttggttatctaatttgacagtgccctttgaagaag

SEQ ID NO: 27381 - DNA, 658 bp, Glycine max
  Intron number 1 from transcript Glyma20g31120.1 (locus Gly ma20g31120) derived from phytozome v7.0 (chr-ID Gm20; pos 39776965 to 39777622 reverse strand)
tcaactttgccaacgctcaggacggttggttttgttctcaatttgcttttggtttttatgtaatttgcagattgatgtgaattcttttgaccttcattttactcgttaattcggtgttttgtgtgtagagtgaatcatctttatcatcattgtcattattattgtaaaagagagaagaatcatttaaaaaagaaataacaaaatagggatagtatggatttactgtactgatactacttgaatcaacaatattccagtgaattttgttttaatgtttgggtttgagtggtagaaaggcaagtattgggcggaggatgatgttttgaaccttatttatgatattttgttacttagatatgttccaatatatgaagcaggacacttttcattaagtgtccacttaacaaaaaaaattcattggcctgaactgactttttttatatgattcggacattttgtgaataatttgctccttgtttatagttatattgatgtgagttggctgtttgggtagtttgcaggttttgacctccctgaactgaaatctctatgctgtcattgcgcagaaaaaagttatatgtttattattttattgttaatttgcatttttgatcctgttgttgtatgactgcttttggtaattttattacagcatcca

SEQ ID NO: 27382 - DNA, 783 bp, Glycine max
  Intron number 1 from transcript Glyma17g14500.1 (locus Gly ma17g14500) derived from phytozome v7.0 (chr-ID Gm17; pos 11243281 to 11244063)
ttcttattgccttaattgtactcgtcatttaccaggtcagtctacaagccctaacttgttgcttgtgtttttttttttaaaatttcttgttaaagtcaacttagaagctatttaaagcgccccattatctgaagattggttctttatttcaagcatttaactgggtatatgtctaattgtttcacatgcaactttgattaaacacttaacaacttcaagggaagacacgtgggatgaaaattaggggtctatgggttctcatctagtttctaaaaattttagacaagctttagggggaaggggccccatttaagtatttttcctcagaaaatgttttcaatggacagaatgcatgtgtcacttatgattcgtactcaacaaatgtataaacatttagttttaatgaaacatggaagttctaagattggatgagtataatcatgattaggttacattacatttgatgtttattatagttttgaaaagaggtctatttactgaaaatgacctaattttgttatgcttttatcttttcaagtcttcatgttgatctattgaatattcttggagttaggagtttcatctgtctctatgtccatgttctgttatttttctgtttctgcttctgcttcagagccttctgaagattgttaagtgttattaccaccaaaatgcgacttgtcattaatattttatccaggagtctataatgaacttggttgtgtttggtgcactgtcatcttttttatctgagctgattttgtttaacacttgttgcagtta

SEQ ID NO: 27383 - DNA, 626 bp, Glycine max
  Intron number 2 from transcript Glyma17g20420.1 (locus Gly ma17g20420) derived from phytozome v7.0 (chr-ID Gm17; pos 19435338 to 19435963 reverse strand)
gtgatccgtcccccaaggccgtttcttgtgtggcggttactccatggaaaactttgcactaatgaaaacttatagcagcggggctgtattacagtctctatttgcagcctttgtgatgcttgtaaggaaaccatgtatcacttattctagaattgtagcttttccactaagctttggatgtactagatttagagttaaggctgtcgctattagctcattattcttagtgattcatgcaactgtttctctaacagttactctttcaaaatggaccatgttttgttagaatccattaattgtagggattaactatgatttgaatttaaattataatttatccaaatccttgtatattttttttatttgtgattctattttgatattttgtcctcaataatcatggaaagattatagagatgatcatatatttattcactgtctcatataaatgaaaactattatatatcattttcttaatatggtatcagagtcaactccaattacctctcttctttaggaattggagattagattttgagtacaaaaatggagaataggtcaaataaattagattctgcttcgcatatgcaggatctgtcttcaatccttacacctgagtattttga

SEQ ID NO: 27384 - DNA, 445 bp, Glycine max
  Intron number 3 from transcript Glyma17g33890.1 (locus Gly ma17g33890) derived from phytozome v7.0 (chr-ID Gm17; pos 37802922 to 37803366)
gctcctttgccccaagctgccccgtgaaaaaaaaggtatataatttttcataatttgatttagctatatatcaccgtccataaagattataagaataaaatatgtttttttttgtttctatattttaaaaataataattttgaactgaaagtttgttatagccaaaagagttaatctcttaaaagtctgtcagatcgaagaagtatttagtatttgattatgtctcaaatagaatcatttctaaacccgagcggaaataggttaattaataaaatgaaaaaaactaaagcttattttacggaagattttaattaattggcacccatttgaattcagtcttcacaaaacaagatcaagttatcaaatttttctaatgtatctcatcaccgaatgatcatttgggtgcaaaggagtttagaggaccctacaatacttgttacaacgt

SEQ ID NO: 27385 - DNA, 794 bp, Glycine max
  Intron number 2 from transcript Glyma19g00630.1 (locus Gly ma19g00630) derived from phytozome v7.0 (chr-ID Gm19; pos 405701 to 406494 reverse strand)
ctgaggaggagaggctcatttacaatctcaagagagtgtgttctccaactgtccttccattaattgttttttggagctcaatttgtgagccgtgttttcagttcaactgtttttttgtggtgtgataagtgtctgagatgtgtgctcaaatttatgatatggtttgtaagtctgtgtatagacatcttcatcaatcagtcattctagttccaaatgttttagactatactaaaatgtatgttttttttaaagaaaattatccatgtacattacttctatgtgaaagtggtaaacagaattggcttataacatgagatgcctgaagctaggtttctcagtaaaatggggcaagctaaagagttttcatgattacagcttattaacatatttgtaatgaaattcagttgattgattgaacattatggaacctgagatacctcaaggaagtaagaatttgtttgttgataatagatgaggactatctttatgttgagagagagtaattcttaagattcttcttgtttcttcattgaagacattgaatatttcctattagctttaatttgtttcattttggttaattctctggctttgattgtttagttattagcacatactgataatcataaaatggaaaatttcaaattatgataacagatagcacattgatggctgatataatttttacttggtgttgttgtagtgcttgttatatgaacatttgactaaatcttatttccctaccttcaaatttttcaggccaagaagaaagtggcattgcttctacagaaact

SEQ ID NO: 27386 - DNA, 659 bp, Glycine max
  Intron number 2 from transcript Glyma18g01830.1 (locus Gly ma18g01830) derived from phytozome v7.0 (chr-ID Gm18; pos 1051386 to 1052044)
ccctcgatcaggacaacgaagccttacgaaagcaggtagaataatactccttccaaaatataaacaaatttcaattatttatctgtcttattcaatgatattttctccaaattatattttatttaataagataagaaaaccatgtttaatataattttaaaaaactatttatattttaattaaaaataataatttattgaaatgaattaatttttttaataagtatgaaatgtgtttgtttttcttataattaagatggaagagaatacataggagtataatatttatttcattttgagtctaattaattttaaattagaaaactacaggtaaattttgagtgagatagcaaacttcatactaaatttgtttttttgtcctagaatttatgggtgtcttttttcaatcggatactaaatttgtcgagccttctgcttgaaattagtagtttttttctaatttaagagctatatcttctctttatctaaacttctttaataataaagctttacctgagaataatttttgttttgtaaatgctcaatcaactcaatacacatagtgtatatagtgtcatggtttttgttgaaagtgagtgattttgaaattggatggtgtttgcaggttaaggaattgaaatcgaggctgctgcaagaaga

SEQ ID NO: 27387 - DNA, 558 bp, Glycine max
  Intron number 2 from transcript Glyma18g20590.1 (locus Gly ma18g20590) derived from phytozome v7.0 (chr-ID Gm18; pos 22609956 to 22610513 reverse strand)
tgtgaacgaacaagcccgtggggcacgtggggcccgtgagagccgatactttctcctttatgatattcagaaccgcgttcttccttatttgcccttgcttttctacttaatttcagtaatgccatgattctaattttctatcgagcgagagggaaaataaacgtgaatcacagggtgagaatcatccacatattagacaaattattaacatctactcctatcttctaggatttccttggtgaaactactcctatcttctaggataacaattacggtgagttttttttaaaaaaaataattgaacttcattttgtacagagtgacatttaatgtttgcataaaatgttttgaccacaaaatgagtgcaaaaggttggctcattccaaattaagaggtttgtgcctcagatcttatgttgctaattaacttttggaaaatactaacaagtgtcttaagggcattagttaaggaatcaagtgggggtcatggatagatttttaccactacttggttgtttgactttgtggcatctgaagtgaagatagaaagcaaattagt

SEQ ID NO: 27388 - DNA, 615 bp, Glycine max
  Intron number 1 from transcript Glyma19g02160.1 (locus Gly ma19g02160) derived from phytozome v7.0 (chr-ID Gm19; pos 1874540 to 1875154)
cttctgcctaatctgctcatccattatttactgtaatttatggcacaatcttccttaacacttgatacttctcaaactttctgtttcctatgacatctacgataaaaaaaatatttatgtttgaattattttaagataattatttaaaaaattaataaatttattatatatgatgggttacgattgaatgaatgtgtaaaatattttacattataagagtataatcttttttctctatttttattgttattttaatatatgatgatgttttcttttgatcttataaccttgctccagcaacaattttttttttttaattgaatagaacttaaatgttaatagttgaattgggttgtttcttgagtaaatagtgtatatatctatttacagtatcgattatattattatccatcacaaataatcaagtttattgatttttaaaaaaaatattttaaagtcatgtccagggtgatttctgattgattgatattgtgtagtatgaattatttgatactagaagttcatatgttattttttatatgcacataaattgcaaattgcaaaccatgaaaatcatatatgcaggaaaagcagaggcgcatcaagttaatttct

SEQ ID NO: 27389 - DNA, 963 bp, Glycine max
  Intron number 2 from transcript Glyma19g34190.1 (locus Gly ma19g34190) derived from phytozome v7.0 (chr-ID Gm19; pos 41807190 to 41808152 reverse strand)
ctttgcggttggattgacttgcgcctttactagcggtaacatctatctcgtcaacattctctcttcttttatagtattcttttgttaatgataatttgtttttgtcatttatgatttgtatcttattatgggatgcattttttagatgtttgtatacgaaaaaaatgaaaagtaagaaagagacaaaattaaatgttaaatttttttatattcggatagtagaactatttatatacattgcgtgaccgtttggtttgaagtttagtagaattggttttgaatcaatgaaagtgctcaaaatttgtgtttagattaaatctgaatcacatagttatacttatagtggaatgtgtgtttttctgcttcatgggaaagtgtaagaatttgttttgtaatttttaaaacaaacaaacaaatgcttcatttgtacgtttaccaatgattatgatgttttttaaatgtaaaaaaaaaaaatcatatttatttggttttatgttttaggcgtacgaagaggaggatgtcaggcaggctgtttgttcttaacttgttattaaccctttttataatttcatttgggttactttagcttagggtcttggaatttaataccatcaatgacactgctttttattatttttttaaggtggaaactttattaagataaaatgacaagaacatcatgagtttaggccataagcacctcattaggtactgtgcaggtctattagcctccctaagcatgcagcaaagtgaaaatttggaagcctagcattaaatttctgtagtcattgacaacaagctttaattttggcagtcacatcacatgttagcatttttcttacttcctcttgtggtggctggtgaatagtttcatttttgagtgagaattgccatttttttttctaatgaagctggaaactggatacagggagaattattctggaatctgtgatattaactaca

SEQ ID NO: 27390 - DNA, 1039 bp, Glycine max
  Intron number 2 from transcript Glyma19g33600.1 (locus Gly ma19g33600) derived from phytozome v7.0 (chr-ID Gm19; pos 41182832 to 41183870)
ctagcgtcgtcaatcaagaaaagtaccctcacgtatccctctctctctctctctctctctctctctagggtttatacttcttcgtctatttgtatttgccgtttcctttgatagtcttctgcattttagggtttagggtttataattttttggggttatgattcaatagatttccgagtagccactgataatctgtattcgtaaggcctctttcttttctttttgggataaaaaaaatcaggatatttgagtcgttttgttaacctctcctgcggctcaaggacttgggtgtgatgttgatgttggaggtctgaactcataccaggccaccttttatcttagtattgaaaaaacaaaattactttttaatagtattgttaaattttaaaagttgtttcgattctgcttatcaattggtgaagtgtttaagcatttagcacatgttaaataatgagattgttttgtaatcagtattcaaatttgagtatcggcgtcaatggtgtgcctgtggttactggtcaattttgaatttagttgtagattatgatttgaattgtgttgaaagttgaggtagaagatttcatttgaaagtaatagtatgtcaggattctggagttcatatgtttggtagctttgtgttttaaaggggacgccccattttgtgttaagtgtcattgccctgaattaaggttattttggtacgccattaagaaaagacatggatatagtgaatttgatggtagaggaaataaataccaaggtatgctgcgataattagaatagataaacgagggatactcattttaaggatatcattgcaaaagggtttcctaatactgctttgggtacgagagaatcaaacattagaatgaatggagatttatactcattttcctggttaattttgttacccttaatttggaatatgacctgaatagctttaatgttgatttgattttgattctcttcatattatagtcagtaacgtgtgactttggtttcagctttctgtaagaaactgcttcatcagaggttcggt

SEQ ID NO: 27391 - DNA, 1000 bp, Glycine max
  Intron number 1 from transcript Glyma20g01030.1 (locus Gly ma20g01030) derived from phytozome v7.0 (chr-ID Gm20; pos 714332 to 715331 reverse strand)
acactagtttgtgtttttcgcgccactcaggtcttcgtctctcccctttcttcttcgccctctcgttaacttcacattcgctattctttcagtttttgctagattttaagttgtttgcttcaattttccttaatttatttttgtttcaagtttattgtgttatttatcttctcgtcctctctacggtaccttttcaattttttcctccgctcgtcttatcgtttgtagtaatatgtgtgaatttatttattttattggaaaatttctgacaatgcaatattcattctgtgtacttctgacaatgcaatgttcattctttgtacgtcttttgcaaaagaaaaaaatctgggaagtttataatcaaagaaaccctctttttttaattgaggattgtatacctgattggagggttcaccttaaacgttatggctgtcagtctgtcactgttcggggagaagatttgcaattttgcatttattgaatggaaataagttacttttattatttatttgggtacatctgtttaggaggcgtttggaagagcttatttgggcttatggaaagagtttatgacactgtaaactcttttaaccttatttcaaaataagtgctttaatttattttaggaagcttcacagttatgtttatgaattaattttttatgaaagattttttagtaagcacttaatggagctgtttacctaaatgtaccattaatctctttgtttcttcaaagtttgaatcaatgaaacttgatcaaccattatgccaatgtgattgggtttggtcaagtaattgatgaacttctaatgaaactttcaagctagtctaccaaatttgcatggaaagtaaaaaggattgtgctcttatattgtttttctttagcacagcaagctcacattgtattttcctgtccgtgttcattgctggattctcattcacttggtattttgatttgaaagcagttattcatttagaaagctactgctgagttcacaag

SEQ ID NO: 27392 - DNA, 519 bp, Glycine max
  Intron number 1 from transcript Glyma17g11910.1 (locus Gly ma17g11910) derived from phytozome v7.0 (chr-ID Gm17; pos 8953763 to 8954281)
tcttttgtgcctgagaagccacttctctacttgcggttcttcttcttcttcttcttcttcaattttattcgattcgcttgctggaaaattctgtgagcccacctttttttgtcaacaatgccttccttttatttctagttttagttttaaaataattgtaggccgtgtttggttcttatgtcttagttcttcttcattttcgttgtttaatttagaagcttgttcggttattgtctgtctgtgtacgttattcagagcttgggggagttattttgttgtcggtgaggcttgtttccttagttggattggatctgagctcagtaatataacaactgcgttatcgagttgtatttaaagagatatattcattacttacacttgattaattattgttctctctctttttgtaaaaataaaataaaatagacaagatgtttataaagagaactgtgtttgatgtcagattagttggaaatgggatcttatgtttttgaattttgtagttgagtgagggagagg

SEQ ID NO: 27393 - DNA, 881 bp, Glycine max
  Intron number 2 from transcript Glyma18g04260.1 (locus Gly ma18g04260) derived from phytozome v7.0 (chr-ID Gm18; pos 3039337 to 3040217)
taccgcgccggcatcgtccccgtctcttatcgccggtatttacaacaactcacatattctacttaaccaaataaataaataaaatagtataaaaaaactttaatgagcctaatttactttttaaaatgatagaaatctaaatcatttaagttggcatcgtctatgagatggttgttctttctcgaaatgacaactctgcccaagattcacccaagagtaaaataattaagtctcaaactttaaattcactggtaaaaaaagattttctaataatctttataaaacaaaaaagacaaaaaaatataccatatactaataaaaagatctcaaatttagctttcacatttaaattgaaaataaaattctagctcttaaagtttactttaaattttatttatcggtcccttgatggtttgtacctttgtggactttaataaacttgcatcttgtggaataattattattctcgatctatttctgtcgctttcccccatgtttcaatcttctcacgtagcttttcacacaacagcatcgcgtgaattagaaaaagagagaataattctagttctaccaagctctactataatttttacgtctcaaattaattatgattgaatagtttgaattgtataatcataaaataaatagtatatagaatgataaatataaatatttttatataattataattcatacctaaatatataaaattagaaattgtattttaagtttatattaataatttatttgatgtgtttgttgtttaaactataaagtttgggtttgaaatttgcaaatgtaaatgccgcggcaatggctgcatgtggtgaatgtgattgggtgtggtgggatgcagggtggcttgcaggaaacagggaggg

SEQ ID NO: 27394 - DNA, 475 bp, Glycine max
  Intron number 1 from transcript Glyma19g31300.3 (locus Gly ma19g31300) derived from phytozome v7.0 (chr-ID Gm19; pos 39075907 to 39076381 reverse strand)
actacttttccctccaatttcgcttcaccacacatgcatggattctttgattttcatcttctctcgcgttttctgattctgatcttagggttccttatcccccaactttattgcttcctcacgcgtctttatctttttttcttttcgttgatccaaccttttccactaaagcttcgattttttgctttttattttttttttatcttttttgtagtttgtttgtattgtttcgttagggaattaggaatcttcgattttcaagcgccgcttatatcctttgtttgctgttaattattatggttctgttgtgtgtatgtggctgaagtttcgtgagaattttacttctttttctgttgtggtagttttgttttgcagtgaaacaaaagcagtgcagtgaatggttgttactaatgtattttcctgtgttgttatgttttcagatagttgttaacagagtgatttgggagcttttgat

SEQ ID NO: 27395 - DNA, 736 bp, Glycine max
  Intron number 1 from transcript Glyma17g19500.1 (locus Gly ma17g19500) derived from phytozome v7.0 (chr-ID Gm17; pos 17686975 to 17687710)
acagagctgcggaagttcataacctctctgaaaaggtttgccaattcttctttcatggaaggggccttggttttggtcatatcatcaaggttttttccttcccgccactgcattgcgaccacaattgcggccagatgagctgcgttttcttataaatttttgcaatatcaagaatcacgaccagaatttaaaaccacgggcaggggcataattacgttgtgaagtggggcagtagctgcattgcaccaactaagagggggaacctctccacatgtttgcttaaagctggtgtcaaataattgcactaaaatttagagaaaatatataatttcgctgaaaatggaaacctatgtctatctgatctctaagaatttgtgtgtgtataatttagtgtctgaatctgtagactccacaactatttactattcctgtcaactttaaagcaaatttgtcatgaatttgataaatttggagattgaattatatagtaacaaattcttggggatcaaatcaatacaagttgtggctttcagggacacagaattgtatgtttactccaaaagttaattttttctgacctgcgaccccaacaaaatcttctggttcttctgctgtatgaaggctattttatttttcgtgtgcttgagtttggttttgtttgtgtttaagtaattttgcttctagctttttatgtctggtgtggggtttgttgagcagcggaggaggagtaggatca

SEQ ID NO: 27396 - DNA, 878 bp, Glycine max
  Intron number 1 from transcript Glyma19g33430.1 (locus Gly ma19g33430) derived from phytozome v7.0 (chr-ID Gm19; pos 41058407 to 41059284 reverse strand)
ctatttcctcgtcttcggaggatcacaaagatcaggtaccgctggatagataaacctatttgttggcgttgcttattgaatattaacactggaagaaggagttgatcacgaaaaagaaccaactatacatatttgctttattactttgtagagcaaatgtgttattgtatctcttcttggattagctctataattataaatgcgtagtttagagtttacactgaagatattagggaatatcatttatttgcactgaggttttgtgtttgtctaatggaagtgctcactgaggtggctttactaacttgttaattgatgtagaatagcctttcaatgggaaatgagggtgaaaacaatcagggatgaattttgggagaaaattgtatgtaaaagaaaaaatcaaccctgaatttttcatcttcaccttcagttttttttcttttgttataaaactgattccgggggacaatatttgtgaatctactcaatagtttttcgggattttgggacttgaaagctgtcgtagggaatgttaatttaataattacttccaatgatatgaagatatagatatagagtttgtatagtttaacaaaattcacattggaatttatacgagttttaaatcctctgtacagggttttgttgcagattttgctttattagctttttgacttggtttatagatttcccaacattttgcacattaattgctttgcattttggctaattttacattttccagttcatttgttttatgatgattggactttcttctttgacctttatattacatgagctaatgtatccaatatcacgtgccttttactacttggtggataggtaacctgggctggttttgatacactggagcttga

SEQ ID NO: 27397 - DNA, 856 bp, Glycine max
  Intron number 1 from transcript Glyma17g08710.2 (locus Gly ma17g08710) derived from phytozome v7.0 (chr-ID Gm17; pos 6423674 to 6424529 reverse strand)
ctctctcttcgtaaatcgcgtcttccaccaatcaggtacgcacgtgcgtgttctcatcaactcctttcttccccgtagtaattgtcggatactctagtttttcagttatgcttttgttttgcactagcagcttgcttgcttgctacctgatctgtcaatactgcgtcgtttaggaccaatccctcaccctccaaggatgtacgctactattttgttcttccagccttttcccacttttaaaattctcacttaactcgaatggttctgatgtagactttcattttgtttagggtttttaggactttataattctcatgattttgtgggtttttgtataatttgctttaatcttccagtgttccatgtttctggattaggatcatgattttactgttctctagtggcttgattagggtgttatattacgtaagcacttagatactgttacaaatttgctatatagtcctcacacttgatacttggtaaatgtgaagtttcattccagtttatctcttcaccctacatttgtgttttcccctccatttgtaggtcctgatctgactctttgcaattgttttcaccctatattatgatttcaacacactgagtgtgttttttgctgcttcttaagagagatttttttgtaaaaaaaaaaaaaactattattttttaaaaggattttgttttgtcctttttctgacatactatatgttatgcaattcttttgttaatttgagatgggggtggggcatagcagggtggcaagctgaaatatttctcttgctttccacaaccaagatttatccatcattaatgatttttttgtctttacattaatgtaaatttaaaattccag

SEQ ID NO: 27398 - DNA, 483 bp, Glycine max
  Intron number 3 from transcript Glyma19g06050.1 (locus Gly ma19g06050) derived from phytozome v7.0 (chr-ID Gm19; pos 6770500 to 6770982)
catcaacttgcaacagttgcacacaagaagaagaagtagctcttcaatttcacatttcaggttatttttttatcgacaaatattagtttgttacagtgctagtttttattagtagattagattgaactcgttatcttttccctttttctatctcccgagcttatatctctatattaattagccatgttgttatgtgttgtttccttttactttatgacacagttgacttttggatgcacttaaccatttctaatttatatctgtatgcagaaaagggaaaagagggaatgacaagagatgcaggtactcaaagtacacctccttctcttgtttcaagcaaccccagcactgatttaactccatccatcataaagagcccaataaagctttctgaagactcactaaattcaaatacaaaagctataactgaggaagaggtatgtgttagatttttcttgcttttttatttttcaaggattggtc

SEQ ID NO: 27399 - DNA, 895 bp, Glycine max
  Intron number 2 from transcript Glyma18g01570.1 (locus Gly ma18g01570) derived from phytozome v7.0 (chr-ID Gm18; pos 868054 to 868948)
caagaccctgaattagtgatccaggaagttcaaaagtatgttatatatattcagtactttgttttcgacatgttacagtcttacacactccctcccccgtggcatcttttaaaatgttctatcttcaaacaaaattacgctctgtcttattccaccaaaatctaatgttggaaaacagaaagatcttgtgtcttttgttttgattcatttttcttctttaccacataaaccgcatcttgcattaccagttggtttgtactattttattagtccattaccatgaaatacgacaaaaagtatcttgagataatacttcttgtgttaaacttatttagatgctatatttttttttaaaagtaacaactattcatccctatatattaaattaacgtcttaagaattattttttagttgtaatttttccttaaaaaataacgctatgatttttcacatttatatattatcttaaattttaaattcaaattcttttaaactaattatgtgtattacttttataattttgaacatttttctctttttatatacatcagcatgatgcaattccacaaaagaataaagtagaatattctccgaatgctttttgtgatgaagcatgttacagtgacaagaaataattgtagacattagcactaggaatagaacaaacacatgttagtgaccggccactaccttcaacgatgaaacatatgtgctagcgacctcagcacatttgtatactttttctttccataggatcatcgattaccataggagaaatttgggtttccattctcatgaatgatcaacattttttaagactagaacacacatgcatcatgtttaagaatgacactgaaaggagcatgttctttaattttactgtataggagcatca

SEQ ID NO: 27400 - DNA, 682 bp, Glycine max
  Intron number 1 from transcript Glyma18g52800.1 (locus Gly ma18g52800) derived from phytozome v7.0 (chr-ID Gm18; pos 61282681 to 61283362 reverse strand)
ttacaccagtacagttgtaagtctttctttttctttttttctgacctagtggtctcaactcaatcatgctttaagttgttgattatttgaagataaaaaagaaaccattctcctaagatgaccaggatagctgaaaaaatatgaagctctttgtcatgaaactaaatcatgcatgttttaagttattggttattaacaaaattaaaataaaatccttctcatagtatgaccagagcagtttcaaattctttgacaaggaaggaaatatattatctatatcttagaatttgggagtggatatctgctgctggcatggtccaataatcaattacccgataggctcaacaactactagataggatagattctatgtcaacatcttagaaattggatttcgccatattattagtcaaagttagattcaacaaagtaccaaaggaatgatataactcatttttttgaattcttaagaagcctttctttagtataatatcttattcattaatgtcaagatcaaaggaattggttaaaacatgtgaaactacttagtagaagggccataaattttaatttctaactttgctgtgcaatcattttattcgtttttggtacaatcaaacacttgattttatttttcatgttggcaatgcttttcttttgtgtgtgggactggtgcttaaga

SEQ ID NO: 27401 - DNA, 424 bp, Glycine max
  Intron number 1 from transcript Glyma17g13600.1 (locus Gly ma17g13600) derived from phytozome v7.0 (chr-ID Gm17; pos 10426911 to 10427334)
agcttgcaatcagcagtgtctcaggagctttacaggtatgatttaggacaaaatttacaaataattctttaggtgagttaggttcttattgtgttgttctcccatcaaaattggagtctcacttttttagttgttttttgtattattcacctcgataatttgtgttggcctttaattcaaacttttattaagtgaattgtcgaggtagaactctaatttcaattgaaaaacaacactaaaaacatctatagatcttcatctaatttttgtggtttggtttactgtcctaattggtcttttataccaagtagttaaaactcaaaaacttgaaattttgtgcacagatcatcttatcccaattttataattttcattcctttgttttgcagacattgcttgagaagggtgccaagtacctagtagt

SEQ ID NO: 27402 - DNA, 404 bp, Glycine max
  Intron number 1 from transcript Glyma18g44910.1 (locus Gly ma18g44910) derived from phytozome v7.0 (chr-ID Gm18; pos 54632197 to 54632600 reverse strand)
gcgagtcttttcttctgcataaggtaaaatctttgaagatgcggttgtgttctatttgtcattgagttgtaagtttttatccgctaaactttagttgtcatggctttaatttgggtgtctcttttaccagctgctatgaatccattatatgctaacaaacaactaaaatcaaccactatttgccaaaagtcttatgcctactttatgataccaaagaaaaaagtagatgacttctatttggcttcttttgagtacaaaatagctgcaccagtcaagtcaatactattcagttaatgtctttacagaaacagtatcttaattcaaaatctatattaaaactaatttattagtttgtgcttgttcatgaagtttcccttggtgactctaagtgggaagatccggaa

SEQ ID NO: 27403 - DNA, 857 bp, Glycine max
  Intron number 3 from transcript Glyma20g27970.1 (locus Gly ma20g27970) derived from phytozome v7.0 (chr-ID Gm20; pos 36949395 to 36950251 reverse strand)
acctattccattctctggaacaaccaccagatagtgtaagttccatcttatcctactaccagttgctgctataacttgtgttcttatcacccaaatctcagaagaaaaaaagtgttgatgttcttcaaaacgtgtttttgcaaatatccttaatgctgttgttggtttaaaacttctcttctcaattgtcaaaagtagaacaggacatgtttgtgaggttgagaaaacgaacatggtccagtaggacccgtaccagggtgggcctagttttttaattgctgctagcttataatgcatatatgataaatcgtgtggacaataacaaggattaaaggaaagagggcttttcttaaaaggatcataaaatgagattttaagctttattcctttaaccactttgggcaattgataggttattcttaatgttgctatttctttttaattgtatttaatcttagaacttaattagcctacattaatagtatatattcaaatatcaccatgagtgatacattttatttttatttttgtattaatcattttaaaaaaccattctaattatgattttttactagttgactgtaaattttcttacattgacagcatgacaactaatctcataattttaatgtaaaatgacacccagataacaaacttcaaaatattcgtctagtgactagtctaagtacttctttggggtttggattctctccatttcttccattattaaacttttgagataataaatgtcacttctttttctttctgagatgaggtgaatggaactttgctgactgaatgaagcaattaaattgtgaacaggttttttgtggatagagttcctgtgagggtgttca

SEQ ID NO: 27404 - DNA, 463 bp, Glycine max
  Intron number 3 from transcript Glyma17g27170.1 (locus Gly ma17g27170) derived from phytozome v7.0 (chr-ID Gm17; pos 28624602 to 28625064 reverse strand)
ctgaggagaaaaaaccagaagaaaaacctaagaaggtaattaattattaattaatcttcattttcctctaattgaacgaatttattaagccttgtgttaactagttggcaagtgtaccaaattgtcacaagtagtaaagttctgggaagtccgagtatcgaatccacaaggactttgtttgtacttagattaatgcaaacccaatttaaaagcaagagataagaatttaaaataaaagataaagaaagatagaagataaggtaaagaaaagataagatatttaaagataaaattagaagataaaagaaaagataagatatttaaagatgaaattagaagatataaaaagataaaagattgaaagatcaaaatagaagataaaatatttaaattgaaatatgataaagataagaataactacttctaagaaaacccaacagtaaaataaggaataaatctatat

SEQ ID NO: 27405 - DNA, 623 bp, Glycine max
  Intron number 1 from transcript Glyma18g45210.1 (locus Gly ma18g45210) derived from phytozome v7.0 (chr-ID Gm18; pos 54963529 to 54964151 reverse strand)
aataagggcccccccgttacccctcttcacgaaaggtttcatctttgtgctcattttttgtaattcgattattggggtggtggtggtgcttgtgatcttgtagtagcaattttgaattgttttggatgcccttttgtttgtttatttagtttttgaatccgggttgtttgaagttaggagtttgccttagagggtaaagtaagtgatcttagtggttgatgaaacagtcaatgtcacgtccacatggacaacgaattatagatgtgttaaaatcgaggttataacaattcagagatgtgttacaatcaaagttttaaattgcggctgcagttttgtcatgttttccttaaattgcgggaagttgcagacaaatgcggccacaaacacttaaattaaaaagcctcaactttgctgccacggccatggaccattttttaaaaccttggttaacatattaacagttgattttcttattgacgcatgatattacatactttactcttaccccgctttagaggagttgaatcttcaattttgatgtgatatttaattgtttgttttgatgtgggggatttggtgtgctggtttggattttgagatgatgtatgtgtgttaggttgata

SEQ ID NO: 27406 - DNA, 924 bp, Glycine max
  Intron number 5 from transcript Glyma19g41680.1 (locus Gly ma19g41680) derived from phytozome v7.0 (chr-ID Gm19; pos 47894088 to 47895011 reverse strand)
aggttgttacgccggttgcaccactaagtcagcaggtacctgttttttaagtttttcatatttgttagatttctggttatcactagttattgtattcagacactttttggattagaaaaatgttgttcttttctctttttgacttcttgtcaaatttcaaattcccgtggatgaccttaacttcttttgtcatgggatgtgttaggtgtgattaagtgttttggatgagagtgatgcaatcatgcagttacacatagggacacttcttttagtgaatgtcaaagttttacagattcatgttgaaccctaagtgatgcagttaatcaaacatttgtttcatttatgtctagtcaactatttccataattctggcaattaatttccaggagaggagacccaagacattactgaactctccttattttaggctggcattttatagtatagcactgttagaaatgtatgccattgtcaatgtcaatacccatgaacgttatccactctttttcctgtgacccatgagaattccttttggtgcacaatttgcatacagttcccaggttcagttgaattatggctttagttagttttgagaccccaactggacttattagtatctgattttagtgagaggttaactgaaagtaactacactacacaacacatgaaataagatggaagaggtagagacccggaaattatcattgttgctgcctctggcttgaggaaaatttttcaaccttgttggtgtgtgagctgtgtatatgcaccaaggagtactaggaattggacttattaaatgatttcacagtttttgtttttgctatctggatgatcttttgttacaaatatcatgtacaaattttggatttaagtatgtttattgcaggctggatactactgctcagtttgtgagtgtgtggt

SEQ ID NO: 27407 - DNA, 570 bp, Glycine max
  Intron number 1 from transcript Glyma17g33650.1 (locus Gly ma17g33650) derived from phytozome v7.0 (chr-ID Gm17; pos 37560529 to 37561098 reverse strand)
ctcgcgctgcaaagctgtcagatattggtatggtagcttcccttcaatcatcaatgtgatcgttgtgattatgaggagttttgttaattaattgactaaggtatttatttattattgtggtaatttagaggatggtgtttcttgtggtagttgttttgattcattggtatagaggcacactgctcgatcaactaagctagaccccatttgtcttcttgttgtagtttttggctgttacttgttagttaattgagtatgtttcttggtgtgaaatgaattcagggtttgctaatgaaattgacaagtttatgttttttttttatcggcagatgttagtttgttagcatggtagttttgttaggagaggggatcgaacccacaatctttcccctcttcccttctctcttaaccatccaacccaccttatatctcccttgatgggtttatgttgtttttttttttttttggaagaaatttggtgggaatagtattagtgtttccttttaaatgggaaaggaaggagagggctgaatttaatttgcatttgtgtggattttgcagttcacaagc

SEQ ID NO: 27408 - DNA, 1026 bp, Glycine max
  Intron number 2 from transcript Glyma17g07560.1 (locus Gly ma17g07560) derived from phytozome v7.0 (chr-ID Gm17; pos 5576544 to 5577569 reverse strand)
ccaatagaacccgaggtcaagcatttcaagtcctggtaaatcctaattactaattatgcatcaagtgaagatttccttgtttctagtgtgttgttaatttgtcggttgaaaataacttatataactattgagaggggatgtttctttttttattttgaattatgaaatatcgttgggaactttcaagttatcgggatgatcttctctaatggttatcagtttgtgttgctttcatgcatttcacatatatactatcttctatggttctatcttatggtcaacagtctacacatgtactgacataagactacaaacgcagcggtagtaaattgtaaattcaacgaggatagcagggtatggaaaaaaggtagaaagtcttatcactgtgaggaatggcatgtttgtgaaatctgtgggagttatagatataaaaaaattaataagactaaatatactgaaggaaaacctacattgtatatacaaaatagtctacatagaatccagtataatggactgtgatttcttactatacctgaatcctgattacctaatgtatgctaaatataatttcttcatgtagaggaattaactataaaacctttttgtcatgttgaaaacatttctaaatcttaataagatataattacttgctgtgacaatatctgatgtctcaatgttgttttataaaaatcataattatatccagttgcatgttaattgaaatctggcttcattgctgccttctagccttctatgtgaaataagggatgctatcttcttgtggcataatattttatgaatttcaataaactcttgctaaaacattgtttcttttgaatatttagcttgttgataaatcatgtgtttccatgttttcctgggttacatttcttttttgctccttctgtgtaaaattacgccttctctatttgacattttagtttttatccatttaattaggtctataaattttataatttatattaaaaattatacaggtagcttcaggaaaggaaggttcaaaag

SEQ ID NO: 27409 - DNA, 602 bp, Glycine max
  Intron number 1 from transcript Glyma17g07560.1 (locus Gly ma17g07560) derived from phytozome v7.0 (chr-ID Gm17; pos 5577602 to 5578203 reverse strand)
gctcgccaccgctcttcctctcccactctcccaaggtaagttcacttcttttcctcatttcatactcttccccaaccataacagatttcgtgtttctttctctctcctctcttttgtattgtgcctcaaatttatgcttatatcgaacctttgaaattctaatttatgcgttgactttatgttcgggaacgggggcttctccaacaattatcttacttgcttccatttagggcaagcaggttatgaaaataattttttaaccctatcaaaactgtttgaaattgctatgattttccaagtcttcaattttccagagtgctatttgcataggtttcacaacaaggattttgaggatcgcaactgcaaaccgacttagggatttcattatcttaataagtaacatagcatttatgtgatatggataaaaaaaaaaatcatgcagaggggtgctggttgagttcagtattgacctattctattctaatatgtaattgatggattttctccatgtttggaggagaatctgcacaacaaacctgtgggataagaactttttttctcattgatgtttaatgagattatactccttgttttaggtgggg

SEQ ID NO: 27410 - DNA, 518 bp, Glycine max
  Intron number 1 from transcript Glyma18g05030.1 (locus Gly ma18g05030) derived from phytozome v7.0 (chr-ID Gm18; pos 3761419 to 3761936 reverse strand)
gaaagccgaagctctgtcctttcagactttctcaggtaggccataagcgagacgacaaattattttaggtggttcttatgaccatttcttgagtatgaaacttgcttatggaccacgtttcttagtacattttgtcctccaaatttcttatgagtattgaatttagaagcaccatacccgtggatgtttcaaactattatttttttttctttctcaaaaatactggctttaaatttcaaatattattttatatctatattattctaaaaaaaagaagcaagttagtcttcgatggagtactaatgttttttgttttcttgatgaacttttctataggaaaattaaatttgacttctgttgaataccaattaagaaaaattagatcagttgtttttttgttgcatgaagttgaaatgataaacatcactgggttttgaaatttcattaattggccttattttcttcattgcattatgatcaagttaccaaaatatatcttcctctcctccgattctagg

SEQ ID NO: 27411 - DNA, 809 bp, Glycine max
  Intron number 2 from transcript Glyma18g09780.1 (locus Gly ma18g09780) derived from phytozome v7.0 (chr-ID Gm18; pos 8650024 to 8650832 reverse strand)
ttgtggtgccctcactggctcccttttcggctgtcctctctctgacttggacttgcatgtgctttatgtttactttttgtgatgttaccatttcttttttctgtttttcttcgtcattctcttgtttctggtattttaactttcttagaagcagttccttaggtacttttaatgttgtttttcaatcataattggagtttcacttgtaattcacataataaagatttgtattaaaggtttagaaagtaaaactccaattctgacaggagaataactctaaagacacttaattaactgcaactaaatctaagttttattcttaatcaaataggctacacggaatttgcaatttgaaattgttttttctttcttgaatttatagcatcctctgagaaatttgtaatttgggagtatatgtcgttttgtttatatcctgtacacaacttaaagaggaatctattggtagataatttcaccttcaaatcttttctgttattagttatttattacctttgagtgaagaaggagaggagtgagtgtgtaacattacttaaaattttgaatctatataatattttcctaacaagtaactagagaaatggattttgaactgaattttctgctttattcaatcataggttatatttgtgtatctatgctatctttgaaatgctggcagaggattatgatcaagaaattcaaattcttagagtttgatagttggtcgatatttctgttcgtgctcaaggatgctttcaatgggtctgttttcaggtgctggattgattaagaagaaagactttaaagga

SEQ ID NO: 27412 - DNA, 365 bp, Glycine max
  Intron number 1 from transcript Glyma20g29900.1 (locus Gly ma20g29900) derived from phytozome v7.0 (chr-ID Gm20; pos 38701976 to 38702340)
ttttccctacttctctagctggcagaaatcacgtaagcctcctatgtcatatatatatatatatatatatatgcattttttctctctcgacaatcatgtttgaaagactgtcaaatattaacagtaaaattctaacttagtttgtcatgtcgtgagagattagttttttctactatacatatccatgaatataaaacataacataataacttaattggtaattattaatgaagagctgaagatatatatgtgtgtatatatatatatatatatatatatgcatggagctagttcatgttaaagatgcattttgattttttgtttatgtaggtaaggttttcgtgtactggttggggacggagcca

SEQ ID NO: 27413 - DNA, 892 bp, Glycine max
  Intron number 1 from transcript Glyma18g22380.1 (locus Gly ma18g22380) derived from phytozome v7.0 (chr-ID Gm18; pos 25193375 to 25194266 reverse strand)
agtgaagaacaggtcattatctcattatctctatccttctttgcataataattaaacatgattacaagttttgttgttttggtttgttcttaaattataattttaactcagcattgccctcttctttcatttctgaccataccaagtttgaaattaataatatcaataaaaaaaatatattcatatttttttatactatcacttatcatagtcatctttatttggatgattttttccatatatactaatagtaaattaaaacaaacgagaaaataaattgaatgtaagattcttttataaacaaaatcaaattatgtatttgaaatattagaatagttaaacgagaatttctatgaaagagtagaataagttgattttaccttacaaaaggtataattattttatgtaattattataagtttattaatttgtataataatgtatatcattactaattaatttactgtgtaaaaaccaatgtttatcaattgaactcacatcctagaaccaagtttctagtttacttcttttctttctatttttttactctattattgggttaaaatatttattaattttgtcactctactgaaaaatttagttggtttcttatttaaatatcatatttcatctacaaaatttgaatttaatacaactcaaatccaccccgaactgtaaatatgttggtttacttcttttcccttatagctttggttcagaatctgacaaagtgaatgctattgaccatttgtttacaattttgatttttcttagtattccaagttactaactaaatgcatgatcgtaatatatgattgttgcattattgtttttttttttttatgcattgatgttattatggttgatatgaagttcaccgcaggttttagac

SEQ ID NO: 27414 - DNA, 819 bp, Glycine max
  Intron number 1 from transcript Glyma19g07490.1 (locus Gly ma19g07490) derived from phytozome v7.0 (chr-ID Gm19; pos 8862051 to 8862869 reverse strand)
agagaccctgagttagtagtacaagaagtacaaaggtaataaaccaaataatcatttgcttcatattctgtgcttgtgttctcaatctccattattcattaggttcatctttagcatctggctatagatattatgtttttatttatttatttaagtaacggttttttctaaacttcattttagaaatctgataataaacaattacttccctaaaataaataaaattaagagttttatagacatgcagtgttagtgtaaaagtttgacttaattacatcttttcttgtaattctttttctttcaattttacaaatttagaccctccatttttttttgaatttaatctcttcagtattttattgtgcaattttgttttatttgttaacttaatatccattatttagaaaaagttgacggtgcaatatggtatataatatcacattggtaagaatgcacttatatgataacttagtagattgtcacgtcaacgtttttattaaatattatatattaaattgaaagatgacaaaatttacattcagacataaaatttgctaaattgaggaagtagggtcaaaagagtagccaggcttaaataaaaacattatcaattaaaaaaatatttgtgttaataaaaattaagaaatatatcatacataaatagttataatcagataatagcatataaatcttttcacaataaataaatgcttgtattatttactcttggtcttgggtggtaaaatatgtaacttaggacgactatatataaagcacacaaacatgtaacattttatttttctcattacagaagcatca

SEQ ID NO: 27415 - DNA, 598 bp, Glycine max; identical to SEQ ID NO: 26781
  Intron number 1 from transcript Glyma20g22600.4 (locus Gly ma20g22600) derived from phytozome v7.0 (chr-ID Gm20; pos 32546350 to 32546947)

SEQ ID NO: 27416 - DNA, 435 bp, Glycine max
  Intron number 1 from transcript Glyma17g11600.1 (locus Gly ma17g11600) derived from phytozome v7.0 (chr-ID Gm17; pos 8720149 to 8720583 reverse strand)
acaaccgcactgccgctgctcagtacatcattgaggttctttgatcggtttgttgaattgcgtttgctttgcttacttgagcttgtcccttatgcatcccttgttttgccactcactgaatcgttactatttgtttactccaagaaaacaaaaatgtaagaacgagttacttattgctgtttaaggagggaatgatatatatgtacaagagaagagaattttattgttattatgatgatgctttttttttgaatttgttacagtagcttagcttagctcagctcagctctgcttgttggccatgcttgtgttattgaaatggaaattgaatgtggtgttttttttttttacaattgaatgtattaaaaattggcttggcaataagtgtggagttagacatgtactaaattaattggttgatttgtggttggcagc

SEQ ID NO: 27417 - DNA, 441 bp, Glycine max
  Intron number 1 from transcript Glyma18g53610.1 (locus Gly ma18g53610) derived from phytozome v7.0 (chr-ID Gm18; pos 61885516 to 61885956)
tttctcctttccagatctgcatcttccattttttaggttttcattttcacctgtcactgcttgctactgcttatttttatttccgattccgatttcacctgctagatttatcccttctttcttctcggtttcgtttatttgaattttgttctcttttttcttcccgcgaagaataaaatattggagataaaattgtttttgaagtgttggaatctatatttgggttttttcattctaaaatcaaattaatgataaaattgagtatagttttgtttatttagagcaacaactagtcgaaattgctcaaactcaaatcaatttggatctagaatcaattctgcggtattatgaatatttacctatgatcacttaattctgaatcgcgtgatgttgtgaaatttatcttgcaggattaagcggtgagattcgtgaatctgagaa

SEQ ID NO: 27418 - DNA, 435 bp, Glycine max
  Intron number 3 from transcript Glyma19g06450.1 (locus Gly ma19g06450) derived from phytozome v7.0 (chr-ID Gm19; pos 7371882 to 7372316 reverse strand)
tttaagaaggtaagccatgactttttgacaatttgtctagtttttattttggcctaggaagataaatatgtcaattaggatagtctttgtttcctttggtagacatttttttatgtatttgaaacaaagttttaaaaaatggtttgttaccgtgattttggtcttgatgtcaaggtttttggactttttgcaattgcaattgtggctgcattggttgcattgaatgtccaaaaatgtgccaaagccgcaactgcaagccttgatttaaaactttgtagagtggttttgggtttagaggaatgtagtcttaaatgaaaatatgattattattgaggggtctttttgataaatttcatcgatcagagtgtaatgaatgttctctcacatacataactttgatttatgaaatggtatgcttatatgaacaggagagcc

SEQ ID NO: 27419 - DNA, 692 bp, Glycine max
  Intron number 1 from transcript Glyma17g34710.1 (locus Gly ma17g34710) derived from phytozome v7.0 (chr-ID Gm17; pos 38691145 to 38691836)
tcctgtgaagcgcacttcaacatcccaaaccctaggtaagacttcaaggtattagggtttttctctgtttcttctctattcagtttcataatattagttcaattagggttagcaaatggggcattttagtgatttttattggtttcactttctgtatgccagacccagatgtattttagtggcttgaagcatcaagaataataaaatcttcgctcatagaagaaaaaaaattgatatttaataagattatagtaggttaggctttcttcaaagcttagggttcgtagctttcccaaatccatgcatctttcgtatcagctgttacttatctgaatctcattgtttttgtgccaaaattggcttggttgttattttgaatttaaatttatttgattgttagtgttaatcataggtcattacagtgaaaatctgaattccgatcttgcagtttcatgtggttttgagcaacctgttggttttagtaaatgtgtgttagaaattagaatctctgattttgtgtttcgatttagttatgtgaatgcaatgaattatttttttgattgtatatgttgtgctttttgttaagttttggcaaatgctgcattcataaagttgtgagtttgagttggtttttggaaagagtagaacgcgtcttgctaaccctctctttctctccttttaaaattaggtat

SEQ ID NO: 27420 - DNA, 425 bp, Glycine max
  Intron number 3 from transcript Glyma17g06100.1 (locus Gly ma17g06100) derived from phytozome v7.0 (chr-ID Gm17; pos 4311086 to 4311510)
ctctgttgctgaggttcaaattgttactgaatattgatacctctgtttgtctcgtcctactgtcttctcatgatgaaccgcattaggacacttatccgcatctgcatagtgtatacataaagaggcagactcaaattaaattttaatgtgtatttgcatttactagcatggtcttgaaggaattaatcagttgcatgatgcgctagctctgaacttgctagatgctttataggggttttgttttaaagagaagggaatttctgtatactggttatttagggagttatgtgtttgcagacgttatagttattgttaatataattcatatgcgtgctgaaatgatttttcatgactagatgcaagaataaaacattttaaccatttggcacaactcctgacagtagttttatcttgcagctgtggtg

SEQ ID NO: 27421 - DNA, 1019 bp, Glycine max
  Intron number 1 from transcript Glyma19g39500.1 (locus Gly ma19g39500) derived from phytozome v7.0 (chr-ID Gm19; pos 46152014 to 46153032)
cgctagcttggtaagcaccctcttcctcttccacttttgctcagaataactgtttttttaaatatttttattactattattcttaactcatgagtcatagcacacaacattctctttctctttctttctcacatcagttagcaaatttgtactgtggcccaaaacgtttgtaaatgcttccatgaactaccctttttcaaaaattgattaaagttttaatcttttaagctgtcaggatgtatatattaactttgtgattggatttttcaactttgagggttttggtattttcacaccctctctctgaaaaaactatcgggtttaattgcattttttttataattattggtggctttaattgtcaaatttcattttttttcattgttttgtttattgttaactgtggtgtttgaaattgattttgattcatgaatcggatgcagctctgcctcaacccaggaatttagtaattaattttgattgatgtaggatttccccaagtgtgaccacatcatttgtagttggaaaccctgattacatgttcacaaattttttaatttgtttgtgtttaatatctgttcccaaagacaaccaccttaccctttctgatgcgaagtttgtatttatgaaaatcacaagtcttgtaattagaattatgaatgatcaattttttattgtaattagttggttaaacatgtttaagattgtgataaactacatgtcgcactatattaactgatattatctgctttgagttgttagttaatgattagctgtctagttttaggaatttgttgttatgtcttcataacttgcgttgaaccatccatgtgatgtgagtcatgtttgcaagagttagatattggataattagactttaataatgcattagggtttgaagatctcagtgcctttagatggcctcattattttatttctaactatgatgattggcttgtttatgatttcttatcactgtaaaatgttccctttttttaattttttttagggttgctcca

SEQ ID NO: 27422 - DNA, 1009 bp, Glycine max
  Intron number 2 from transcript Glyma19g39500.1 (locus Gly ma19g39500) derived from phytozome v7.0 (chr-ID Gm19; pos 46153121 to 46154129)
aaattctttcacgacacaggtgattcacacttcataacattaacagcttcagctctcagcatttttatgaatgtattttagtcttacatagatgcttatagagatggactctaaaacacaacagacaacactgatgggctgtatccattctggtagattcatagttatcagactgcactatagcttaatcaattatattatattacaaacacaaatagatgagcaggtaggatgtggtttcagtagattaatggagatggagacctgaataatcatgtattgaaagtaatattagattaaaaacatcatttgttcaggattcattcttttgatctaatatatatttgatcaagtcttgttgctttttccctttttttcttttaaacttcttccctccactaccattcagatgctcaagggaggtgggtggatgaaaggtcacgtgcttacatagagtttagtttaggttctttggattttcaaataatttgatgtactttttcatctatttttttaaaaataaataaaatgtaaaggatatcttcattcactcaggttagcaccttctacatttggcttctcaacaacttatgtcaattgccactttccactggcaacagctatgaagtaaataaaaccaggcattatgtggtttaaggtttattagttgagaagatacttgaattatcataccaacatggccatattctgttagaataaactgtctgactcactactgctagctatatttgttttgcatggttgacacttgacagctgctactctataatgatgtaccttaggtgtcatttgttttctaaatacttggtttattaatttttattaataccctatttattattggtttacatctcaatatcgtgacttgaatgttaaggtatgtgttacttcttatgttgtgttcttttggttctcattctatgtggattctttgctaacttgcatattttcaggaaagagatattgcaactgcagaaaaaagaagttg

SEQ ID NO: 27423 - DNA, 1001 bp, Glycine max
  Intron number 2 from transcript Glyma20g26670.2 (locus Gly ma20g26670) derived from phytozome v7.0 (chr-ID Gm20; pos 36041984 to 36042984)
ccgtcgttcttgtcaagatcgctagtagtctcgttgtgagtcttgctggtttggttctaggacgcatcaaaaatgtttttttttttttttttttaacagctacatgagaaatgttcttcaaatgcgttttgaaaaaaaattattactaatgttctggatgatagaaaaccttaaattgtgggcctgatagatgttaaaattaggtagtcgtagtcctgtttgtgtgtgttgttctatgtgaagagatgagatgggtagaatttgtgagtttgtctagcttggttcataagaaggtattaagattcaaatttatagggatgaatggaaaagatgggtgatgcacaaggacattgatcatccaatggcaagagaagaatgctgcatagtaggttccctttttttttcctttgtttaaaattataaattcaataatgttttcagttaattcatacataagtaagtaattggttattcttggagatgaactgaagcagtaatcagatttcctggacattcattgttccttttcccctgcttgggcatacatttcgtcaatccattgcatgtgatactttattattaattttagcattgaaaaatctatgctttgagcggttagtgtattgtatccctgcttatgttgcttttgcatgtttttctttattaattttttaactgtatttatcttttgtttttaagtttctacatcaccctggaaatgctaatacctaaataaaaaataatttatggttcccaacaaacaagttttacagaggcattctacaaaaaatcacttgaatggaacaatttgagccttttttatcagcttattgaattccatacataaatttgcttagtttaccagaaataaaatccatgccagagtcatccttgaaagggctgtatgtacagtcctttcatcagttttctaatactactaatcagtaaactacattcctttcacaggtgatcctgattcctgaggtgaggttctaaatccc

SEQ ID NO: 27424 - DNA, 462 bp, Glycine max
  Intron number 1 from transcript Glyma18g07930.1 (locus Gly ma18g07930) derived from phytozome v7.0 (chr-ID Gm18; pos 6667809 to 6668270 reverse strand)
gctcttgctgagggacttgttgtggtaaggtttctttttttccccctcacatcggatcttgttatgctgtgtgtgttcattggttttgttcttgaataaactatatataaaatcctattctagaagggtatgtttaaattttggtcaaaacttctcttcagttcctctacttctaaagaaagacgatttttggtcctcgtatcttctataataggtaaattttatccctgaccctactatccccactgtacttggtgaatttgttgaacttaaaatactaggttgagggatcaaatttatcaattataaaaaaaaagagtactatattcattgcttttaaaagtaactatttcgattggaaattaactatcttagaagtcatttgaagatgacttttgattaatttattatatgttttaatggtttgtatgtctcttgcacttgtttagcctctgctgggga

SEQ ID NO: 27425 - DNA, 901 bp, Glycine max
  Intron number 1 from transcript Glyma19g38230.1 (locus Gly ma19g38230) derived from phytozome v7.0 (chr-ID Gm19; pos 45202548 to 45203448)
ataaggacgagggtcgccttgtggaggctgctgaggtatgcgtaccactgtttcacagctctatgctgaaattgttgcgtagttatattttttttcttcgatattatcaactgttggcggtgtgaatgtgctgcttgttgtagtagattcactgtggcgtataatgcagctctaagtttgtagtttatgagaagagtcttattgtgccttgcgtatgtgctttttatgaagttctcatagttgtagttcgattgaatgtaagagttatacattagcaggaagaaatagtagtatttgttgaacttggatatttatgacagtttctgctacataactgaaaatattgttatacgacttggctgtgctcttaaatttcagtcgcagttcaaattgttaatagtaaattgtatcaaactgtaatattcaaagacatgatgaaaaatagattgaactatatcatataaattacgaaatttcaaattatcaaacagagtgcatagaataagtgagtgctggagtgaagcgctttttgcagaagaatgaaagcagactaacagagaaattgaataagaaaatagggagcatatagtagtttttatttaacaatttgggcttatcagactttcaatttttagtgagaattgtaattggtaaaagaaaaaaaaaacagaaaaattaatgaattggtaaatcatttgattcacatcaatgacacagaattacactgattcatctatgtatctcatgattcaaagtcatctactattcatcatgcgatacattgatctttaccatgctagtgttttgtagaagttgaaatttctgtggaatttatcactgttaatcaagtgatttacttggaacagtcatatcagaaggctttacaagtggatccttcata

SEQ ID NO: 27426 - DNA, 556 bp, Glycine max
  Intron number 3 from transcript Glyma18g21100.1 (locus Gly ma18g21100) derived from phytozome v7.0 (chr-ID Gm18; pos 23968395 to 23968950)
gcaagggattccctggtgggccacatgacacatcattgctgacatcatttgctgaccatgtggcataaagtatctggtgtggcaaggtattttaatctggacgtgtttctagttgataattatttattttttattgtgtttgatgcaatcctaccccccacaagggcattggatagaagactccaagaagattgggccagagatgcaagagaaggccctagggttctcatgagccttagggtagattttgggcctatcggctaagtatgagcccacttatctttgtacatattatattaaggtttcattatttttgggccttgtatttaggactccctaatataggtagggtaccctaaaaatgtaggatttttcagcccttgtattttagggcacctagactagtttttgtattaggggtagttttgtaatttcacatgcattaagtaaatatttgatgtgtgtgttgagaaataaatttaattgaattggtagaagcccaatccaattaaattttagagggggaggtgagcatttgcttgctacaccccattgt

SEQ ID NO: 27427 - DNA, 485 bp, Glycine max
  Intron number 1 from transcript Glyma18g47840.1 (locus Gly ma18g47840) derived from phytozome v7.0 (chr-ID Gm18; pos 57410405 to 57410889 reverse strand)
gtgaggcacggaatcagagttgaagattcaagtgatcttaccaaaaatggggtggcaaagtttagtcaatggcgcgtgtttggatgagagaagaaaaaaaaaagtgaagcggaaaattggattcatacgatgcacattgcgaagcaaaaaacaaggaaacggaagaacaagcatatgtcatgacatcaaaacggaaggaacaaaactcaacgaagcaaccaaaggaccaaaaataataaaacaagagagagaaacaaagaaaacgctacaattttaataaagaacaaaaacaacaacgttgttgtttatttatggtttaagccatttttattaatggtttttcccctctaaaatacatcatacatcgtacaagacgtgtcgtttgccgttgaaaccgcgaaaattccctcttttctctctttctctttcacacgtctttgttttacaaagcggcttcgatttatttttgtgtttgtttcttcccc

SEQ ID NO: 27428 - DNA, 377 bp, Glycine max
  Intron number 5 from transcript Glyma18g01710.1 (locus Gly ma18g01710) derived from phytozome v7.0 (chr-ID Gm18; pos 964733 to 965109)
tttatttgcgtagattgtggggcaagcccagtgaggtgtgtatcctaaaacagtttataggctcattatggccacaattcctaatatcactagaaaactgttttttttcctcccttattttctaccatttttgaggtggtagggagttggagcaaagaaagcttgtccttttttgtgcatcaaaataacagctaaatttcagctaaggtcttgttaagtgctacatgatagcaaagcaaaataagtctttcatatgtttggctagattatttgcttgcttatatgaaaggaaaaaaacaaatatttagtggacagagcatttaattaagttgacacttgcaggatctaacgtccaggccaaattaccttgtaacctt

SEQ ID NO: 27429 - DNA, 350 bp, Glycine max
  Intron number 1 from transcript Glyma18g14630.1 (locus Gly ma18g14630) derived from phytozome v7.0 (chr-ID Gm18; pos 14486833 to 14487182 reverse strand)
tggtaacttgtggtccaccggtgtaaatctatccggtgtttactcccctcgaatctccccaacaacaaattcttgtaatcttttaaaatgaaaatgaggttgctgcatcaaaactcatgaataaatatttcatagtagtctcattatttttttcattttccttggtagatagaagaataaagtgaaacatctagagatacaatgaaaagtgttagcacatactttcttacacactctttgtttttagctaaaatttaataaaaactacaaaattatgaataagacttattaaataagaaatgagacctattaaattttataatttttaatcaattttagttaataatact

SEQ ID NO: 27430 - DNA, 945 bp, Glycine max
  Intron number 1 from transcript Glyma18g48450.1 (locus Gly ma18g48450) derived from phytozome v7.0 (chr-ID Gm18; pos 57848812 to 57849756)
ctctgcctccgacccacgctccaatttctccggcaggtgccgtacatggatttcatttcattttttatttatttataaattatatacattagacagtccttatttttgttcatagaaaagaaaatgttatccacttatatattttttccaactaattatcatacatgtcaacaaaaaaattatatacattattaatgcctgtatcattcattcgtttttcaatttaatatttgaaattataaaaacacattgaatttaattttagtatagcatcaactaattaacaatggattgaatgtagtttttaagacaattactataaaataataaataacatatatattgataataattttttatattatcatttaattacaaattgttatatataataagtttattggttttataataattatgtttaaagtgatattgaaaataattttccattgattgacaactcaataaaaaattatactaacaatgtatgtatattaaattcctataaacattatttattaaataattttttaaatctttagtcatttaacaaattcaactactaaaatactactatttttcatttttatagatttaataaatttacattagcaattgtaagaattaatttaactattatttttttgtcttcatctcacgattcatcaatcttgttaatgatcaaacttaaatattatttgaatggtttaattttaattttaatatactaatcagttgtgtctaattatgtctgttagtttaactgttatttttatatacatataaaatggttattgacattattttaatttttaacataatagctgaataaaaacacttttgtatatttaaaataaaattgaatatattatttaatatatgtgaaatagtttgtttaggttggggtgcaggggctgaaccggccaacgacaaggaacgcgcacc

SEQ ID NO: 27431 - DNA, 783 bp, Glycine max
  Intron number 2 from transcript Glyma17g08260.1 (locus Gly ma17g08260) derived from phytozome v7.0 (chr-ID Gm17; pos 6120778 to 6121560)
aacttcagagtgtaaggtgctcttcttcattacttgttttgtttcatattttatatctcgtgtgagttaagcagatgttgtcaattgttatttcaaaaattgcaaatatgttgaagtttataaaggtttgaatgtgacatattcatatatataacgtcaatttaaatttcccaatggcatccatcctgctatccactatctcactatagcggtttcggggtcagctgattcacatgccgctttccacgattgataactatgattatagtttaggtagcttgtttctgaaaaatcataaaatatcataatgagaggttttaattaaatcagggcattgcttatatgatcgctagaggtacactgaaataatagtctgcgtatgggacattgggatctatacttcattcttctttccctctgtgagctatgttattgagtgtatattactactagttatgcctttctaaaaactgacaataaagtgtgctttgtctgtgaccttgttttgctttgaaaatcttcagcattgcatgaaaactattttttgctggtggtctgtggaattgtgaaccaatttgcataaaccccaagagagggagactgatattttagggttcatgcttttggtgcatttatgttgcagttgtcattctattctgagagataatgctatgagtttgttttttttacttcttgtttttggtcaaatttcactgtgttatatactataatttatgaatgtaagcagaactaaaagacgtaaatttgaaagcattgaggaaa

SEQ ID NO: 27432 - DNA, 907 bp, Glycine max
  Intron number 2 from transcript Glyma19g38220.1 (locus Gly ma19g38220) derived from phytozome v7.0 (chr-ID Gm19; pos 45190677 to 45191583 reverse strand)
ttttcagctagcattttgcttcagattctggtatgtttttcacaatgagactaattgtgtttgccctaaattcttgaaatgaaatgagtaatctctgtacattttccccctctcacaattatgtttcctccaactttggtttggccaattttgaagtattatgtttgttttttttattattctaagtttaattttgattgattgatggggcacaaaatggaatgagaatggttgtaattttaaaatttaataagcttgcatgaatataggacaaaaaggatatagagagcataaatatttagtgaagcaaaatttacatgaagtagcactctattggagtcttgtgagagtgtgagactatgatcacatatggggaactttttaaattctaacacgattgttggtgggttatctaatctttatgtcttggattttaaattttataattatcaaatttgagtggaagaggagaacacgttattgcctcagcataatttatgcaagataattttagagacactattgaatttgttttttcttttctgattacttaaacttggaggtttcaaggatgtgtatggtaaaaataattttatggaatgcatagtgaagcctacattctatgggccaaatttgggttaaacacttaaaacagtgaaaaaaaagatgattatgtgttcaaaatagatattttttatgatgatatggttgatacatgatccaattgaaatattgaatgtgaattccatagtatagatattttttatgatgatatggttgatacatgatcaattgaaatattgaatgtgaactctatagtggttcatgactcatctgatctgttgaatgcacattcactttcaagtattaagtgtgttccatttgttttctatttgctgtggcaggc

SEQ ID NO: 27433 - DNA, 979 bp, Glycine max
  Intron number 1 from transcript Glyma19g38220.1 (locus Gly ma19g38220) derived from phytozome v7.0 (chr-ID Gm19; pos 45191587 to 45192565 reverse strand)
acagtacacggtacgtgctttctgctcacactctccattctccacttcgcaattctctttagtactctaattaggtttctttacaacaaacggattaaactaaactcactcacaattcgtttagggttataaatagtaaattcccgtagcaattcattgggttcccgacagattaatcaaattagggcatacaaagaaagactcgcctctctgttaggtcgcttcgtgaagattaatgaaattgctcaaggaacatacaattccgcagacgggttttcgagtaaattgttgattttaatcagtacggggtccaggctgtaataaaattggaaatttatgctgctcacgtcatcgacacttgggtgatgcttgtaaatttgcaatattaagttcaagtccaaagaagtaagaatgtaaaacacatgttacagtttagcttggatggtaagattagaggttcaaattagtcccctgcatgtgtgtgtcgcagatcgccatcacccccaagggatttggcttctccaaagtgagaggagtgcattttagaggatataactgttaatcaagagttgagagacttcgataggtatacatatacatatttaacaaactatgaagctgttaaaatctctagttaattttttaatccagagttagtgtagctaaatcccactcgttatatttattatcatttatttcatttgtacttttggagattatactgctgtgaaatgttgtaaaatttatgcagcacttttttttttttaattcctcactgtatatgattttaatcatgttactgactctgtcctgtatctgatttacaaattggtgttctgggactgttctcatctttacagtgtaagtgtaaagctaaactctctgagttttgtagcatgattgattatattctaatataaggtaaatcaacttttaacgatctctttcctggacttgcagccttgctgggttggctttt

SEQ ID NO: 27434 - DNA, 770 bp, Glycine max
  Intron number 1 from transcript Glyma19g38830.1 (locus Gly ma19g38830) derived from phytozome v7.0 (chr-ID Gm19; pos 45688647 to 45689416 reverse strand)
ttcacccttgggagatcgctttcactctctttaatgtcagtctctctctctctctctctctctctcaacctttttccccttacaacggaatttgtttcaataatttaaaaattggattgtcaaataaaagaaccaataaaaaaaaaagaagacgactatttgaattggtgaaatgttgttcctccttcaaatttggggattattactgatcaaaatagaaggattattgttctaggttattttatttttaaataaatggtttggtggagtattgaaattttggatgatcgggttcttttgggttgtcaccgtctttgtctttcatctgtttccttttctttgtaataggtttgcatgtgtctttgtctggaactattgttctgtcgtatcttttatctgcctatctgcccttttaaatgaatgtcataatactgaataggtgagcgtttatttgtgttccgcgttaccgataataatggtgttgacttattgttttctgactactaataggagttttattattgaatttttttggatttttccttccacagtgggaacttttgtgcagtggttgactttttttgtctaaatgatttctgtattttttttttttaatttgtcataggttaattaatgcctaatttcagttctttttttccacgggttaataggcaagggcgttgtttttttttttttttttaaaatctgaacagaatttgtatttcacttttgtagggattgaaccagaggccaaaaaacaaggttcctgc

SEQ ID NO: 27435 - DNA, 548 bp, Glycine max
  Intron number 2 from transcript Glyma18g42930.1 (locus Gly ma18g42930) derived from phytozome v7.0 (chr-ID Gm18; pos 52218241 to 52218788 reverse strand)
tctgtcacaccctagtcacttcaagtctcctaaaggtacgacaatcttgctcaaacttatgattttttctcaaggaacttttcactgggaatatttgattaagttatatgattctttttgtgcatttggcatgcctagtgttgaaatttataattagttcacacttcacagagccctgttgtgcatgtcattgaagcgtaaagtcaaatcttggaaccattagagatagttctgtcatctacttgctactcaaacgcattctctgatattgattaaagtttcctgatgtatgttcatagccatctcctttacaagttatctctattcctttaaattttttaataaaaagttttacttcttgtttctatgtgattgggaagcaaagtcttgtgcaattatatacgctccatagcagttcatcttctgtttaaaattatttgtctaccaaatgaatgcgaggaatgatgattgtgcttctaattttgttttgttaaattttctacttaactacaggccgttggtattggctctttctctggaacctcagc

SEQ ID NO: 27436 - DNA, 975 bp, Glycine max
  Intron number 2 from transcript Glyma18g46970.1 (locus Gly ma18g46970) derived from phytozome v7.0 (chr-ID Gm18; pos 56630036 to 56631010)
ggaagaaatacctgtctctgcactttatcactgaggtatcatggattttatttatttttccttttattattattggatttctatgtctactgtttgcaaagaagaaatgcctgtctctagtataaacaggtcaaatattttgagaattagacagtttatgccagttctaggcagcaaagagtttaatctcttgtagtttctctaaaatggttgaatcttaatacctgataaaaatcatctgcttgttctgtgggtaccgaatgaattggtattctctactctctagggcctgtgtgatctataatgtcaaaaatgttttgggagaacctgaagttatcaggagtttaggaccactgatgttatttagacaaggaaaagggagagaattagagaaatataaataattggaggcctgggtaaacatgatgtatagacatttttacctagaaagcattctaactgaaatttctggatagtaaaggtctctactaattaattatgtcctttcctataaaaagaaaacatgaaaaaaaatgttggccttgttttggttctagaggtacaactctacagaacatgtttattttcctacactggactagccttgacttatttgtctaagcaagatcgaacccattggattaatttgaattattgagggtcgttacttatattaatgaagaacagttattagttatgaagtgtagtcaactattttgggttgctctcaaactacagttcattatgagtgtttttataataagagttaaggattcatctcatgaagttttagtggatgcaaaccaggaggagccttgtagtgtaatatcatttctttagctaatgatttgtgattataaatgctgaatctgtaactgttgacatctttgttttgtctaatatatgttaaattgttaaaatttgaaattgttccccgcaggctgtgttgctgttaataggagcaacacttgcata

SEQ ID NO: 27437 - DNA, 687 bp, Glycine max
  Intron number 1 from transcript Glyma19g39800.1 (locus Gly ma19g39800) derived from phytozome v7.0 (chr-ID Gm19; pos 46342077 to 46342763 reverse strand)
aggtgcaaattataaaccctgcttcttcctttgatggttatccgttcggaatctctttgcttatcatcgttttttcttcttctttatcgacatattatgaaatgcttttttcattatcttcttcgacttagcattcttctttcataatttgggtttgtaattgatcgaattgtttgtttctcttgttttgttgagttgagttgttgccgacctgtgatccccgaagaatgatgagttcttcttcttactgtttagctgcatcgcgaacttcttttattttgacaaatgtggcagtaaacctaaaatatttagtgggcattgtcgaactctagtaccaattgaaacgaaacacacccgctaaagatgattaagatatgtgtgtagaaggcagattttgttgacaaaaatgtatttcgagatttgggtacccgatgttctattattagggttcgttttcttcgtctttccttctcttttgttctcgtggaaagataggttgggatttgtgattgttcaacattttgagatgtcagtgataataataagaattttcagcagtttgactgctttcccgtttaatattccttgagttgtaacgcatttgaaccctctctcattgtttcacattttataaatgcactttgcgatgcagtcgtcatcccgaggttaagtgggctcagagacttg

SEQ ID NO: 27438 - DNA, 458 bp, Glycine max
  Intron number 1 from transcript Glyma18g04830.1 (locus Gly ma18g04830) derived from phytozome v7.0 (chr-ID Gm18; pos 3576986 to 3577443 reverse strand)
tcattctgctagtagcgttggaccagttcgttttgtaagtcttccaagttccaatcatttgaatttttttttagttagttcttagtattgtaggttttgtaagaaatctttgctacagaacatccaatttattaaatatttgctgctgaacatccaattctatacatttgtttaatgatgttaaattttttataatcacaggatatgaaaattcaacttcttttttttttggctgcctaaagattaaactctatcatggttttaaattacggttgtggtgaatcagaaaacctttacattgtagcaaatgtgaaaaatgtggctgatgtggtcgcaaatgtggagtgtcaaaatacctagtcattgtggatcacaatttaaaaccatgaacgctattatcaataaactgacacacatttataatttgtattgttttgaagatccacagcacatcaaca

SEQ ID NO: 27439 - DNA, 1011 bp, Glycine max
  Intron number 1 from transcript Glyma18g35410.1 (locus Gly ma18g35410) derived from phytozome v7.0 (chr-ID Gm18; pos 41687338 to 41688348 reverse strand)
atcaaagaagacgagagcaacaagaaggaccgcaggtaagaaaagctagctccacaaagtgcattttctacgtttaatggtgcttaatttctcttttctataactctatttatgatagaattatgatcatttttgtgtttaggattgtgtatagtagttgttttataaccgcaaacagatcaaatgatccaattgcaaggtgtaacccaaatattattgttcataaaattgggcttattttttgttaaaattcattggtcgatcttttaagtgtccgtgtaaatcagttattccttttgatcttcatttcattattttcgtattcttggtggaaaatacttttttcacaaaactttataagaaaaatataatttaatccttcgaaatacaagtaactacgtcaatataattctttaaagtatttgcaattaacaatctaatattttggacaatatcaacatgttaatatttcttaagaattgaattatacgttttgttaacaacaattattctttgcctaaaaaaaacaactattctttgtttagaagaaaaaatttcctttaaagggatatgtttagtgagaagtgaaaaaatataatttgtcatataatactacatcattcactaaaacaaacaaaataaaacaaaaagaagtcatatgataacacatgaatcattaaaactaatgatggtcttaactataaaattcactcttttaatgttcttatacttcaattactgaaaagttttaatttaaatttataaatgaagatttaattcttttagtgaaataataaaaaatatgttgatgatatatctattataagccttttagtattatgtatgctatacagtttattcatgttaaaatatttttttttaaagttagactcacataaacataattaatttgtcaaaaaaagtgaatattgtagaataaatgaataatactcagtgaattaatttcgtttggcagatcttggaaagccttcaaggacaagcttcggctga

SEQ ID NO: 27440 - DNA, 758 bp, Glycine max
  Intron number 1 from transcript Glyma20g27000.1 (locus Gly ma20g27000) derived from phytozome v7.0 (chr-ID Gm20; pos 36286080 to 36286837 reverse strand)
tgctcttcccactatcgttttgctcgatcgaggaagtaagattctcttacctctactcttttcgtgtctgatttcaaggtttctggttctgctggtctgattttaggttgtaattttgtttttgtggttgtgaggttttgcagctggttttgctttgcttgagaagtgtttttggttccttggttgcatgtttcgcttcttcttttgtcggcttaggtgcactgccttgatgtttggttcatggggttttgctattgcttgttcatgtatctttgggtagaataattgatagataaacacgggtcttaggttttatttcggaagtttgaattcatgtttgatcgtgcaaaattacgtaaaaatagcgactaacgtgattttaggtaaatgctcatacatttggttctgtgttgaggaattgattctcagtctagaattggttatgagttgaaacaatctaggtagcattatactgagttttattgctaacctgcttttagaataaaaacatccaaacgttaatcacttcaccttaaaatcaattttaaccaaaattaatcacttcaaaattaattccattcaaaggtaattttacaaacactcgtcccaacacacagttatctatgagttcaaatttgtggtgtgcttttgcacaagtgacatgctgtaagtatgaacaggtctcaatatgttgcttgggtgtattctaagtgttttttatgtgttccttttgcagattgcttctttgctttgaaggt

SEQ ID NO: 27441 - DNA, 1020 bp, Glycine max
  Intron number 2 from transcript Glyma18g03560.1 (locus Gly ma18g03560) derived from phytozome v7.0 (chr-ID Gm18; pos 2431905 to 2432924 reverse strand)
actggtggagcctcttcttttcttgtttttgcctcgtttcctctccttagggaaaagggttacctccccgtacaaggttcgttcttcttcaatttttttcttgtaaccttttgtcgaacgtgattggttccaaattccaaaatgatatgtgttttttttttttaatcagaaagttcccatatttgttggtgttttcattgattggcagatgcaatgttggctagagaatgtttttcattttatatactgagaatgccaaactggtccccggggagtccttattttccaggactagtttaggcctttattcttcatggtaattaggattgtcttagttatggatttttttaagtaaaatagtagatggtgaaaaagtttttatttatttattttaggcttagttgcatttttagtcccacatttgttggattttggtcccttccctccaattgtctcaattggatcacttaagttttcttccatttatcatcacattccttcattcttatttcatctagtatctaacaaactagataacatgccaacttggacatgacatgacagaatgtatcaattgagaataacacaacatatagacttaactctgcgttagcaatgcttgtgtgggtaaatttattgtttttatgtcagtaaagaacatcaaaaggaatatctttccattttgagaaaattaatgaattgaatatcagatgaaattaagatgggaaaactgtgaatggcagaaaatttgagagactcaattcatgcaattggaactcgaggaaccaaaattgtacaatcataatattgatgggactaaaaatgcaattaaacctttattttatgtatttttatagatattataataaaaatgtcattttgctttcatgatttattttctttttgaagtgcaaattgaagcaacatgcctagagatgaaagggcctaaaattttcatctttacttttgtttaaaatcggaagagcctctggtgtatctcccaccactcaaggtgaaaga

SEQ ID NO: 27442 - DNA, 337 bp, Glycine max
  Intron number 2 from transcript Glyma17g16420.1 (locus Gly ma17g16420) derived from phytozome v7.0 (chr-ID Gm17; pos 13137262 to 13137598)
ctcaacagttcgtgagaggaatcaacaactttatttagttgatttagttctcaatttggtttctgagaaattgaaggaaaataaggaataggaggagaatgacaagtatttagttgttttagagaaaaaattgttaatttttgtggattctcttgtgcattttggggtttgactgaagagataaagttgaggattctctcacttttctttaaggattttccttcatgcatttttttcacattatattttgttaatggttttgggaatgcaagcttttttgttaatggttttgatttggtcaggcagaggcagctggagttgggaaagtgaggcacaa

SEQ ID NO: 27443 - DNA, 400 bp, Glycine max
  Intron number 1 from transcript Glyma18g45780.1 (locus Gly ma18g45780) derived from phytozome v7.0 (chr-ID Gm18; pos 55495134 to 55495533 reverse strand)
tactacaattccgagttgctttttttccctagttggtaagaacaatcaattttcaatcaatcatatttgtttttttcatgtgcaaaaaaaaaaaaccatctctgggatttatgtttcttgggttttagatccttatttttgggaagtcatgtacatttactggtactttttttccttataatctgcatatatctgggctttgtgttgaatggttattattcttctgctttgctttcatgcttcagtttaacttttctctcttcacatcctccatattgcaaggtttacacaacatcatttttggcttttaatggttgtcctttgatgtgtggttctcatctgatggaatcttctttgtgtttcagcttttctgggccttgaaatcttgcttggagaaggc

SEQ ID NO: 27444 - DNA, 811 bp, Glycine max
  Intron number 5 from transcript Glyma19g41520.1 (locus Gly ma19g41520) derived from phytozome v7.0 (chr-ID Gm19; pos 47770442 to 47771252 reverse strand)
caacaataaacaggtctatctgatccaattgttgtctttcacttcttaacattgataattttatgggtgattcatttatccttttttattatggtcctattgattagttatagtggcaaacttgaaaagttaaagacttcaagctatgaatctaagactacatgcaaaagaaataattatgtgctgtactcgtttacctttaaagaagaaattattactataattcattaatgttgaaaatgtattagtgggataggctattgtattacttagtagtgtagttttctttttctcccctcatctgggttggcactaactcagtcttcttttaccggattagagttcattgtttcattgcttaacttgcaaactaaatattccttgaaataatacaacaacatgtattacatttccaataaaaatattaagcaaagcggctagatgaaatcattcattatgtttaatgaatagctaggtatctggcagagaaatgatcatagggtagtggataactcaaattgatatacttttttaaattacgtgatctccatttctaacaaagaaaggagttgaagaaacagagatctttggattctttttcatccctttattgcctctccatttccctccttagccttttgcaacctttgtgaacagcatattactgattgctggaagcctgaacttgtggaactttatatggctgaactttttcaatgatcctgagactcctctatagtagttggtatcttatgcacgatttctttcagcttcttttatactcattgctaaaaattctgttgattcaggg

SEQ ID NO: 27445 - DNA, 1050 bp, Glycine max
  Intron number 1 from transcript Glyma18g32760.1 (locus Gly ma18g32760) derived from phytozome v7.0 (chr-ID Gm18; pos 38184321 to 38185370 reverse strand)
cactggtggttccacttgcaggtctcttaatttcatgatttcaacaaagtaacttgcttaaaatagttcctttttttttttttcacatcgtactgatgttctgatattcgaatttatgatctcttacattttaacatactattctaattctcttccgttaggccgacctaatgttctccttgtttgctttattgctacccgaatctctctagtttctgggttcgatagatgcacaatttctttgattcgagtttttaatttcttctaaaatcaaatacttgtgttgttgaaaaattaccatattgagacttttatcaattttctgttaatttctgtaaacattattattacagagatataattcatggattagttttgaatgaagtgtccttcagaaattttcttttttctacatgttgagatttagttatcttcctctctaaaataagaggaaaattttaagagatcctttcttcgatttcataaaaagaaataaaatgaatataggaaatacttttgtgattaatagagaaaataataaaaaataaaatatatttttaaactcccatgtggagaaataaaacgcgagacatatattaacaaaataaaaacttataatttcataaagttataaatattctccatattaattcttaacaaaaggatattttggtccttttgtgattatttgaaaataagatcatgatatttgtgatttttttagattaagatattatttatatttttaagtactgatatatgagtatttgtcatatttttctattttattcccgtacaaaatttcttattattttataaaaaataatattaaatgaaaaaagtcttaaaaaaaagaggagagtagaacaatgcagaatttctgagatgaaagttcctatagtcatgaatgttttaggacttatatatatcctgcataattgtggtaagtaccaaaacagacaaagggttagagaagactgagaagtgaaaatttattttgcaactcgcatgcaggtgcacaagtgctggcactgccacaggagggggtgc

SEQ ID NO: 27446 - DNA, 846 bp, Glycine max
  Intron number 3 from transcript Glyma18g04990.1 (locus Gly ma18g04990) derived from phytozome v7.0 (chr-ID Gm18; pos 3719041 to 3719886)
gtatgtcatgtttcttcacgtttttgccttttaccttctaaacaacttctctcaccatcccccttctgccctcatttgcatttatcttcttagcaatgcttactcaccccaattcagataatgtcttatctttaatcaaaacaatagttaatttatagagattcacttgttattgttatacaagacaatctagtaacaatttttcttctttttgtgtagtggcataatagcaatttatgaacttaaaaagtttctgtcaatttctcatcaatgattatctatttccacttttcccttatatgaatattaaagctacacaaccgaaattccctctaccctgacaaccaacagaaatgtagctttccttcttaaaaaagacgtgaaaactacgcagaaaacttctatagcattccaaaattggtccagctcaatatttacggacaacaaataataaaatgtaacaaaattcttaagcaaaaatttacaaggattgaggggggaaatagaaaattaagtctcataggttattagcttagaaatcataatttatttatactgtaactaacttaaagcttcagtaaaaaaaaaaaaacttaaagctagtacgcgataattcatgtatcacagcaagtaataaattgatgttactatcatatcatattaatatacattgttttctttcaagtgtaggactagagaagcactggcccaatttaacaaaatatatcaactcatgtgttcaatagttgtaccttgccacatgaaagtagtctacaacagctagatatattttatatttcggcaacattgttttgatcatgaacttgggtctgtgctgcagggcaa

SEQ ID NO: 27447 - DNA, 423 bp, Glycine max
  Intron number 4 from transcript Glyma18g08000.1 (locus Gly ma18g08000) derived from phytozome v7.0 (chr-ID Gm18; pos 6742146 to 6742568 reverse strand)
cattggactaggacttggcatagcaacggtcataagtaaggctcatcttcaatcaattgttttcaatttaatattcttattttattcaaagtagtttttttaatttcaagccttctgaattctcatatggcaaaacttaagtacagttctttaagtgttgttagtgttctctaatcaaaattggaatttcacctcaataatttacataatcctttaattgatatctttattgcacggattaccaaggagaaatttcgattctaattgaagaacaacaataacaacacctaagaaattgttattaagttttgtccttatgataattaaagcaacaccgtgaagaaagaaaaatattagcattctaaaatccatatcatgctactactacattggttcttaggacttgggttgcacttgcagaaa

SEQ ID NO: 27448 - DNA, 678 bp, Glycine max
  Intron number 1 from transcript Glyma20g22680.1 (locus Gly ma20g22680) derived from phytozome v7.0 (chr-ID Gm20; pos 32606883 to 32607560)
ctccgcctgtttcttctccttgtggactgtaagaggtgcttgccttcgctatgtactcattttcgcgtgtttgcttgctctagatctgattatcttttattcgagttctggttcgttgtttcgtccgtgcataatctgaattcaaatgctttcaatcttgttacgtgctacgctaccagatctgttcctagtaaatccgtttctcattttcaaatcgcgaatcgagcaattgatgtgtagtgtgttctgctgagtgaagaagtcaaatcattttattgtcgaaacagtttttgaaaattttctttcgtagtcgtgtcgagcagatctctctgttctttttcctctctgtttatttcctgttcggtttagatttttgctcgtaatgaattattttattgtattttgtttgatggattttaaaggtagttggtgaaataaattaacacttaacaatgcctctttaatttttttagaaaaaaacctggaatatcactttcgtgtagtattttttttaattcagtctgagtttcaaaaattaggttgtgttcgttgcatctggataagatgacaatgcttctcttatacatttgattcttgaaatatgagatttgattgcaactatgtgatttggctgacatgttccttctcatgaatttcgtcatccagctgaactaagag

SEQ ID NO: 27449 - DNA, 932 bp, Glycine max
  Intron number 1 from transcript Glyma20g32940.1 (locus Gly ma20g32940) derived from phytozome v7.0 (chr-ID Gm20; pos 41547674 to 41548605 reverse strand)
agatttctaggtatatatatttacatgtatatatacgtatgtacactcacatataaacttacaaaaaatgaaaaaagaaaaaaaaaccactgtacatgtttttgccttttgtttttgttttgagactcagaatgaagagtgaagaaatagatggttgttcttcctgtcgtttctttctctcttgctggtttagcaattttttgaggggctaatttcctctttgcgtttgaaaatgacagaccattactcacagataactgagagatccatgtggcttatgttatctatttctagttttgtccaagaaatcccactgactgaatgtgtgtgtgtagatgcacttgtttttctgcgaggaaataattatgggtgcaaggatattttttcagcaccctgaaagcctgtctttgtttttagtactatattaaacctacctaactgctttgctcagctagctagggctatacattggagtttattttgttgattcaaactcggataattgtattcatgatgtttctgacagtattaatgaagagagaatgtttccattattttattttaatccttcatcacagcatggttaatatacaaatattcttaaggaagatagaatgataaatataataatgcttaatggaaaaatcttacatgggtttataattatactaatattaattccatgcatgcatgactgaaaaagaaaagcttatatggtgttatgaattataaattcattagtacgattttttaagcagataatattgtctgtcctatttctctcacccctattttacatctaagagaaacgggtgggaaaaataaatgaggaaatgtgatttgtgattaatgtgctaattaatctccacctccttcatcttttatgtgcatagtaattaattaatagctgtgtgatccacgtgtttaggata

SEQ ID NO: 27450 - DNA, 865 bp, Glycine max
  Intron number 1 from transcript Glyma20g36530.1 (locus Gly ma20g36530) derived from phytozome v7.0 (chr-ID Gm20; pos 44615508 to 44616372 reverse strand)
accagtggttgtcgcttcccgaaagtaatcgattggtacgcttcgttccgtttcggaatctgaacattactacattgcataatttgagggctctccttagcttgcttttattctctttgttgatatatttttatgtatacgtgtgcacgaagaatgagatgatttgaaccacatgtggtgttgagatattatccgtggttatcaggcaatggttattagatatttaagatttaggggaaagatgaatcactcttacattacgttttttttttgtcactgtgacattgctgcgaatattcagaccaatctccgtcggaaaatttgactgatcaactttagtgggtctcctttcccaaccatgtttttccatccataaggctcgaatccaagaccttgcttaagggaattgagcctagtactactcaaactggtgactcgttggttcttacattatgtttaactcgttagaccattgccaatagagaatgccgttgtcacttaagagttcagattataaaaaaaaaatgtaattaaagattgctacaggttttgatggcattccacacacctgtgagaattgacttttcaagtacgcttgggtgcttctttattcaccatattattaagtagtattttttttttgtaaatcccacctacacccaagaaatataaataaataagttcctagtgatagttgaaatatatgaaaagctgtttaacaatgctataccttttgtattttaattttgggtttcttgaaatggttatgttgctctccttgaacattcacagaatatcacatgcaaagttggtgatattgttttgatattccccttgttaattgtgcaggtaacatcattactca

SEQ ID NO: 27451 - DNA, 844 bp, Glycine max
  Intron number 1 from transcript Glyma18g53780.1 (locus Gly ma18g53780) derived from phytozome v7.0 (chr-ID Gm18; pos 62055057 to 62055900)
ttggttgtggggtgagtgagcttgtagtatatctcatgctttttcgctccttctatttctctttctttaaaaattgccttttctttattttgttttgtcctcacttgtttggccctctatcatagtgaaaaataaagtttctcattcgtcttttattagcttttacatttagaggttactacaaatgaccattggaggagtttcttgtgcaagaaaaacagagaggcttttagaatgtctttggttaaacagcaaaattaagtatttaataaaatgagagcttttttatataaaaataactaataggatcaagggtccttagtctgcttttttttaaaaaagtttaattagcattatttttagtgtaattatgctgtcaaactaagtaattatttgtataactttaagatatttgttatcaaaatcagcaaaactttcatatatatatatatatatatgatttgatgacaatatactgtttgtgcatatattatttattcttctttttgtagttgtctggactctagattggctagcactttgattaaagttccccttctgctgaatctaatgccactgggaaagtaggatttgattgtactttcttcttgatgattagttttgtttcgtattgaatctgtttagctctactaatcatgacccattagttacaaaccttagttaattgtattgatatttttcgtctctgctcaatgttggaagaaattcactttgcctaatgaaactttgttcatctttttgggtttatttattataactacatgtaatgaatttgtgttctgaatgtgcataatcgtaggttgcaagctttggagcttctctg

SEQ ID NO: 27452 - DNA, 858 bp, Glycine max
  Intron number 1 from transcript Glyma19g01850.1 (locus Gly ma19g01850) derived from phytozome v7.0 (chr-ID Gm19; pos 1465958 to 1466815 reverse strand)
cggataccatcatcaaatccaatttactggtatgtatattggacctactatgaacatctttggttatcagttgaattgaagaagtacttttaaatggtgaatatatttttggaaaataaattcattttggtaaaatgtttgtttactaccaaaaatgtgtttgcaatgaaaattttgtgttactactcagttttgtaaaaggaagaattgaattgcctttgtaaatttaaatttaactcaaactaaagtttgtaaattttaatccaaatatgcattatactgctatataattaggttgttagcacagatgactttaaatgggactaatcaaaatcttcgattttaattattgatgttgttgaagtaagctgtgattttgcaaaagtaaagattatagaagcgaagattcttcttagcctgagtaataattttatgattagaacattgggctatgaaatatgaatatagtgaaagaggtttaagtttttcacaaagtgagaaacaatggtttagattctcacttatagaaacattgacttttaattaagggtatcaattgaatgatttaaataaattttaattagttcgactaaatataatagattactttacaatttattaatttatttatgatctattggaaatgtctattttgagagagagattttcaacttcatgtactagagattcgaagaatgtgtaactacaagatcttaagcatgcaaatatcatatatatccatttgccttgacttatttaagctctcacttatacgacattctacttttgtttaacatattattttttttattttgatttgcagacaataatttcaggaggaactgaatcaatcactac

SEQ ID NO: 27453 - DNA, 957 bp, Glycine max
  Intron number 1 from transcript Glyma19g44820.1 (locus Gly ma19g44820) derived from phytozome v7.0 (chr-ID Gm19; pos 50149666 to 50150622)
gagcttgaggttcccaagagagtccccagtgccaggtgaacttacatttcacaattctctcttctttcaatttcgtcctttcttcttcttaactaatctttttcagagtgtaattgaagtttcaattttgttgacacttttctcggtacagatcagagtgttttgattcacatttagcttaggattagatgcatttgttttttttagtgtatgaataagttttttattttatgaagtgagcttcttttatgagttcaaatcacttcgacttctacataaattgcatgataactttgattaaagtatagtacataaattattacctagaagtttatccaaacgtaaccatttgtaatgaactaagcaacataatggccccaattaggactaggaccacatctttgtgtgttggttgatgcagaaatgtttgtaattttgcatcgaccggggtgttctgaaacggagaagatattggttttcgtgttgaagttgcaaattctaggaaactttggtttctaaagttgagatgccctggatattttatgagccttcccaccttgaaagattttggctttgtcccttggttgacgtctgttcaaagttttatttgaatgcattttcaattgaaataagttgcttgataactgcgaattaaaggttcgatgacttacagatggggaggaattaaacagttgggtatggatctattgttgtaaactcaatacagcttagaaaggttctttgattggtcttgtggttgttggttgtaatctcttcattgcctcttctctgctcagtggaggcaagataatgaaaaaactatgctgagagttgattgctttacctttcactttcatatatgtactaccctcttcctctcttttcatttaaaatctatttttgactgagttcatatgatcatgcagtgctaaggtatttggagtttctgcaaagtca

SEQ ID NO: 27454 - DNA, 995 bp, Glycine max
  Intron number 2 from transcript Glyma18g44420.1 (locus Gly ma18g44420) derived from phytozome v7.0 (chr-ID Gm18; pos 54106895 to 54107889)
aattcttcttctcatcatttcttttcacacaaaaaggtattctattctatctcttcttcattccttgcttgcaatgaaaactactcagaaaagtagtattcttttgtctctttacttgccacctaccaatcctcaaagtttatcatttccaactactcttctttatttgtcacctgatcatgtgatgcatcattcatatgttgtctattgttatgttaattggtcttgctagttgctagcacatcaatttctattatgtgttggatgacatcatggttcagccagattctatttttttctggttcttttccattttcatctttggtttatgattgatcattgctgagaaaattatcctcaactgggattttcatttccggggggagcatgacctgaattgcatggttttttttttttgttttttggctagattatatcaaatcaattaagattctgggttggatggcatgatggtttagccagattctgttttttctggttcttttttagtttcgatcgttggcttatgatttatcattgctgaaaaagttattctcaactaagatttttcttttctgggggaacctgaaatgaattgcatgtttttttggcttgactatatcaactcagttaagaatttcgccacgtaactcttgaagtacataaggtgatttaagagtttgagatcataaaattttatggttttaactcttaatatgcctttttctgcttctgtgggtgcaactttgtgccaaaatcaatatggtatatttttacaagtgtctaagtaaattatatttaattgatgatgttgttctatctaaagggcatcatttttttatatgcccttcagtcaattcttatttcattaaataaaatgtttgaaatatcagatctttatctgtggtttataataaccctgaaattttgattaatttctatctgttttcgtgatggaagttgtcattaaaaagaattgttttggtataggtacc

SEQ ID NO: 27455 - DNA, 972 bp, Glycine max
  Intron number 2 from transcript Glyma19g01970.1 (locus Gly ma19g01970) derived from phytozome v7.0 (chr-ID Gm19; pos 1652929 to 1653900 reverse strand)
cttggcttgtgcatccttttttgcttccttcctcggtgagtttcaattttgttatggttttaattttcattggatgtgcatgcatgtttaattagcaaagattaatatgagttgaggtatatatcaaattgaaaaatatttctcgttttaagaatatgtgaagtttaaatttgtatacgtattatacaattatacatagtgaagattaaaaatcgtttagtggtcactttattactttagaaatgtgtttttcttttaaatttgactatttgaacatgatctaatgttttatatttatagttctcaatttcttataatgagaagggttctcgtttacagtatgcatccagattaattcggggaaaaataggttttatttaggcatgctactaaaaaaatattatattttcaagagtccgttcagctatatttttttaaaatattctaattaatttttggcttaaatatattttacttttgtgataaattaacgaatttcattttaaattttcaataattttttttatcgttaagtaattaataaaataaaaattatattttctatccctattattttattttaattctaatatatatatatatatatatatatatatatatatatatatatattaatttcttataatattttgttgattttatattagtttctacaacaagtatttgataataactaatgaaaaataatatacatattttagaatgataaaaaataatttttttattttatttaagacttaataaaaaaataatatattagagatttaaaataaaatttattaatttatcaggactcaactatttttaagtcatgaattttttaaaataagttaatctaaataaatatatttcttgcatttgaatgaaccatggaactaatagtatacattattgcctttactttggggaattttagagggttattgttggacaagaacaggtgaaagacaa

SEQ ID NO: 27456 - DNA, 888 bp, Glycine max
  Intron number 1 from transcript Glyma17g08810.1 (locus Gly ma17g08810) derived from phytozome v7.0 (chr-ID Gm17; pos 6495668 to 6496555 reverse strand)
gtgaaagagcccctctcttggaggctgagcgtgctgtaagtctatttctcttctcttcttggcccatatgcacagtgccattcattggtgctcaccttcagcttctcctgcttcagcaatttggccacactcaaacaatttttgtcttttgtcaattaattgtgtgatgaattggaaaaaaaaaaacttttttccactgcctctgggataataataggaatatcctattgcactgtttgaaaccttttctatttatgaaatcttttgatgtgcttctctgcgtatatttcagtttctgttctgtaaagcgtaaactatgttcagttgaaaacatagttggacttagagtctttattattttttgtcatttttcgttttttttttctttttctttttgagggctggtgagatcaaaattggtttagttatttggtctatgtaccttcataatctttaccgtttggtccttctattacttttaattcattttagcccctacaattttttactaaaattgattgaaaattgtatgtttaaggactaaaatgagtcaggttttaaaaatgtatgtttggtctaaaatgtaaagattatatagactaaacgagtaattaaagcattaaaatatataagagaggccattgtttcttttaactgtttcaaactatttggaactcatatatggtttattggttaaggctccttcccagtgacaattgctctttgaaactattaattaagtccccaattcttggtatggctatgcgtttagaacgataaaataaagaaaaaaactgcaaaagggttgtggaaaaatttctgtaactgcgttggtcgttgtggtactccattaatttttatggtgtatatagggaagaggaaagaggg

SEQ ID NO: 27457 - DNA, 651 bp, Glycine max
  Intron number 2 from transcript Glyma18g02550.1 (locus Gly ma18g02550) derived from phytozome v7.0 (chr-ID Gm18; pos 1617944 to 1618594)
gtccacctatacctgcacataagtccgttttggtgagttgttttttgttttgccaactaaagctacgtttggatcatcattcaccccttttaaaattacttgcagaaaaaaaaaatacaaagagtacctttcttcaacaataagttaaacacttgaaaatatgtccacaacggttatccaaaacatgcacaaaatatttcccttaaaagactaacattactaacctattatttgtgaatctttttctatcattagataaaacttattacaaaattacgaataaaattcagtaaataagaaacgaaactcaatattttgtgaattcagtataacaaagtgtgttaagaaaagtgttttcttaacattcttgaaagttgaaatcattcaaacttttaattaggtgtataattctaattataatagtgatacttgatattcaaatattttagacactcaattaatactctttatatgtgtttatttcttttttttcacatcaaatacttattacacctatcacttttttctattattattttttctaagtgtctattagtacatggggtgtccatttaactttttcctttttattaaggatgtaacgaacatgttattatgttctagggagcaagatcagaaatatttaagaac

SEQ ID NO: 27458 - DNA, 627 bp, Glycine max
  Intron number 1 from transcript Glyma20g31730.1 (locus Gly ma20g31730) derived from phytozome v7.0 (chr-ID Gm20; pos 40330219 to 40330845)
ggcaagtctctctcaccgttgccatcctccttcaggttctcccctcgttttacttcacagtaccgtttatttccctttcgtcttctcagatctgtctctttttctgtgcaacgatgaattacgctcattcctgtgtcgcagctgaatttcactctcatgcgtgatttgtttttttttttttgtcttgtttgaatcgcgtgataatgctgattttcccccatggatcttgatctgttacttgttttcctttaatgcgccatttatcatttcgttattgtgttcggtttttcaattttcatgattgaattgtcggagtcgaaggtgatgtttcgtgttgcagaaaatgtgctgagatgtatttatttttttattccattttccactcttcttctggagcttaatcattacgaagggttgcgtatataatagttttaatatcattttgattgtgactcgagattgtgctttgcgtttctaattcagtctttggttttatgcttttttatatttagtttttctgatttggttgctaggaatttgtttgtttcggttttgcatttgaccttggcacatattgttgttttgtctgtagatagtatatatttttgatataatcgttccgttatt

SEQ ID NO: 27459 - DNA, 858 bp, Glycine max
  Intron number 5 from transcript Glyma18g01950.1 (locus Gly ma18g01950) derived from phytozome v7.0 (chr-ID Gm18; pos 1152660 to 1153517)
tgaactagccaatagaggaattattccattcgaaggtctacttttgagcaacctatccctctttcatattttaagtttatgctattttattcatctttagaatttcaagttctttaatgatatggtcaaaacataaaatttatgttttgaaaataacactcacttcatgtgttgtgattgaattatgacaaattaaatttcaagaattcaaaaattggcttttgaataaactattcctttaattggtcttgatgttacaagtatacataactaacttttgaataaattttcatattacaagtatgggctactttatgtatgttagaaatcccttattgtctaatataataaaaataattacataaatataaaacaattcgtatctcatgggttaatttttagagttagtatgtaaacttaaattctagaagtttagaagttgaataaaatctcactttaattttgattttggtcactatgcagctttctaacaattttttttctatagtttatattattaacgaataaagtgaatgatatttagacacaactaaaaatttattttgcatagttaggaaagtgacctaacacttcgaatctcgtaataagaaaataatatacgtattcacagtataaaaaaaattatactactgtattatttaatctgatatcataattttttattagtcgacaaggtgaaacattttagtcgaaaatatacacaaaattacaaattaaactcttccttaatctcctttggtattgattatggatttggttttgtggcacaaatgtttggcactaatatataaatattttagattggtcaagtgataactagggattatcttgtttcag

SEQ ID NO: 27460 - DNA, 523 bp, Glycine max
  Intron number 1 from transcript Glyma20g26950.1 (locus Gly ma20g26950) derived from phytozome v7.0 (chr-ID Gm20; pos 36248733 to 36249255)
gatgttagtttttttcacctttccttccttctcttttatgtcttgcctaatgcttatttactctgttcggtttagtttaggccaaataaattaatgaaaaacacttaattatgtggtttctgtgaaaatttagagcagaaaaatgaaacaagatgaaattttgtaatctgggtatgaatgattttagtgctttttatttgattgaggactatactgtctaattttttgggctgcagagtcttttcaattatgtttttcatatgtttgaaattgaagtggcagaagaagggcatggaacatacgtagtgttttttttttactgtttactgtttgcttttctcataatcattgtttttgttcccatgagttttgttgtggacttgttttgctttccggcatttcttgttgagtgagtgtatgcgtttggttatttgcttcctttgaaaggtttaaaaacttaagttgagtaacactttaccttcttgaagtttttgtccaaagcccaaaccaaatttagtgcatc

SEQ ID NO: 27461 - DNA, 435 bp, Glycine max
  Intron number 2 from transcript Glyma20g26950.1 (locus Gly ma20g26950) derived from phytozome v7.0 (chr-ID Gm20; pos 36249336 to 36249770)
caagtgagaattatttttcgcctaaattgaaatgatttttgacaagatgcatatacatttgtcttttgaaatgtattagtaggagagattgtgaattatgtgcataaattgtaggaaaataaaatgaagagacactatgaattctgttagtaaacactagaaaaatagcaatatgcatcttagttttcagttttgactgatttatttacactcttggtgtttctaaatgttctaagaaaacaaaggggtaaagttgtttatgaaacataaggcttcagattggagctcttaaattaatttggatgaaagtttttggaggttgagtacaactttcccaaatataaaatcttaaaaaggttcttattcgagttcagttgaaaagtttaaaaattgggtgcctaaccgcaatttttattttctctattatatgcagtg

SEQ ID NO: 27462 - DNA, 549 bp, Glycine max
  Intron number 2 from transcript Glyma20g23580.1 (locus Gly ma20g23580) derived from phytozome v7.0 (chr-ID Gm20; pos 33415319 to 33415867 reverse strand)
tagactctgcacctgttgcgtaccctgacccacaggtaaatgattagcttttgtgaaacttgatgaacgttgctgtttgctgtgcatatttcctatcttctctactgctcatgctattattgctagttgtcctttatatcctcatttattgccttgttgagttgtaaagtgtaatgcattgatcaattgagaccttggatattatgcttgatttctttggcatttcaggaattgagacattggcattttaacatttgcttgagatctttgactttttcagctttatttggcatttattcttcgagtggggaaaattaaatagagaaaaagttatgttaatttcattaattttgaagccgtgaagtttcttttttatattttgggttttgattaaaatgcgtaaactgatacatgatttctgttattcttttctctactaatcttggttttagaaatgttgaggttttatgttagattagtagatatgattttaattatctgattatcatttcaggtctgggcctcaggtttctctgctgcatttctcaa

SEQ ID NO: 27463 - DNA, 723 bp, Glycine max
  Intron number 2 from transcript Glyma20g31440.1 (locus Gly ma20g31440) derived from phytozome v7.0 (chr-ID Gm20; pos 40050346 to 40051068)
cacagggagtttgtgttatcgagaggtattttccgtttctctttctctctatgcaggtctagttgcttaactacgttgtgattgccaaattcacttctaattagaaattacaggctttgatatccgttgcaaaagattaccacggatgactcattaattgaaaggaagtagtgccgtgtttaaatattagatattattgcgagcaaaccacagcatggttttcacttctttttcttttttccaaaactatttcatactatacatacataagaaagcaagtcctagcactattaagtgagaaagttgagtgtaatcttccaattttgaatttgatgagtattgctgagtttgactgcattgcaagttagcaagcgagttgacacatttttgtcactggtgttaatgaactagtaaatgtgcaagtttgacaaccatgcttactactgttatgctaggcattggttatcattaattctcatatagtgataggcatagatgcatagtagtcaatagcccgctataacaggacagtggagcggagcggctcaagagtgccaagagtgcgctggttatcattctttttcattcaactttgcatctggtaatcgcaggcattcctttttttaatgtgttgcattttttaccttttttgtaaagcattatttattatatttctttctttttgcagcaatcctgaccagtccaaacatttggaaacagcca

SEQ ID NO: 27464 - DNA, 822 bp, Glycine max
  Intron number 1 from transcript Glyma18g48880.1 (locus Gly ma18g48880) derived from phytozome v7.0 (chr-ID Gm18; pos 58285440 to 58286261 reverse strand)
aagactctctttggtgatttgtttcagttaccaggtacgaggtttttgttgttccttaaactttttttcctaagatttttgtttctagattccccaaatctttttgttggtattttttcaccaaatttttgttggtatagtattttctcaccaacaattttccttagtttatctcttcaatcaccccttttctttttgctagaaataaaaaacaaataaaacatttgtttctctaacttttggaaactcgaacctttgttggttaatctaatatctaactcatgcaatctacccaactcagatccaggttctaccctttgcacaagattttagaaaaacgctcaccgactattttttggttgcaattaatgacattttttttatatttgctactaaaatgttgtgtttgcatcagtcattttttctcgcatttatatgcaattcattacgataagaaggatgaagaacatattgtaatggcaactgcaatataaaacctcaccttttcatctctttctctgttccccccccctattaaacatatttaatcagttatacccaattaaaaattacataagtttatcatttttagtttattattctcagagatttttttttaaagaatgcaatattcatgaactgttaaataatttctcagttatacacgcatttttcttaatttctgttttctaaattcgaagtatccaagtgtttgtacagaaatacccttggctatgctctttaactacaaaacctgccattccctgaataaaccattgtgaaactcacatgcaactgcatgtagcagatcggagctccgat

SEQ ID NO: 27465 - DNA, 568 bp, Glycine max
  Intron number 1 from transcript Glyma19g32630.1 (locus Gly ma19g32630) derived from phytozome v7.0 (chr-ID Gm19; pos 40379679 to 40380246)
ggttaacaaggaatcatatcaaggccttcttcctagtaagccttttctttttcttttccttttgatatttatttattattcgaaaaaacatattatggttctcacaattttcagtcaaatttgatcttaatccgtgtgttttcaaatcaataaatttaatcttcatttagaaaaaatatgtaaaatcggtctcgtaccttaaaaataatttatgctagctgtttgctaacatgttaatcactgattaactaattattagttatatataagatttaaaatagagggattaaaaatatatttttttatgatttaaatttgtgtgctcatatatgttgaccaattctaataacgactttcccgtcccgagataattattgtgttacaataattattattttaatttttttaatataatattaattacgtttttttttaaattatatctaacaaaatctaaaaatgagaaactaaagtgtaaggttagcaaaggtgggatagaaagtgattattgtttttgtgttgtgatgaaaaaggatattttcctagcgggaacagaaacgtcttcagc

SEQ ID NO: 27466 - DNA, 160 bp, Glycine max
  Intron number 1 from transcript Glyma20g36490.1 (locus Gly ma20g36490) derived from phytozome v7.0 (chr-ID Gm20; pos 44581041 to 44581200 reverse strand)
gcccgctccaatcacaggtttctctttttccttttcttttctttttgtgtttaatgttattttatgaaacaaacaaacacattattgacctgcatgtctcctatgttttgattttgtttgttaaggtcgtctttggattcattctgccagtaaagtcccg

SEQ ID NO: 27467 - DNA, 791 bp, Glycine max
  Intron number 1 from transcript Glyma18g11010.1 (locus Gly ma18g11010) derived from phytozome v7.0 (chr-ID Gm18; pos 9843492 to 9844282)
ctcaagtctctcgaagcctctttctctctcttctaggttcgtttctctctcctcctcgttcttgtttcttcggtgattttatgtgtgtgtttgtgtataacggtggtcgtgtgttttgagtagcttgaaacacgtttgacgaacgatgttttactacgttgttgtgtcttgtttattttaaatcatagtcttgtaagttcgtagatcgtgaatttgcttatgatttatttcttagatataaaaaattatggggttttgttggggattttatcatgataaaataaaagctttctcttttcttgaatgaaattggctttttttgtaacttttgttctgttttgttatgattttttgtttagcaccttcctattgattcctgattccgggagtttgatgattggccttcattaggtattataatttgtggatttgattataaatatgatgaacttagataccgtttatattcttaggtgcttttttggtactgttttttcaatcataattggtgttcacacactggtaatctagataattagggttgcaaaattaattttgataccgagttgaaactctaattctgatcagagaacaatacttgaagaattgtttcttagttttgttcatgtgtttcaagtttgatgcatgattcattggttccccaatatggtggatgactatagccaatttatgaactcttgatttcttcttgtattgtaaaattgacatggaattttggtggtttgttcctttgcagaagctatctgtgtttggtgttactaagtctccaa

SEQ ID NO: 27468 - DNA, 461 bp, Glycine max
  Intron number 2 from transcript Glyma17g36600.1 (locus Gly ma17g36600) derived from phytozome v7.0 (chr-ID Gm17; pos 40561024 to 40561484 reverse strand)
aacactttccaattagctgtggtatccattggtttgtatttgaactttgaaatcaatcaaagtagattgcatggaggctctagcaatttgctcaaattttttgttcatctgccacacgtgcaaaggctagaggttcaaagctattttttaaaggtatgatgcccatagcttcactttgcctaagtaattcttctagtttctgtgaataatatgtcaatttcttgatcattcgaatgttgaattaaactaggaatgccctaatactggtgttttgtcccacaaacaaaccacacttatgtgcatgcttttattcgtattcatgttttaaatagattatatgctgattagagccattttctgtttcttggttctgctccagtatttggcagtgggggttgtgccaataaagcttccaagaccatgcattgatctaagttatctttccatacgaattaacttca

SEQ ID NO: 27469 - DNA, 643 bp, Glycine max
  Intron number 1 from transcript Glyma19g02250.1 (locus Gly ma19g02250) derived from phytozome v7.0 (chr-ID Gm19; pos 1958190 to 1958832)
ggtgcactacccttgccatttccccagccacaaaggtgggtaccttttcttttctttcttaatcctttgcttcagttgttttaaaagacaaaacaaagcttagtacagtgctatcaatgttttcttattccaatcaaattttggttgaagagcattacaaagtataaaagttacgacttgggtctagcggaaggggttagtacccgtaacatagtgaactaaagttcgaattttttttagagagaagtgttcatgtttaatgtcgacagtgttatctgcaacgtggaaaacaaggtttgaacttttgcagggagaggcattcacatttagggtgccttcatttggagagtgagtggaaaaagagagaaataaacagtaaaatgatgtgagactcacacttttacaatatacattaattctaaattttcatttcgattcacttttttcccatttcttcctactctacctaacggatccttagtattcataatgtttgaacattgccttcaaaagataataaataagttttgtctttattttaaccaactatgctttcaaacaccatttgacatgactaagactccaaagttgtgttctttgttgtgaagtcaaaggaggagctgttagtggttgttgggggtgg

SEQ ID NO: 27470 - DNA, 1057 bp, Glycine max
  Intron number 2 from transcript Glyma17g09020.1 (locus Gly ma17g09020) derived from phytozome v7.0 (chr-ID Gm17; pos 6695592 to 6696648 reverse strand)
aattcgaagacatatcttgaatttcagaaaatcaggtgcgtcaaattaccaaaatataattcagtaactagtattagtaataatgtaactatttttttttaatgttactttccatttttacaatcttgttttatatactatggtcaagtgagctggttacatagatgtagtgatccgaactggttacagcctcaaatctgtgataatttcttcaaggcagccaatttattttatttttaatcatgtatccattagagaaaattcaagaaaattatttatttgttaaatacgattttttttttttaattttattaagttgctatagttgcaagtaggtagcgctgttgtgttgcctgaatcagtatgttttctcttctcccaaagaacactggtatatgtggttttctgaggctatgaagcaactgaagtttatatacattaagctacgattggggagataacttaattaagggcatgtttggataaatttttctgaaagaacctctaggaggaaaaataagaagaaaaaaatgaaatgggcttttggataagctaaaattagtttatgcataagctaatttgtagaagttctctcatataacttctctaaaagatgatttttaacttatgctaacttatggagaaactcatttcatttttttcttcacttagaagtgcttttgataaacttatccaaaaaggtcctaagtgcttattcgataagctcttatcacatgagaacttatgccataaatttgaccttgaattttattggaccaagctgacaagagcttattttgataaatgacaacaaaaagcttattgaaataaggtaagaagaacttatgatggtcataggctatttttataagcttaattatactcactataaactcttccaaatgccccctaaatttggtgattcttgatactaaatatatacaatgttttgaatcatctaatattctgatctataagttctgatatttgctacttatgaacagctttgatagttgatgatgcttgtaggaaaatttgttgtggcttacgtcccttc

SEQ ID NO: 27471 - DNA, 798 bp, Glycine max
  Intron number 2 from transcript Glyma18g52450.2 (locus Gly ma18g52450) derived from phytozome v7.0 (chr-ID Gm18; pos 61053913 to 61054710 reverse strand)
agctggtcaggagcgatttcgaactattaccacaggtatttgttttgtcttctgcaacctagctaattgaatatgtttgaagtttaaacacatttcaattttggtttatatatgtatatatatatatatatatagagagagagagagagagagagagagagagaggtgcatagaagtttaagcacatttcataacccataaatctaaagtgaacatggagttgctttacacttgcatagaaaacaaaaaatactttagtttaataggccggctatcttattgcctaataaatttgatcagattttagtgtaatataagttcataatgtggataaatgttctattttaattgcatcctccatttctttgatgaaagaaaaatttcttacagtgttacttgtttttgcagcttattaccgtggagccatgggtatcttgctcgtttatgatgttactgatgaagcatctttcaacagtaatctcctttcctgatcacattcaaattattctgatatttttctgtacttatttatggactaatgcatgagagtatttatcatatacttttttcagcttcagctgacccttcaaattgtgttttcttctttctcccccctcaccccattctcttgttacctttgactgtctttctgtgtatttaggttgaaatatgtcgacaaatgaatctgttttttatggttaagtttcttttgtccatttttccttcctttcatttttaatatatcttgcttctatctgttaagatattagaaattggattcgcaacattgaacaacat

SEQ ID NO: 27472 - DNA, 894 bp, Glycine max
  Intron number 2 from transcript Glyma19g39900.1 (locus Gly ma19g39900) derived from phytozome v7.0 (chr-ID Gm19; pos 46429734 to 46430627 reverse strand)
ccgagtgaggcttttgaaggtaagaaaactgctgttaaacttttgtgttatccattatttttgttagaacttagacttataagcatgcatgctgctaattttcttctgtatagattggaaatcataattagttattagagatgcatatgaagaagtttttaatatcacattatagtttttgacttgacacattttaatttaatagctttatacaaatgttaagttctattgatgcaactattgaattatacgataatatactaatggtcatgtataccaaattttaaataatttagacattcatagacatgtaatctgagggcgagccctggtgcagcggtaaagttgtgccttggtgacttgttggtcatgggttcgaatccggaaacagcctctttgcatatgcaagggtaaggctgcgtacaatatccctcccccatactttcgcatagcgaagagcctctgagcaatggggtacgaagtttattcatagacatgtaatctatcggtagaaaacttatatatttaagtaacatttcaaaataaagtgatgtaatgaaatatcaattttgaaatgatatgaaattatagacttgatctttttcatgagaactttctatgcaacagttggattgatacaaagttatagaaggcgtcatttttgtcaagtttgacacttggtgtcaattaatcctttacacacacactcacacactcacacatatatctttgctttaatttttcatgaatgccaaagcagatttgtacatgaatgattcccacagcagagagaatcctgctgttgttgccctttctattttgttttcaaaaccgtgatatgatacacttgaaaattttaataactatgcagagaataagaagaaaaagaaggtg

SEQ ID NO: 27473 - DNA, 311 bp, Glycine max
  Intron number 1 from transcript Glyma19g44330.1 (locus Gly ma19g44330) derived from phytozome v7.0 (chr-ID Gm19; pos 49791766 to 49792076)
tggtggctgtggtgccgttcttcgaggtaccctcttttctttccttctctttttcttgtcacattggttttgtttttaacgagctttcgcaatttatagcatttttattagacaaaattacggttgcaattggcatttccatttttgacttcattgttaggaaacgatctcgtacatttaattgatttttatttgcttcttaatgatcttatattttgtgggatttgtttttggaaatgggtggtaaagtgtttttagtttctaattttagttgccattttgcttttaatttgcagcgaagcataaaggtt

SEQ ID NO: 27474 - DNA, 788 bp, Glycine max
  Intron number 1 from transcript Glyma19g30450.1 (locus Gly ma19g30450) derived from phytozome v7.0 (chr-ID Gm19; pos 38054095 to 38054882)
tgttactccacctaaatcaaaattcaaacatacctgtgagtttcttttagctctcaaacttgcaaatcagagaccctttatatttaaatgattgccttttttattatgttatggataagaactgtttcatatttcgggtcttattattattattattattatgtaacatggtttgggtgcaactacctgcaataatttactgttcatttcttcgaatttttggactttattttagttcgcaatatgtgtcataattcataataataatagttgcattcaaatgcattccaaaacctcaaaatcgagctcagtgcttgcttcctactgtaatttactaaattcccattttattgttttgtgttctctgtgataagttattcaaattcttcaagagctttttgattttgcattttttgattaaagttgacttgaacagttccatcaaattattgaaatgccatttctttctttatcattattttttaatcccaatttaagtggggtttcagataagtctagccttggtattgatacaccgaaaagaaaaaggtgagaaaagggttggtttttgttgtcatattgtaggatcaagcggtggtgacacaataattgttagcttgtttgttgcatttgtttcctctgttgtccacctctgatcacatgacatgttggttgttttctttttaactttggttgtttcttttttctcctatgtaatataaatcctagtgttcctgttcatttccattaccttgtgttgtttcagattgcatttgcagatagattga

SEQ ID NO: 27475 - DNA, 812 bp, Glycine max
  Intron number 3 from transcript Glyma19g30450.1 (locus Gly ma19g30450) derived from phytozome v7.0 (chr-ID Gm19; pos 38055461 to 38056272)
tgggggattgtgggctgagcttgtgagcaacagaggtcattttcatgttctctaaacttttaaatgataaatctagcactagaaggtttctccaggatattttttttcctgtgatttttcatgcaacttacatgttcagatgcacaagcacagaattcctgcaatctgttgtattgtacttgataggaaacgtgataataactgaaaaagaaaatcaaaagaaaagagaagaacattgaatttgttagacaaaagtggacaagtaaaggtatatccacccttgacttaaagtgctccatgattttaaccataaaagtggctactcccttactttctcaatgtagaggagctttttttgaattaaagatacacacatataagggtttgtgccttttctttccttagctatgagcttatggtctccatcagaatattgctagctttttcattgttattcaagtaatttatggtgtttttttcccaacaacttgcattaatttcagccactccacaatcatctttctattgaattcccttttttccaccttttatttttttcttatcttaatctaatttttgatgaaaaggagaggcctgaagtgtcttcttatcattttcttaaggagattctgttttagatatgatgaatgatccttctttatcaatgttcaaatgtgaacaaaggaatgatttgttggttaacttgttgttttgttataggtatgtcactgtttttaattttaagtataactgaaatattatgaattcttgttttaggatttgaagctggcggtcctaacactccttcaaat

SEQ ID NO: 27476 - DNA, 345 bp, Glycine max
  Intron number 2 from transcript Glyma17g15690.1 (locus Gly ma17g15690) derived from phytozome v7.0 (chr-ID Gm17; pos 12413969 to 12414313 reverse strand)
ttatcaggtacttacttttctttccttaattaatttcttttcaataaacaatcgattaatgtttctaataaaagtagtaaaacgaggcttcatcgtcaatgaagcaaaatatttatatatatgatatagtcaaaatgtaatatataagtgaaagacaattttcaattcacaacttagtaagttaggtagcattgagttagaatcaaaattcatattctaagaatatataaaagaaagaagaaaaaaattgcctaatatttacactaattatgtattattaatttatcaaatataaatgatgattatgatgatgatgattcaggtaaggtgcctagtaccagaatt

SEQ ID NO: 27477 - DNA, 881 bp, Glycine max
  Intron number 1 from transcript Glyma20g00450.1 (locus Gly ma20g00450) derived from phytozome v7.0 (chr-ID Gm20; pos 235758 to 236638)
ataaggttatttttaatttaatctttcttctttctttcttttgcttcaattccctcaaattctatgcttttcttcttgtgaacattccaatagaaacaactcattactcatctcatgttatgatgtggttgccgaatgccaactcatcatttgtgtttctctatgactgttgatttgttctacccaattcaagttttaggattagtttggatcagcttctaatgagagctgtttaattgtacaagcttaagactttctaaagttataacgttagtttctcttaagtttgtaagtgtttatagagaagtcagaaattatcttttgagaaagttaaggtgcatatggttaagagtaattaaacagtctgtgtagtgtgaagtgcttttaatctatcatcttatcataaattgagacgtaaggaaattttgttgattcttacaacaattaccataaaagtcatatctaacataatttctgattggttaaccgcatgagtatataggaattaaactctggctattggttaatcttaacttataccagaagtttgattcattttattttatttttttccttttaagtggttgttcaggagtttatccgaattgggacttagtccaatttctagtctatgattacaaaatagtatttgggtcatgagatgaatatgctgcttgtttaataggacaaagaaaaacagaaaataatgaaaatttgcgtttgaactgggagcgtgtcagtgaatctatgtttttgcataatgtttcaagggaaattaattgtcaattcatattttttttttgatgttgatattgcttaatttgagaaaatgttgatgttgtgcaggagcaagcaaaaagttcagaattcaaaggcttcac

SEQ ID NO: 27478 - DNA, 457 bp, Glycine max
  Intron number 4 from transcript Glyma19g27780.1 (locus Gly ma19g27780) derived from phytozome v7.0 (chr-ID Gm19; pos 35090942 to 35091398)
agcagtaaggtaaaaaaacagtagccttaccaaacatgaaacaatcttaccgttgataacaatctatcttaagttgtcttctaattaatttttactggatattttaattgccacagtgtgttgttctatgcataagacattttccattttgaaaggcaatagctgctgcagcaatgttagcaatatgacgtaacatgtctagctaattaattaatagaatatataacatgaccaattaattttaaaaaacattcatagaaccactaatgaaaaattagtgcttgaggttgaattcatgtttctctattttattgtcaatcttgaatgatatttgaagatcaaatttcttttgaatttgtttcatttatttgcgattgtttgcatatagttgatgccatttatggggattttgtactgaacaggctatctggaaacaacataaaccaatcagagaagg

SEQ ID NO: 27479 - DNA, 281 bp, Glycine max
  Intron number 1 from transcript Glyma19g22780.1 (locus Gly ma19g22780) derived from phytozome v7.0 (chr-ID Gm19; pos 27910550 to 27910830)
ggccaaaagatcaagattggcatcagtactctaataatgccattttctttttcttttcttcaacatttttggatttgtgtggcatacttgttcaatgtgaattgtttaaccatttataaagtgaatgtctattttatcaattgacaatgtaaaaaaatcaaagaaaagtttgttgatgtttcttttaccttggtaataattaatgacatgtgatgtgtgtgtgtgcacttgcttgtgatgatgaaggatttggaaggattggccgtttggtggccagggtg

SEQ ID NO: 27480 - DNA, 956 bp, Glycine max
  Intron number 1 from transcript Glyma19g23510.1 (locus Gly ma19g23510) derived from phytozome v7.0 (chr-ID Gm19; pos 28842092 to 28843047 reverse strand)
tcaagaaatttctattgaggccacatcaacttttggtaagtctaccacacccctttctcatagtcactctgtaattttggttatagattcggttggagaccatccattgatttggccaaaatagtatgtaagtgaaggatatccttccctctacaaaataggtctaaatctaaatcctaagcaagagtatattttagtaatgaaaagtgctaggaagcaagacactcttcctaacacatattctttcattcgttgaaatttattaaaaattataaaataagaactattaaatgagataccagatccacaaaaatttataatttttaataaatttaaatttgtaatagataatgtactcaagagaaagtgtcaaaaagtttgtaacaaatatttcccttttagtaattattcttagttctatgaaagtgttataagaccacttacaaatttcaatcatcaacataaaaagtgcattagagattttatattagctaataatatggtacttcctccggtctcaattattaaaaaattattaaaaaaaatagttaaatatattaaattgtatgactttcaattaaaaaatacttttaaaattattttttattaaactttgatatcaaacataaatcttctgttgaattaagaatattttaaaaataatcacattaagacaaaaataattataatttacttataccttgagacctaggtacaaatattttttcctttgagagccgagtaatatataactgaggtagtcctcgctttaagtgttaactagttaagttaaaattgaaaaaaaaaaaaccaaaatgtttattttctttctaagctgctcaatgcttatttatcacccaaaaattttattcttttcacttattagagataaacctcatatggatatatgcatgacaaaagttgtgaacaactaataatttgcaggagaattgaaa

SEQ ID NO: 27481 - DNA, 300 bp, Glycine max
  Intron number 3 from transcript Glyma17g37700.1 (locus Gly ma17g37700) derived from phytozome v7.0 (chr-ID Gm17; pos 41439235 to 41439534 reverse strand)
cgaaggtgagtgcatcttcccttggttgaattttggttcttggtattattagattttggggattcaaatgaaatgtatggtgaagatttttaggtgttattttgggatgtttttggttttgtgaccttgattttacaagtgatataattcgaatgcagtttttgtgccattctttgtttgtgtgaattctacttgcttttctgaaatgaactgttgagttattatttctttgccaatcttgtgggattcagtagtgaaagaataaactgtatcttttatgcagacagggtgcgggaggta

SEQ ID NO: 27482 - DNA, 802 bp, Glycine max
  Intron number 1 from transcript Glyma19g33840.1 (locus Gly ma19g33840) derived from phytozome v7.0 (chr-ID Gm19; pos 41461863 to 41462664)
gagcttccaaaaacagcgacagggttcaagcgttggtacgtggaagctacgatcatgtctctggactattcttatgcttctctattcatcacgcttttctctaatgatcattgattttctgttttccttttgttgaacgtttcgaaagtttctctgtatctgtgtcatgcttgtttgcttgcttggtttcactgtgttcctattatcgctgtatttttatgggaaattttttattttttttatttttatagcctttggtgttggctgcatgcatacacttaaggctttggttgggtaagggttttatatttttgaatagatggatggatattggtgaaatcgtgtgattaggaggaaaaatgtaagcttgcaatatgtacttgattgcatttgtgggtgtgatatgccaagtttatcactttttgtactttctacggtgaaaagttgatttttttctctttaccttttcgagaaaaaatattttatggtctaatatcaccacgggttcatggttctggtcaatcttcacatgtcttaagaaaaatagttaataaaatttgttagggtgtcactgtgataactaacagatgatggtgatcatacaataatttctcccttttggaggctgtttccaaagaaacgttatcaactacagggtgttcttttaggtgcatgtgtgtcaagacaagtgtttgatgttattttaactttcatcgtgcgtattttacaagtatgttatttgctcaccactgaatttttttatttttgttgaagcctactgttgtggaaccacagccttcca

SEQ ID NO: 27483 - DNA, 786 bp, Glycine max
  Intron number 1 from transcript Glyma20g09590.1 (locus Gly ma20g09590) derived from phytozome v7.0 (chr-ID Gm20; pos 13476997 to 13477782 reverse strand)
agatctctagcattataaagtctgtgaccaactcaagagtttacacagactcgtgagagtttcatagacttgacttgtagactcgtaagagtctacttcatataaaaataataacaaaatatctataattaacatactaattaaatatttcaacaacataataaagcaaaatagtaaatcataaagtttagaatatttaaataatcaagtctagtaataatacatcactactagacaataacttgtagaggttgtagtagaggtaagtcattgtcatcaaggctttgatgttattagagaacaaatgtttgatattattaaaggtgagaattttgtatttgagaataacacgctaaatgaaagtatcttgaatgctaaataaataaaaaacaataaaaatgacttacattttggtctaatttttttaacttgctaacttgttaattctgtcgtaaactcgagagtctaccgagtttacttagagtttatagagtttaccgagagtctactaaaaaaagagtttactcaacagtcaacttgcagagaacaagtggactcgtaaactcgtaagagttaacgagttaactcaagagtttgataaccatgtctgtgacaatcaaagcattgctctgtgtgtgtgtgtctgaacgaaacattgtttttgtgccaattgattgattattcttattccattcctattaagcggttatattttctttttcttatacaatgtttcttcaacatgcaacagcgcttcctgcaccacaagctgtcttgctccctttg

SEQ ID NO: 27484 - DNA, 1006 bp, Glycine max
  Intron number 2 from transcript Glyma18g07010.1 (locus Gly ma18g07010) derived from phytozome v7.0 (chr-ID Gm18; pos 5705298 to 5706303 reverse strand)
gacatcccttttccggattggtctttctggggttggtaagtttttttattgggattgtgccaaaatgtcaccttttttcttgttgttttttgtgtctttcaattcaatgcctttgattttgaatccacttgtttattgtgcaatgggtatttaaaaggatattttttttcacctttaagttgactagccgacatggttcttggttgacagttgacacataggcttatatctctgttactggtagtcttgtctcctagcatgtaattagaggttcgaaaaatgttaattttttaaatagattttatcttattagatttttctctaaccgaggaggaaaaaaaaaagttcacctttaagttgaatgtacacactttttggttccttaaaatttaaagacatgtgcattgttatttttgtgttttgaagacaaactctgaaaaggaatgtcttttcaagaaattgggacgggacttactaagaccaatgttaataaactatgttcgtcctgtttttttattatatgacgagtgttatagaattcacacttaatttaaatgcatatcgtgatttgaattttttaagatttatgagttgatgtatcttatttatgtattgtaaagatagaaaatttgttttttcttatgccagaaagttgtgagaggagaccttctgttaaaaaagacaatctcttttcttttgccaaattttttagatcactcttgaaatgcaacaagatcactttggaagaaaataaaaataaaaaggcttggttcttcttgagtgagagaaaaagtgagaaagtgaagataatctctaaaagaaaatggctgttcgcgaacttaccataggactaatgtaaattaattatgttgatgttttatagtctagtgagaagtatatgttagacacttggtaattctgattagtttgttttgacttgaatgtgaatctgttgaacatatgttgctcaggtcagaaataaacatacgaccctggcaggaagagt

SEQ ID NO: 27485 - DNA, 772 bp, Glycine max
  Intron number 3 from transcript Glyma18g51660.1 (locus Gly ma18g51660) derived from phytozome v7.0 (chr-ID Gm18; pos 60491170 to 60491941 reverse strand)
ggagtaagttcttaatccgatgcttttcttcccatccccatgtttttttatactaattttaatgttaatttgcattagatgagaggttgaaaaatcttctgtttttgatttgatagtttaagtatcatgccgtgctgaactattttgatctatatggggtgggatgtgggtctgcagaccaaataatatctaggtcgatttaatcttgttggatttaacttgggatattgtgttaaagatacttgcttatctgttttgtgttaacctgttgtggtttttatcatgcttatgtgtgttggctatacgtgagctacttttttatgctgagctattctgtcaattcaagtcaatgtttggttacatctaaaggagttgtctatataaattttggagtcactgagagagctagggtcggccatatgtttgaatgtcctgcattaaaaccttaattgtggttttattggacttgtttttgaagcatctggtgattaattatcttcgttgatgaaatttatatgatctgcatttatagcagccgatggaagtttttagctatagctattttgataatacacatatgatataggttgctgaccatatacatttttggatgttttgcttgtataaattatagcacaaacaactggattgtaattttaactattgatgataattgttggatgctatgatgcctggtagatattgtcatttaacacttttaaggtttctgtatatttttgtctcattaacgatattttgttgtttatagaca

SEQ ID NO: 27486 - DNA, 512 bp, Glycine max
  Intron number 1 from transcript Glyma20g02250.3 (locus Gly ma20g02250) derived from phytozome v7.0 (chr-ID Gm20; pos 1909762 to 1910273 reverse strand)
taatcttcgtcaacgttacttttccacctcgtacggtaacacacgcttcttcttcttcttcttcttcttcttcaaattggtacttggattctgtgtttgcttaattgaacctctgatccatgaatctgaacgatttcatccaaatcattaccatttgtttctttaatttgaaggaagatatttttctatatgttagctggatgattcagattccattttttttgacaaatatgaaaatggatatattaatttcgatttcgatcaggattttgactttcacgcgaatgattaatgattaaagtttggagagtacttttacggatttcaatgcataataatgaattctaatgcaccaaatgaagaaggaagaaattgttgctttagtttttaggctttccctgctttaattctaacatgcactgaaattttacttgattcagtgattaatctttgtgggtgattgaatttggctggttactgcagagggattcaattgagagggaaagggactg

SEQ ID NO: 27487 - DNA, 393 bp, Glycine max
  Intron number 2 from transcript Glyma20g38730.1 (locus Gly ma20g38730) derived from phytozome v7.0 (chr-ID Gm20; pos 46264344 to 46264736 reverse strand)
ttcgaactgagggttcgtactcatttatcttccaagtatgtcagatgttgttccctcactttgtttaagaagaaatttgtatggctcttttgcatcttttcctgtttacttgaacaaaaacaaatgtgagacatcagaaaagattcacagtaaagtgaaaaatttgtcgatgttacattacaactgattactatatgatcaataagtagatagacataagctccagaaattgaaagtaactatacccaattgtttggtttgagttccatttcttagagctaggataatactggtgattaaatttaagttggggctgctgttctataccagaaaactaacttggttaatgtccgaacaggattacaattgctcggttgagttctttcgttcagt

SEQ ID NO: 27488 - DNA, 787 bp, Glycine max
  Intron number 1 from transcript Glyma18g15080.1 (locus Gly ma18g15080) derived from phytozome v7.0 (chr-ID Gm18; pos 15119852 to 15120638)
cgatctccaaaccagtgttcacccaaccttcatatggtccgtaagagatctcaactttcgacccatcttctaaatttttttcctttcttcttatttttcttgtctatgtctttttgaattctcttcctttcttcttggaatccaaggttgagtcttttatgcttcactacttagctgaagttgtttttctttacttagcttttgtaggtattcgtttatagctcttaatttggtcttttgtggaacttgggtgttttctacataagtaactagttaaagttcgtgttcctttcacctactgggttatttaagatgtctttatgttttcctaacgtttgtgttgttttggatagtgtgtaaatgcttatgttttccttgttggagagcctaaagaaataagttaaacttatggagcttaagcttgacactggagcagatctgaagcttgtttcacaactatctttttcttttctttgataactcttgttgtatgttactgactaattaatggtgcttgaaagtaaattgacctgatttttgtcaattatggaaattggaaagctttttactttcaatgttaattaagttgtgactgatgatttggtgtgatcatgagttggataattcctttatgtgtatcatagagtagcaagttttcggttttcttcattataagcaagtatgttgctttgccatgagttttttatgcttgatcttgattggatgttgtggactacagccttggtaatgtagttctgaataagaattgtccgttttcaggttctaa

SEQ ID NO: 27489 - DNA, 492 bp, Glycine max
  Intron number 1 from transcript Glyma19g29370.1 (locus Gly ma19g29370) derived from phytozome v7.0 (chr-ID Gm19; pos 36929682 to 36930173)
ggcttcactaggatttggagactcacttctgaaatgtatggttgaaaaagttttggattttgttccattgggtggcttgtgcaacttctgaaggcatcaaaatccttgttttcatcccattttttatttatttgaaatttgttttctcctctcgtcctcacttttcttctctctctctctctctctctcattttcaagtattttggttttggttagcactcattgatttgtactatgtactatagctgggtgaagctttttctgtatgttgagctatggctaatcttttctcaagtgattatattttgtggagttagggtgaaacaatgagtttcttttagaatttggctttggattaacttcaaatttagaattcacgcaaccaaatagatagtaatgtttggttattttaactcagtagattcttgcatctttttttattatttttttttactgattaaattaacaggccttcttgtaattgcagggctt

SEQ ID NO: 27490 - DNA, 688 bp, Glycine max
  Intron number 2 from transcript Glyma18g06170.1 (locus Gly ma18g06170) derived from phytozome v7.0 (chr-ID Gm18; pos 4749152 to 4749839)
tctctgctcttcaggtttgaatctgatcttgctttccgtatgtaatgtttcgaacatttttagcaatcaaaatgtttgaagctttatgtttggcgttgttggttgcttgagctagttgaattcatgaagtgctaagcatgagggcatgttatgaatgctgaaagattgttattttatggacttactcattaataagcaattaaacatgcaagggtcaagtctatttttggtgcagtatcaatttccaacaggaataatttgcttctagatgtatggtacttgggaactatcaactgacatgttttctagtcatactaaaaaatgcacttgttaaattctggcagtttgtggttaacatatccaatcacttgtatgagaatatgcgctgataaaaaaaaaacttgtatgagaatgtgctttagaattttcatttggaaaagataagatgtggaaaatatgggtattggggctcagattccaatactagtcttttttggtttcttccatttcacctttttattctttgtaaacttaatttgtcaggttttacatagcatgaatgagtctggttcctgagaagtttggcatgattggatcaagtagaaagcaagcatatcatgttatttaaatcccaaattttaagataatgtttttatgatgttaatttgatttgggatttgcagtttga

SEQ ID NO: 27491 - DNA, 607 bp, Glycine max
  Intron number 2 from transcript Glyma18g53220.1 (locus Gly ma18g53220) derived from phytozome v7.0 (chr-ID Gm18; pos 61527216 to 61527822)
tttttattataaaattaagttagggataaaatttagtacaaaattttgaatctaaagttactcaaagtttcttcaatataaaattaattctaaaacattttcggatgtgaaactaaacatgtgaaaaaatgtctaacatcaattttggactcaaaatcaactcttcaacttaaaatcaaacacgcacttaattaagtcctattttttagagtctttttttcagttagtttacacttttctctatctctcgtgattcccttttcatcacacatgccatttgggctttgagatagaactcgtttacacaagtatgagtcaggtgaccccaaaagagtgtgaaacactcatttctaactaggaaatccaaatgttaattatcacttaacttgcagttatagttacaagttcagtgctcacccaattggttaagggagaaaatgaggcttgatttagcttcctattaatatctggcactgagacttattgactacctttttcttttcatccctcttgtgtccttatctgattccttgttttgacatcttttttgtttggaacattgcaggtagcagcaaagtaggtgttgcaataggtaactttcttttcg

SEQ ID NO: 27492 - DNA, 554 bp, Glycine max
  Intron number 2 from transcript Glyma19g26130.1 (locus Gly ma19g26130) derived from phytozome v7.0 (chr-ID Gm19; pos 32631587 to 32632140 reverse strand)
tggctggactctatactttattctttttggagcaggtatttgtattaattaatgtttactattaattaattaatgttgacacttaattggtgttctttaatttcaataagattaaatctcactcgagctacttttcgtttgcacaatttttgtatgcttgaacttgatagttaagtagatcttatatgtggttagtcaaagttgtaattgtgaatatatgaagtgttaaaagtcattatatcaaatttataaagatttactgctctttttgtgtttcaaagtcatgttgacatttttacttaatttcttgttatgtttttacatatcggcttttctgccatgtctctttctagaatgtgtactatacattcttaagttatgttttcgggatcatgtagagtcaaaaatagtgtgaatgattacgaatagaagaccataaaaaatttgtctccattcaaattttcttttttatttctatttaggctttgctaattttgttaactaacaataaatttttaggttgaccaacttgttggaaagaaccatattttcaa

SEQ ID NO: 27493 - DNA, 855 bp, Glycine max
  Intron number 1 from transcript Glyma17g09140.1 (locus Gly ma17g09140) derived from phytozome v7.0 (chr-ID Gm17; pos 6766634 to 6767488 reverse strand)
caggaacaaggtaaaacaattggtagatgatttatggaaaggtaatggaatgctagtgcgcaatcaaactcctttatgtcgttccaagaaaacatgcaaggggtggagggttaagaaaggtgtttggtcatttttagatgatgaagatgatgatattaatttatgtgaatattgtagatgggattatgagatagattttttttatcaattattcgatgtttattagttatattctcttcaaatcattgtattgattacaatgcaagtttattacagtaaaattgtgatgatattagatattttattcgaggaacgttatatgtttaagtatttacgataactgtactttttagcaatattttgagagggtagatatcgacaatgacaacttagttatcgcagtttgttaattttttaattttttttaaaagattttcatacatatatatatatatatatatatgtatatatatatatatgtatatatatttaaatgcagtcactctaagcctgttgttctattctgttatgtttttcaaaacgtttcacatttggagtgaggtttaagaatccatctccccgggacatgaaaattatcctgagcccataagataagactggtaaataaggtaagatagaatttatcataaagattaattggtaaaataagattaatcggatctattttagtcatcggaaacgaaatattagtggcctttggaacttgagatggctactcaaaagggtccaatagaagcaaaatatgtgtatggtatgatcttattgtgctccctagatgatgatttgagaaaacatggttcgagcatatgtgatttttaagagagtcccaagtgt

SEQ ID NO: 27494 - DNA, 679 bp, Glycine max
  Intron number 1 from transcript Glyma20g10920.1 (locus Gly ma20g10920) derived from phytozome v7.0 (chr-ID Gm20; pos 15366839 to 15367517)
tctcttcctccaatttttctggttagtttctcttcattttaatcatctttatggggggtcctttcttttatttttctttttattttttatttttcatgccactatgtgtgtttcccttcaattgtgcactaatcatgcaacctggtttaagttagactttttgctggctatgttatatgatgagtgttttcactttttctctttagtttctgaaggttataactgttgcccatgtatgtgttgtttaatcctttgtctgaaagatgaagattctgaggctaatttgcattcaggttgcaaagaacgttgaacaattttgcatttttggagatactttttacctggaaataattaaactcacttccatttgctttcttgtcaagagtaaggcatcatcaatggatatctgtttattaaatgtttagatgaagtcaagggaagtcaaacttaagacaaattagtggagccatttgtgtcaaacatttctgtgatattgttaaagcttgcaaattataagcactagcattgccccagaacttctaatcatatttgcccaagatttctttgctgattttaaaattacaagtttcctagcacagttatgttacaggattttagaaagttaatctcaatagtggcattgaacttgcttttcttctaatttcaggaggtaagaagc

SEQ ID NO: 27495 - DNA, 578 bp, Glycine max
  Intron number 5 from transcript Glyma19g39550.1 (locus Gly ma19g39550) derived from phytozome v7.0 (chr-ID Gm19; pos 46186823 to 46187400)
ctaagcaacttgcagagcttgaggaaaagcttaaggtttgtttttaactttgatattgcattgcaaactgcaacttctttaaagtcttattctgtcatgcttgcaacttgtgttttcatctacaaaatcctaattaatggattttaagtctgttctgttgtatgttcattcgtaagatgttcttctcgttatatatcatcatggataatattgtgttttgtttactcattctagttcaataccaatgttgtaacaatcatcaattcaaaatgttgattgttgaatcagttgaaatttcaaaaccatgccgaggaatcatggttcactttcgtcgttctgttagtatgtactctcttttgttattggttatcatgactcatgagtttccattcctcggttttctaaaccatactaggaatctcatcttcatatatttcatcatttgtagcctcttttgtctttggctatcttgacttttcaagtctctcctccatcttttttattttttcccttggtatttagaaacttcttagttttttcctacataatgataggtgttactgcttcccagtgatcct

SEQ ID NO: 27496 - DNA, 886 bp, Glycine max
  Intron number 1 from transcript Glyma17g18010.1 (locus Gly ma17g18010) derived from phytozome v7.0 (chr-ID Gm17; pos 15129599 to 15130484 reverse strand)
ctttgggctggggttgtcattactgctcttgattggtaattcaaccaaccttatccaccctctaatcatttctcctagtttaaatgcttgtaggagtatttagtactattgttttaatgtagttttcaaattgcattaagcgtttggttttatttatggagagtttgctatgtagacagagaaatccgtgaattttggtttttttagggtctatagagggagagggagagaaagtttctcaatagaagtaccaatccaaaacccttaaatttatgatatcataaatttctcttatttttgtttaggtacttacaacattttttttcttgtctaagatctgttgaaattgattccttgattaagctctcagagattttgataggttcaggaccaacccatgataaatgatatgttgtcttgccttgtaagatctagtttttgttatataagttcaaaaccgaagttatttttgaagtctgtgacaacattttgaaagtaactgaaataagtttgttttaagagacattttatgatactttcggaaatctaaggattttgacactattattgataaaaaatttcttgatgtatccaaactcattcaactatttgtccgaaaaataattgtaccaaaactcttagacttctctgagactataacccttagatttatcttgaaccaacatccctagatttctctgggtgctatagcatctctctctctctctctctctctctctctatatatatatatatatatatatatatatatatatatatatttgtgtgtgtgtgttttgctatgtctggtaatcccaaattaaacatgggtacttgtatattttgttgccttgttacagttttatttttctctttcttgagaact

SEQ ID NO: 27497 - DNA, 378 bp, Glycine max
  Intron number 2 from transcript Glyma18g35300.1 (locus Gly ma18g35300) derived from phytozome v7.0 (chr-ID Gm18; pos 41433089 to 41433466 reverse strand)
actcatatcctttgatccgttgaaattttactgcttttgttcacgaattctcgtcaattaagggaccgggttgactttctgttagaaaactcgaggaaaaaataaagctcatttcaccctcccctacccccttttgttgtagatcttataggttttgctgcaattaatatttcccttcagtttggatccacgtaaaggaacataattttcataattttacctttttttattatttttcttttcaatttttgtttcctttgcaacaatacaaccggggtattcgtggtttggtttgtgaagccgttttgtttgttattgtttacaaattaactctaaagcgcacgcggtaaccagagggatcgtgatcgcgaaagggct

SEQ ID NO: 27498 - DNA, 487 bp, Glycine max
  Intron number 1 from transcript Glyma20g32260.1 (locus Gly ma20g32260) derived from phytozome v7.0 (chr-ID Gm20; pos 40866104 to 40866590 reverse strand)
agaacataaagcaaaggtacttgtcttagccaccggtttcttttctctgtgttctcctctcccttggttttcacttttcagtttattttctttggaaacgaacaaggaaaaaaacaaaagccgcttaaagttgctacttaagcacacccttttggttttctttcctggtgtgtgtgtgtttttaagttttgtataaacaaaatgatgaaaatgcatgcataaccaaaatctgccatattcatgaatatatgttgagaggttaattagcatctctgagtaagaatatgtaatagaaaaggtttcaaatctcaccccacgtgcagtttccattttggttcaaagtgaaaagttaagattaggatactcattaatttagacccggatttggagttgcaaaattaccttaaaatttattatattgattttcttcctttctgctttttatgcgtcagtcattttgtgaaggtgaattgctgaagagatagca

SEQ ID NO: 27499 - DNA, 631 bp, Glycine max
  Intron number 3 from transcript Glyma20g36630.2 (locus Gly ma20g36630) derived from phytozome v7.0 (chr-ID Gm20; pos 44689549 to 44690179 reverse strand)
tgaccgcctttagggagctcttccctcccaaccatgttttttttttcatctacaattacttaaggggctccaacacaggaccattcggaccaacaacttgttgctaagaattaataatttaaaattttaaatacataagaaaatttaaaaggggggacttgggggagggaaaaccaattttatctcaccttttgttcttgatgtttcttattttctttttcatcttttcttgaagaaaaagaaccgggtttattatgagttccaactttttctttttaaagtttgatgtattcaaggaaggacgtttatccgcgaagcaaaattgatgagaacttattcggcttgggcatgaagcaactttaattagtaattgctgtctttacgttaaccatactctaataaccattcttttttgactttggactgcatattctagagagtatatacattgttttgcgtagtcagcattacaattatggcatgcttataataactatttatttatagcacaacgagacacgtaaaactgatcccaatgatgtagtaatactgtgattaatccgattgattgtgatgaaattattaaatgtaattaacgttggaatgtgttgttcgctttgttttcttagac

SEQ ID NO: 27500 - DNA, 275 bp, Glycine max
  Intron number 4 from transcript Glyma19g09380.1 (locus Gly ma19g09380) derived from phytozome v7.0 (chr-ID Gm19; pos 11195353 to 11195627)
aagagaatcccattgtacttcacttactgcacactgtgtacaaagacaaagagaataatatcccatttccattcttccaaatagattctacgagccttccatgtatgttttattttatcactttttctttttgtttataaactcttctatctttactaacattgtttttctccaggttcatcctttgagcttcaacttctattctctaaaaatcaaatgaaaatgcctaattccctttagctgctggcactccgctaagcccttgtcaatcctca

SEQ ID NO: 27501 - DNA, 432 bp, Glycine max
  Intron number 1 from transcript Glyma19g34350.1 (locus Gly ma19g34350) derived from phytozome v7.0 (chr-ID Gm19; pos 41950319 to 41950750 reverse strand)
aggactcaatcacgaagcagaagaaacccaataaggtcattctctgattctgcgtctttttcaacttcattttttatcttctggtacaaaatctgcttttgaattgtgaaaatgcaagtgttaatgttatttgcttcattactttagcacttttctaatgggttatggttttggtgaaaagctctgtgattgttcaatgggtttctagaaagttctatgaatttttcaacccaatggccagtttaatgcgatagtttttgcggatgttgatgggttggctgggtgcattagttcattttttttgttttccgtgaagattgattttttttttttcgttttcagtaatattgtggtgatggctgttgagttttttctttcaattggaaacccttatgcttaatttcgtgtaaaatttcagtatttctcattttt

SEQ ID NO: 27502 - DNA, 745 bp, Glycine max
  Intron number 2 from transcript Glyma19g04990.1 (locus Gly ma19g04990) derived from phytozome v7.0 (chr-ID Gm19; pos 5239953 to 5240697 reverse strand)
tgtctttgcacctttggtcagctttaagagaattggtgagtgttttttctgtcattaattcaagtaaaaaaaaataactggtgacttattatttactgtgtcacttatcaaattacaactttctgaaaatgcctggccataaattagacaatggtgtgaggaaaatgactgatcattgagatttgtgtttataaatgggtttttgacaaccaagttgatttaatcaggtttcattccaccttgttttaaacaatctaaacaataccaatatcaattcattatattcccctccttaatttcatccttttccattaattacattctagtagttctaatttccatactgctcatttttttgtcatggtttgaaaatatatattttatggaagaaaataaggttacaaaaagcagaaaaattaggagaactgtgggctgttctattgctgtgtatgttactttcttacaaatatgatgtgatgcttgaatgacacaacagaaagtaatagaaatgatttagattcttaggactattccattgctttgatatttcatacatctagcttttcataccaacaaattaaatccattggagtaatattatttgtgttctagttatgtgatgggatcattggggatttctaatcatgatatatctaggttcattttttatactaatcgaagattttatgccccttctctggtttttgcagattcattgaaattcacatctgcattatcagtagga

SEQ ID NO: 27503 - DNA, 582 bp, Glycine max
  Intron number 1 from transcript Glyma19g04070.1 (locus Gly ma19g04070) derived from phytozome v7.0 (chr-ID Gm19; pos 4194561 to 4195142)
cccacttggatatttaggctctaggtgtgtgagatcttccatcacagatcaattcaagctcacagtaagatgcccattttctctttagtctttgtgtattttcacaagaaattgtcacagcacacgcatagatgataacatacccaactccttagctcagtttggggtggttgcaagtttttgtttggagcgtttgagagttttcagtttttggttttcaaatgcaatttacaaatctcaaagttttttaacataccattatcaagtgacaaaatttagagtggttggacacttggggttgttcagattttggtggggtaggcctgaaactacttccatcattttacattatctgaatattgactgcttcttgggggaaaatcatgaaatactttcagggccttgtatttttttttttttttttaaattttggataccaaaatcatgaaatatttttttatgcacaatctatttttagagagagaaaatgaaaaaaaaaggaaatttagggatgtttcctgttaatctgttgttaattggtagttttttatgactagaataactctctaccattcaacaaat

SEQ ID NO: 27504 - DNA, 862 bp, Glycine max
  Intron number 3 from transcript Glyma19g28530.1 (locus Gly ma19g28530) derived from phytozome v7.0 (chr-ID Gm19; pos 36067068 to 36067929)
cttggtgtcaattatccatttcctccacatcttgagtatgctgcttcttctcactttgcagttgttagtatttgttgctttattgcaataggatgctaaagggatgccagcctgccaggtgcacaaatatgaaaaatagtttaacaaaatgaaatgacttgagtaaaaaatgaaagaaaattactgtaaattcagaggaaaaggataagaagtttatggttatatattgttgaggttgatggggtataatcttgaatcaatttgaaagaattattttaagaattctgtgcaacttaatttattagtgtaatgtcatggtaacccattttaattgacaccattcttcttgcaagtataaatgtattgagtacaggacattttaaagaataaacagtctattattgatatgttctccccttcctctaaatttttttactctcctttaacatctttgacttttttttattgcatatggttcaataatagtataattaggcaaagcataatgtcattgcaaactgtaatactatctaatgtgtacaatgattatttctgccccttttattgccttaggtgttagatttggccatttggggtggaaacttgaaaagaaaaccatggatatagctttaccaaatattatttcatgggcaaatcttaccgaataaagttagttttttgtgttgttgttaaataaataaatgaaatacatttgagattgttaaatatgtttactatcatgcatcctaatattaattatggatgatattatatatgatgataagtttttaaaaaccatctttgcagtgtagtatcattttgtttggtttgcatataatctaacaaaacttgtttttcaggt

SEQ ID NO: 27505 - DNA, 769 bp, Glycine max
  Intron number 4 from transcript Glyma19g06180.1 (locus Gly ma19g06180) derived from phytozome v7.0 (chr-ID Gm19; pos 6999886 to 7000654 reverse strand)
cttggggtattgctcatttcactccacagtccacaccgtcatccttttttgcttctctttctctattacaaatttttatgattattagaattggcatagtccaaagtggcgatgtcattaaacataataaagtgtcttctcatttttcgctttgaatgccatatgcccttcttttatgcccttctttcattttctcttttgtactctataatgttttgcatgcttattagttgaatgaccttttggacaaaattggttgcaatacataatttaaagaatgagataagtgccataaatcaaggttttaaattgcaactgtggtcgcggttttgttgcaatctttgatgtagcgggaaattttggacaattgtgggtgatgtgggcgcaattgaagtcgaattgaggtcacagaaactctgaaaaccttgatgttgtggccagaatcacgaccagtgaccattttttgaaacattgctcataatatttatagttataaagttctctcaaaatcagtgtcataatatagttactgcatactagattctctttaaagaaaatcttgtaagtgatgaacttcttctcacccttacgaattgcatacctgtaccatttacttgataactatcgatctatgttaagatacaaatttgaagattgggtggaatgctatattttgtttgtttcttttagctctccaaaattccataaagagtgttgatgtatgtattgtcaaacttctaagagcaaacataattgatgtcaggtggaa

SEQ ID NO: 27506 - DNA, 284 bp, Glycine max
  Intron number 2 from transcript Glyma18g49620.1 (locus Gly ma18g49620) derived from phytozome v7.0 (chr-ID Gm18; pos 58994477 to 58994760)
tggaagggaaacataatcaacccaaacctggaaaggtatagttgagtttgtgtactttctgttgttattttgaagaaataattatatggtttcagactgctatgtgtatatatatatatatatatatccagatgagattgatcaggactatggtcacgtggaggttccagaccatgtaatgattttttattttttatttttattttctctcactcaaggtgaacttgtaattaactaaggttgttttgttttgttttgatattacccccctcttcatagagtga

SEQ ID NO: 27507 - DNA, 789 bp, Glycine max
  Intron number 2 from transcript Glyma18g01290.1 (locus Gly ma18g01290) derived from phytozome v7.0 (chr-ID Gm18; pos 676402 to 677190 reverse strand)
ctcgtctcaagctgggaagtttattacctcaataggtttgcgtcttcttctgctgtttccgtttagcattttttccactaagtgttatttcctcgcagtttgtgaattctttagtttagaagaatatatactctgtgattcgtgttacgttgctaacgagtctccggagataacaatgcgtcgtttatttaacatgtaatcagataaacagttcaaaaaactgtgttatgcctcgcattgactccgatatatatatatatatatatatatatatatatatatatatatttttttttttttttttttttaaattttaatttctctatttttttattagaggatatgttgatttaacgattctgttcggatttctccaaaaaaaaatatgattcgaatcggagataggtgcttcggtttgctacagaatttgtagtttgaaataatcattcaaagaactgtgttatgtcatgcgcactaactccaatactttactttttcaattttaatttctctattttttttataaaaggaagtgctgatttaatgattcggttctgagataggtgttttggtttgctagataatttgtagtttgaaataaacgtttcaaagaactgtgttatgccatgcgcactaactccaatatatatttttttaattagcggaagtgttgatttaatgatttggcttggagataggtgttttggttttctagataatttatggtttgaatttggatgattgtttttgacagacagctgaacgaaccaatagtacaaaatactgaaa

SEQ ID NO: 27508 - DNA, 824 bp, Glycine max
  Intron number 3 from transcript Glyma19g45180.1 (locus Gly ma19g45180) derived from phytozome v7.0 (chr-ID Gm19; pos 50413373 to 50414196)
acaaaataacaaactatttcgggtcttctgcactggtttttgccctcttactctcattatttatatgtaacacaagcctcattttcatctttagactgtcttggcaaaagcaaaactagttcataacccagctgaaaattaaaaagttaattgaaagcttataatctattataaattaggacctaagcagctgattgaattacatgtaaattggtgaaattagctaatgaactaactgataaatgtacaatgacatagaaagacattaaattatttggttataactttatatataaacaattcattatttctaaaattgagagactgagagggatacggtaggcactaggcaaaaggatttttaaaaatgagaaaaagggttaaaaaagagattttaagtaaatcagtaaggataaaaatagaaaaagaaaaactagtagcttataggctaaaaaactagtaacaaactaaacttattttggtcaaataaacttataagccactaaactggctcaccataaacaccttccttccaaaatccaaattacaagtgaggcccttgtcattttttttttaatttcaatttcatgattactgacttgattgatacatagaaacatccccacgtagtgatataaagccttgttgctgatattgcctgtgaagtttggtttcaaattttagtcaccataattttcttcatcaatcccattttaaattggtggagtatgtatctttggcatcttcattgtggtctgcacttcaacctttgtgtctacaaattcacagagggaagaccagaccgaacaggtttgcggttgtcg

SEQ ID NO: 27509 - DNA, 395 bp, Glycine max; identical to SEQ ID NO: 26657
  Intron number 1 from transcript Glyma19g36140.2 (locus Gly ma19g36140) derived from phytozome v7.0 (chr-ID Gm19; pos 43501011 to 43501405 reverse strand)

SEQ ID NO: 27510 - DNA, 865 bp, Glycine max
  Intron number 2 from transcript Glyma18g44840.1 (locus Gly ma18g44840) derived from phytozome v7.0 (chr-ID Gm18; pos 54571735 to 54572599 reverse strand)
gggagttgtgtgtctaaggtgagaatatttggatgcatcaatcattcataatctttattcttatgcctattataagttgaaagcctgaggcctttcacctgttatctctgataaattgttttcttcatcagaaagcatactctgaaagcaaaataaatttcctgcaaagtgtgttgtatggtgttttctcattgatagtgtttacctggatgtcataaggaaggctcccttgctgtttgtaattttgaactgatagatttttactgtggcttctttttgtggttgtgtgaaatgtgttgtaacttgtacgtaatctgtagcagataggttagacagtgatgatgaaaacaagaatagagaaacaaatttaacaggatgcaaaactaatgagaactatggaagaattagaaattggcaattattttatgtatgcattttctattttgcaactttcttcacttacttctcctcctgccaccccccggtcttcctttatcttttaaatggggacaaagggagagattatctgtaactaacggttatttcaaaatatgtctcttttccacatccccattcttgcttatctctgatattgcagtgtttttggcgtatggaaaccctattaatgcagtatgatatgagtattctttctgtagctagaagtttgattctgatgtcagcctctagccctgactattctgtttctacctgctactggctgccacaaagaacaacgggaaaagatttcagtgtgtttttgtgggatagcttagcggagcctcaatgcttaactttgtaaacattgataaactagttgactgagaagtttcatgtttctaatgcttgtagaataaagctagggata

SEQ ID NO: 27511 - DNA, 894 bp, Glycine max
  Intron number 1 from transcript Glyma18g44840.1 (locus Gly ma18g44840) derived from phytozome v7.0 (chr-ID Gm18; pos 54572613 to 54573506 reverse strand)
taattaagctatctcaaacctcaatttttttgaggtgatttaattgtgactcttccttcaattaaatttgtttctttttctaatttatttttgatggggttgtttttattgtatggaaaatgatggaaagcttgcaactttaaccttccagatatggaaaatttggtattgatttgattccccgaattatttacattctggtcttcttgagtttctttgcaacaaaaccaattttctgaggaaaaaccaacatgttgggagtttgtttactttgctttgcatttatgggagcttgtgttttggcattcttgtaggaatggatgaaaaactgagaaataaaccatgtgtcatgtctaaatatacattctaattttcattttgtgtcccttcattcttctcagtctcattttggcttctatatggcacactctactcttcttgtgattgtggaggagtgtagggtttttgttaccctctgcttcaacttgacaaatgttgagaatgcatgcatgtttgaagagtaaaatactttctattatcagatttcatcttttcttgcactgtagttgtttgtggttccttttttttggaaatttatataaggatgtgatttctgatatttggttaggtgaacatttataggagtgcatattttcttatgctgcttactttttgctttacctgtggccttggtgtaacttgcaggctgatagatagtccagtaattgagtgttgcatacgattattaatcaacctgtgacttggctattgtggctattgtcttctgtactttcccttttgttctggttgacttggaaaaatttgatatgctgacatcggttgtcttccttctttcaggcttccattcattaaagtataaagtttgtggctttc

SEQ ID NO: 27512 - DNA, 375 bp, Glycine max
  Intron number 1 from transcript Glyma18g36520.1 (locus Gly ma18g36520) derived from phytozome v7.0 (chr-ID Gm18; pos 42879291 to 42879665)
tgtatatatttatatttcaatcgttcttatttagtgttcactctcatgactaatacatgataacttaatgaaaggtaagggtaatttctagtgaatttatcttttaaatcttataggctggtttaatctttatcttttgattttaacatgtattaaaaggaatagaaagagatgaatttcatgataatttatggaaatgaatggaagatagtacttatttcacacttaaataatagggatgctgattgtagtcaagcatttaatttttcttgatgtcaagaatcaaaaaccaaaaggtcaggaagtgagtgcagcaagagtaaacattgataatcacatgaatgaaggcagtggctggattaactcagcctaaca

SEQ ID NO: 27513 - DNA, 843 bp, Glycine max
  Intron number 1 from transcript Glyma17g17890.1 (locus Gly ma17g17890) derived from phytozome v7.0 (chr-ID Gm17; pos 14957002 to 14957844)
ttcactaaactcatccttgtctctgcctctccaaggtaaattaaatcatttctttctttcttaatcttgtagttaatcagaaaaaaatcttaattaatccggaattaagtaaaaaaataagtagaatttgatataaaaaattgtttaattaaattattttttatgtgtacaagattttttttactaaattaatttattctgttcgtcaaaataaaattgcagtttcataagctcttttttattaattttattgcatgtaatgatttttcatagtaaaatttataattacaccttcttataataaaaaattattaaattaatatttgattaagttaattatatatgtaaacttacttttcctctgttttttttttgttattatgagtatttcctaaagaagaaaaacattaattagaattgttatagttctgatagaaatcttaagaattttagtagagttattttctgggctaatagttgaatgaattatggaacagtaaagagagaaattctcaataataattcaaaattcttaaatttcttaaaataacacaagaaaaaattaaatagagagagcaaaacggggatacagtgtacaaaaattttcatatacatgattaaattgaatctttactttaaatttgtgtatataaaagtgcatctctgacgaaaagaaaatcaacatgttaaaatatatttgtgttttgagtgattagttctaactcgaagccagaataccctaattttacaccgtgaagttttttttttttttttcatgttgcccgtaattttttcactaattatagttttttttctttttttcgttgttctataggtttctga

SEQ ID NO: 27514 - DNA, 882 bp, Glycine max
  Intron number 5 from transcript Glyma18g08230.1 (locus Gly ma18g08230) derived from phytozome v7.0 (chr-ID Gm18; pos 7011783 to 7012664 reverse strand)
gacaaataaaaaagaaagtctgtttgctgatcgggtattgctttcatttctttttattgttttttatgcaaatatttttaccttgaagcatgaaaatctctttccatggtcctatcaggttaatatccacacagatacacacaaaaaaaattggcttgcctgtctagtgcttaatgactggaattttggttgtcctccttttttttgttattattggtcattgtgatcttccaaggcaattattgtagcagtttgacatctatatcaatcaccttgtctagtcattctcatttctaaatgttcaagtgtcccctattttatcatttcttctctttgggccaagaaaaaggtttcagactattacgatagttcaagttgtgccatgttgccattttgtgcctatgtgggcattaaccacattggtgcatctataattgcactagagtatcatatttgtttatatatactagcttgaatagttcattgaacatgaaaattgtgaaaaacatgttaaactttgtatcttgaatgaattataattttaaaaagtagtgtgagtctgtgcgtgcatgtttgtacatataactaaaaagatgacattttaatacaatatgaaatagttagtttatctgcaaaaagtaatgtacaccaatgcatgatgtggaactacagcctttagcttaatatgcaagtattatttgtttatacattattttttcacatgttcccttccattttgattcaagttctatatctgtttacgtattatttcaacattatattttgttcaaaaattgattcacaattcaacttgtgattggaatctaatatgaacttctctctaactctattaggtatttgatttatttgacacaaagcaca

SEQ ID NO: 27515 - DNA, 985 bp, Glycine max
  Intron number 1 from transcript Glyma18g08230.1 (locus Gly ma18g08230) derived from phytozome v7.0 (chr-ID Gm18; pos 7013536 to 7014520 reverse strand)
tccctcttctgttgcccgatcttctgcctccaaggtttgattttcctccctaccctcttcggcatattgctttttaatcttagatgaggctgcagaacataattatatggtgtattttgatgtggggttcttgagttttctgtaaattttgttcctttgtgtgtgttgatttgttgctggttcgcatagatcgatgggttttttttttttttgtgcatgtgaggtgatgggcatgtgaatagtgaatttccctgaatgaatctgatcacttaccagatttgtagagttgtgttcttttgatgcggggattttgaaacttgaatctggtgttgctccgaggttatttcgataggttttgtgtgtgacgatggacgtgggatcatggatccgagtttatcaatcatcagtaattgtcgtatatgtgtgtatttttattttttttaagattatggatttatttaaaatttggcttttaatattggcaatgtagcatcaccccatctcgtggaactaggcttgtttgttgttgttgttttaaatatggttctatcttgagttccttaatccttgttaatttctcaaatttatgtggcaaaattttcaacatccaaacatttgggaatgagtttaaggagtgttcgataggtgtacatacatacatacatacatcattgaaatgtgaatttacatgcacaatttcatgtcattcaaagtgaaaggaacaaagcaatgcacaatctatagcctttgaatgcatatgcttatagtatttaattttgtgataagcacttcaaattcaaattaatcctgattgtggttgaaatatggaactagtaatgctgctttgttttcaatttgagtaccttctaatatcagaatgtcatggatattatgtttcaattctgaagccaggtttctttctcccattgttgcctttcaaattttgcagattttggtatttgggattgatcacctggagttggaa

SEQ ID NO: 27516 - DNA, 475 bp, Glycine max
  Intron number 1 from transcript Glyma17g05940.1 (locus Gly ma17g05940) derived from phytozome v7.0 (chr-ID Gm17; pos 4187988 to 4188462)
ggtatactctgtcaccctttccctttctctttctcttccattgcatcacacatcagttaatttagttctccttacgccacagcagcaccaaagtgcaaaaacctgctattgttcttttattttctatgatttctcagagtaccatacttgttggtattttaaccatgtttcttatttttttttatattaattaaataaaggagaaaacacaaacaaacaagggatgttaatcttatcttgtattagtgtgtatttgaatttaataatgaaggggtcaattgattatcatgtccacacactattaggctattagcttttctccgtcttcctttgttccttctttccctctctttttccgctccttattactggaaatgctgctttcttcttctcgcgctcatcttcactgactacttctctctctgcaatttccattgttgaagaaggagagaggttttgaggtgtggggtcggtg

SEQ ID NO: 27517 - DNA, 981 bp, Glycine max
  Intron number 1 from transcript Glyma19g06130.1 (locus Gly ma19g06130) derived from phytozome v7.0 (chr-ID Gm19; pos 6835028 to 6836008 reverse strand)
ttggcattgtagtagtagaaccttatttgactcaggtgggtaggtccaataaccttttcatttgtgcctttcagtttctggcttctttctaattaccatttcttgcacttttgtaattttaacaagtaaccttcttctccttctattttttgggaggaagttaattttcattttgtctagtatttgtttctttcttcatcatttcagtacgttggttttcatcattttaaaaacgataaaacatggccttagggaaatctccttctgttgctttaggagtttatatgtttatgtttgctagagagggctatttatatttggttgcataaggtaattttagagcaaactttgaacaatactttaactgttcttgaattaggaaatatatttacaattttacatgtatggtataagtgtaaatattttgggggtgcttaacaagcgttaatagtctgaaaaaagtgtgttactattgtgattctcagattttcagtactgtgatgattgatttctctccactgttctttctatgcattcagacccaataacatggttttcattcttgctatctgacagtttcagtgcttcttgtttaaatgcgtgtttgcttcaatatgggatccacattaatgagaaattcatgtcaaaataatgcaaaagcggctatgctgaagtcaagcgtaccatagaaaatagaaaatttctgttttcactttattttctgtttttaaagatttgtaggaaacaaagtgagtgcaaggtgacacttttgtaattgctgaaaacagttttcaaaccaaaaaaaacctggtataaccccaaaggctatttttgattgtggttcattcctgtaatgttatgaagatcatgttaaagtgtaatgtttgtctcagatattgtagttttcaagataacaacaatgctttcttactttagaagttgcttatgcttttgtttctttttgtttcccttcaggttttc

SEQ ID NO: 27518 - DNA, 643 bp, Glycine max
  Intron number 1 from transcript Glyma18g08900.1 (locus Gly ma18g08900) derived from phytozome v7.0 (chr-ID Gm18; pos 7631536 to 7632178)
actctgacgccaccacctttgaggtttgtgtgtgtgtgagagagagttttggtatttcttcattgggggatagattgtgtttctggaatgtactaattcagcatgtgtgtgctattatgtgtcaaacaatagtcattgtgtttgtacaaaatgtaagatttgtggagataaggtgaagtggatactggaaattatgacaatggtattctttctgccttttgcaatgtatcttgtttgttaggaggtttaggaagtataatggcactgggttctatgttgttaagttttagtttggcttgtgttttcctaactttttgttttgtagagtggagagaaaatgggggagggtagaaaagtttgaaattttaaattgaagagaaaatgaaaagagagaaaagtttgaatttttgtttctagaagtcaatttttctttccactttccctttaactgaacaaaagaaactacattgttatctttgttttctttcctctcgtccaacatatcattaatgttttgagctcaatagcgaagtgggggtttagatgtcaggtggcatgatgcaattaccaattagtatccttgttaatgcaatgttttgatgctttaggttggtgacttggggactcctagcacttcggcaat

SEQ ID NO: 27519 - DNA, 799 bp, Glycine max
  Intron number 1 from transcript Glyma17g26600.2 (locus Gly ma17g26600) derived from phytozome v7.0 (chr-ID Gm17; pos 27889063 to 27889861 reverse strand)
cactaggggtatttactctttttttttgttatttaatttaattttactaaatggggcatgcatttttttattattggttaaagaagacaattactgatgcttgttttcttcggttaaatcgatattacgcagaagggttgattttgtgtgtggatgttttctgtctctaaaactaaaaatttgggataaaagaggaatggtgctgttaattttttattagttgctaaaaggaaaacaaggttttgcttgggaaaataggtagtgagtggtgctttttttatttctggcaaggtttttttaaatatcggtggcattacggtttgttgatattgcggcaaatcagggacaaatgcagccgatgcaatctcaattccagtcacgaacagttaaaaaaccttgaagttgcggcccaaatcatggtcacggactgatatttaaaaccttgatttctgttgattaacaattcatctttggcagagataagattggttaggtggttaagaaagaaggaaaggaggaaaaggtggtgggttcgatttccctgctaacaaaaacctaacaaactaaccactaacatttgtcgataaaaaaagcaatgcatgcttggctggtcatacttcatacgtcaaattaatgcattcattcctctgtgtgtgtatgctacaaattctgtaacatgattatgatgatatcttgttgtcaaagggtgccagagatcgagaaatttgaattaccttttggcatttttctttaatatgcagaaggtgtgcgagctggattcaaggctgcttccattgct

SEQ ID NO: 27520 - DNA, 537 bp, Glycine max
  Intron number 2 from transcript Glyma20g30190.1 (locus Gly ma20g30190) derived from phytozome v7.0 (chr-ID Gm20; pos 38900832 to 38901368 reverse strand)
agccggtaacctataatgatttggtaatattattaatttttttggaagaatttctaatgcaattgctatcctttccctacatatattcctttgattgagtttcttcccctgcttccccccttcccccaagaaaaagaaaccccaatcactctcacgttatgatctttgttatatcctcatataacttgttatatcatatcctttatgattttgtcctcgtatatctctggaccctgctatttaatacatcttattggaattgaaatgctgattgggagttaagtcaagcttgttataattatctttacaaataatacctgttacatagagcttgttatcccctcctctagcctggacccttaactcccgcaaagaaagtgaacagctacacataataattgtgggatgagactcatgtaatgcaaggtcattaacctctttctcttcttggttgggaagttgtacatctccactaaattcaagaatcatttacatcatataaatgtaataattgaattcttgctcactagaacagta

SEQ ID NO: 27521 - DNA, 668 bp, Glycine max
  Intron number 1 from transcript Glyma20g30190.1 (locus Gly ma20g30190) derived from phytozome v7.0 (chr-ID Gm20; pos 38901471 to 38902138 reverse strand)
gactctgtaaccatataagcaaaggtatggcctcttttttttttttgattgatccctgactgctgtgctatgataagcctatatatatcatatcgtagagttgaatatacatttctcttttcaatattgaaagagaaacttgttacttatttgaccacttggaccgttgcctttattcataattgtcttcagcgctgactatttcagtatgtctaacatttgacatttgtgcttggaataaacagagtggccacttaatgaagatgtattccaatttggaggaatcttctttgcatttgtcaatattggtttctaatctgcattacttaagcagtaacggacttccttccggcgctcctttgtgaaaatgttttagtagttgatactaaagttgtgtttaacgaagtggctatcattaatgtaaagtcaatgttgactttgtgtgtgaatatattttcttgggatgtaaatctaatgtcataattgccatggtgatcttgtcttctttgtttaagtatatactttttaacctttttttaatttttttttcttatttttactatcttaagagaagttttgaaaacaagtatttatttccaaaaattaatctttcctaaacatgcacttagtttcacaattaacttgtcttgcagctaaggaaatactta

SEQ ID NO: 27522 - DNA, 948 bp, Glycine max
  Intron number 1 from transcript Glyma18g50530.1 (locus Gly ma18g50530) derived from phytozome v7.0 (chr-ID Gm18; pos 59635125 to 59636072 reverse strand)
tgaatttcttttgggttttattcgctcgggagaaggtatttcctaataagggtttaagaattaatgcatgcatcagttttaggggttatacgctttggaaagggtaacacctaatagaacatcttaagaaaagaatcatcgggttagcattgctaggcatagaatgataactcaatgtccacgcatttagcaacatctagaatgtaacctaaatgcattttaattattgaatcttcgcaaagacatttggaagataggtagttaaaataggcttgtcatcgtgaggcattagggacaagtaaagttaatagatgtgggtagaactaatacaattgcattggtaatgaatatcatatttacatgcatcgtaggccaattgggtttgtccggttttgacatttctattaattatctttctaaaactatttgatctagtaatagcaatttacttttgcaactatttctgtttttactatttgttctttacttacaaattgaaaagtattcgataaagtacaataaattcctgtggaaacgatactcaaactttcgaggtacacttatcaatacctcaacattatcatacatagataatgaatatttcgaatgaaataattgtgtataataagatccatcatactatggattaaattaatcattcagtaaataataattcattgaaacatctgtacttattattagagaattataaatttattatctcatttttacacttatgaaacatctgtacttaataaaaaaaatcttcttaattctttaatcaatgttcggacaatgattatcatttcacaaataataatttgcttaattaactcgcactcgaatgtagcggaaccttggtagtccatatatcaatatgaagggtggatattatacagtgtggaatttatgaaaatagaatctctcaagactttctagctagcagac

SEQ ID NO: 27523 - DNA, 491 bp, Glycine max
  Intron number 1 from transcript Glyma18g31550.2 (locus Gly ma18g31550) derived from phytozome v7.0 (chr-ID Gm18; pos 36631058 to 36631548 reverse strand)
gaggaggtaccacaaccctctttttaattgttatgcattgttagtgtaatcaactaatcatgtgtgattgaattttaacctaaattcttagaatttttcttgtaggcacgtcatattagtaaatagagtcttaactaataaaaaatcatcgttaacaaacttatcatacatggcgatgtgtgatgggaagaaatgtaaaaactctttatactggtagtgcatttaacttaaatctttggagtttatcttacagtcactttgtattagtaaatagtgacaagataaagggatcaaatgttaatggaccaagtgtattttatactgatggtgtttgtaaattaaacttttttttttcttttgatgctgattttgtggaatcttagtgggatgaggtttttgttgttgctgacgatgttgatttttttaaaaggtttgttgtgtgaaactgcatgtaggttgagggtcaaactgaggaagtgatctttgatcac

SEQ ID NO: 27524 - DNA, 751 bp, Glycine max
  Intron number 1 from transcript Glyma20g38510.1 (locus Gly ma20g38510) derived from phytozome v7.0 (chr-ID Gm20; pos 46097691 to 46098441)
gcagctgataaacccttgtaatggccacctttaggttgaataaaagtcctaaaataagtcaattttaacagaaataatttagataaacatattaagaaaatataaaattatttattttattaaaataatttttttaataaataattttaaacaaactgattctatatttaaaataaatcataataatattgactaaaatttattaaaattactcaaagtttttttttctttacattatagcaactctgttagatttggagtttagtgtaggtgtaaaaaaataaaaagtattatgtataatttcaagaaatctcaaaaaagtattcgtgtgatttactcttatatttaaggtccgtttaaatgaacttataaataatttttttagacataagtatttgaaaaaacttacgaaaatatatgacaagttcatataaggttttaacttgttttcataagctgttcagaacatatgaaagcgtcaaccttaattttattaaggtaaaatatataaagcgtgtttacgcgcgagcaatccattcatttgtttttttgtttaaagtaattgagtttctttgacagaaatttaaactttaaagcaacagagttagaacttgataaaaaaaaaacagtaaatttaatccatgattgcaatcaaagaaaaagaaaaggtgaagtaagaagaagaaaaggaaaaatccaaaatgaattcctcctagtccaagccctcgtgctgtgtttctttctctgaact

SEQ ID NO: 27525 - DNA, 880 bp, Glycine max
  Intron number 1 from transcript Glyma18g43990.1 (locus Gly ma18g43990) derived from phytozome v7.0 (chr-ID Gm18; pos 53592860 to 53593739)
aaaccaacaaaatgtttactgattcttcacctattataatatcttaatacaagtctcataatgcgattaataaattagttttttcttgattatgaaccagtgaagcataaaagttattattatattttccattattaattatatttacttttatatattttaatataaattacaatttatatatgatgacaacatcattggcctacagaataatgaggctgaaaggaaggccatgtttgacttattctagaactgccatttaaaataatcagacccgggagctgaactatttttcttttttggtttggttcagccatttctgagaaactattagatgatgaatattcagattttgatgctggactttgtcagatgataaaatagaaacatgttctctgctagaaaaatatcaaatttccatgttgtttctttagtttttcctggctgtttaagtagaacaagtatttagagaacaaaatatatgcataatccatagtcatcaataagtccacctattttttaccctgattatgcagtttgataataattttatcaaaatttattggccgtcaaaacaaagaaacaaacattgacatactattagttttaactctttcaacttaaaatatgctagtcaagttttggaccgtgtaataactattctaactgtctctatcccaacaaaaacaaaaagagaaagcaagaataagagacaattgaaagggatattacaaaacaagttaacaataaataaaattatcactaaccgtttgaggcagaagctaatgaaagaaacatgtcaaaaataacgaggtgaaacagaaccggcctagtgatcaaattaataattaacacataatagtagatacagtcaggcatt

SEQ ID NO: 27526 - DNA, 701 bp, Glycine max
  Intron number 1 from transcript Glyma20g39020.3 (locus Gly ma20g39020) derived from phytozome v7.0 (chr-ID Gm20; pos 46487043 to 46487743)
tcctttgagacgcgtcactcccaaacaccgtttttgtgagtgagttcaaagcaaacaaatactaaaaccatataaggttctctcgctcttgttaataattccaaattacaaacaacaacgcagtcctctctctctctctccctctgctaatttaaactccgttttccatttccttttataggaaggaggaaggaacgaagctgaatctgaatctgaatcggaatcgctttgtctttgaaattcgcactctctctctctctctctctctctctctctctctctcgtgtctctatattgagccacttcgaatccgtcgcctcagctgcagatcacatcgagtttcacccgaatgctctttctggactcgatttaggtttgtctttccttcctcaaatccgaattccgcgctttacgcgctctcatgttgtgtcggtgaagccttaatttcgtatttgcgtttccttctttgcaagatctcagttctgcgtcatcctattttgtttgatttcgtgcttcttctttcgttaccgtagggatctctgctttcttttggaattcgcgtttaatggtgttgtcttaggctgttttggaatagcaagatctgtcattattttattattctgagattatgtatagagggtttttttaatgttgattccgttgcagatcgagttcttcataccctgatagtgtgggaggat

SEQ ID NO: 27527 - DNA, 518 bp, Glycine max
  Intron number 4 from transcript Glyma17g34770.1 (locus Gly ma17g34770) derived from phytozome v7.0 (chr-ID Gm17; pos 38744532 to 38745049)
atcttctagtggtaagcgttgtgtaatacttgatcagtaagaccttgtttggatatacttcttcataagcgcttatagcagagaatgaaaaaaaaaaaaaagaaagaaaaagaatgaatcaaattagttaaagtcaacttttgtacctctgttttggaggaggaagatgagagggtttttttttttttttttataaaagttgaagtgcacaagttgattttaattaataggagaagcttaattcgtttgaaaattgtgtatgtatattcaaatcacatgtatagcagcaacaaacaaaatgtttggatacatggtatataaagtgcttatgagagcttctttactggaaatatagagatttttccaatagagaagttgtcgaaagcacttttagtcttgtatccaaacagacgcataatgtaatttaagcagaatgtctggtgctgaatctgatttttttttctctttcctttttctttgaaggtacactctgaatcgtatttgaataccctgaagca

SEQ ID NO: 27528 - DNA, 1030 bp, Glycine max
  Intron number 1 from transcript Glyma20g25880.1 (locus Gly ma20g25880) derived from phytozome v7.0 (chr-ID Gm20; pos 35507967 to 35508996 reverse strand)
tctctctctgtgctgtctctggcttcagtcttattgtaagtctcttcctttcccatctcaaccttcaattttacaaaaactacacttgcattgcacatttgtacacattgggtaatcttgagtagtgccttgtatggttatgtacaaaaaacattttctataaaaaaaagtttgatacttaatttaggcctattaaaaaaatcatttcttttctttgatgcttcttgcttttattcacattgttattatgtgtctttaatgatcaatgacacacgggagtgttcttccaaatttgtggtcactgtaaataaatactgagtataactcattccacatttgtcattgtgaactatttgacgatgaattagattcattttaagggaaccaaccttcttgaacttaatactctttctcttgataaactacatttactatcaaaatggacaaggaaatgatgagattttgaaatcgtttaaatgtgatatagtaatcatgcttacatgttatgtatagtttttttaaggagatgttttttttttttctgtcatgtggaagaatttaatctttgtttatgttataaactatacttatttgtgttattttaacgtttatacagtttggtcatgtttatatataattctattgttttatgtacgtatattttttaaaatttatattaacgtatatgtatcctatgcaatctacatggaacagttgcttatcagagggagggaaaactataaaataaaaaaatgaaaggaatgatgaagatgaatacaaaacagtgattagtcttttaattttgataattagtaaaatttaattatcctttttagatgtcctgtataataaaaggaagaactcagaattagctgctacttcgtaagttctggttctgctattaatttttcaactcacacggggatattgaattggatgcttgctaggatacttggtacatcttgtgacttatatttgagatttgagaattaattttactttgtcttttatatatatcaaacagtttgga

SEQ ID NO: 27529 - DNA, 451 bp, Glycine max
  Intron number 1 from transcript Glyma20g03100.1 (locus Gly ma20g03100) derived from phytozome v7.0 (chr-ID Gm20; pos 2836992 to 2837442 reverse strand)
tcttgtgcttttcctagccttcacttatcattcaagtaagtaccctgcactgattttgtctgtgtgtgtgtgtgttttttatcaagtttcaacatttgattcaaaaagcttcccttttaaaattataataatgataactcacccttacttttctgaggtgggttcatatgattaattgctgtttctagactttttccttgctttagttctgggtcttttctataaaggatcttctcttttctaaggttctgaaagatgaaagattttagagagtgattttaaaggaaattctgaatgatatattttatttttaatgtaattttgatctcttttgtattgaaaaaacatgcttctcatgttgttatattgataagataggattatggtgtgaactaactgtttttttatgtttctggtttatttgatttgcaataggtgctctttactgtat

SEQ ID NO: 27530 - DNA, 930 bp, Glycine max
  Intron number 3 from transcript Glyma20g15220.1 (locus Gly ma20g15220) derived from phytozome v7.0 (chr-ID Gm20; pos 20712746 to 20713675 reverse strand)
cttgactgaagaagccccggagaagcttgaaggctgtaagttattggttctgaacttataatctcatttatccactctgttatgttatgtgtgatggttgtcaaatttttctgttgtagttgtattctgtatggaaatctggttttctacttttgtataggttcttaattagtaagagcatctccaatggtgatgtaagcaactcactttgggctcttaagtgaaaccaaagtgggtggttccactatgtcacatcacatttaagcaacccacatttttatacttttatatgtatttaatttcgtttcaccattaaaatattattatttttttattcataatcaactttcttatataagttgtgcttaaatttgagcaatccatcctgcagttagatcatctttaatagggagaaaaattagaaacggtttcttagtttacattgagagtgagattattttgtgcacacatcttaaatttgtagagcttagatatcttctgtagatttcatgattctgatatatgaccattttatctgcatgaaagtacaatgtgaacatttggtgtatgtctcttatttttgtttggcatatatatgtctgaatttttttatggatgttagattaatccatgcagttacttccccataggtttttgattcatgtgtagaataatagaagtgtaagagggcttatgtttatgcattgtttacgttgcttcatagtatgctggtatctttagtagcttcttcatcttcatcttatgatttgctggatgtttgtgaattcattggctactgtttaatatggttaatagacaagcatgggcttgtggtttccattggttagctacaaattactgatctgtttgcgcattatttttcccttcataacaggctttgattctagagatcgaagaaaaagcaagtac

SEQ ID NO: 27531 - DNA, 871 bp, Glycine max
  Intron number 1 from transcript Glyma20g15220.1 (locus Gly ma20g15220) derived from phytozome v7.0 (chr-ID Gm20; pos 20713939 to 20714809 reverse strand)
tctcactcgcattgtttctccgttactcagatcaggtaacactcttttgcccctttccttttttttttttctctcttcttcataacttgtcactcagagattgttctctctctctctctctctctctctctctctccaaaccttaaaattcacaattcaaatttgcggtcttgttctttctcttctgtctcgatttatttcttttccgccattcgattcctcgaaaatcattctattcccattttctttacacacccttatttattcgaagaaacaaattggtaatatttgctgggtggttattatggccaatggaattttctatgaaaagggtgtaactggtacccgatttttcgtaaaaaaaaaaaagaaactttgactttcttttcttctttttattgtatgttcagatgttacaaacttattaaattggtgtgtttttaacgattgaggttttgcaatttaagttgattaatttttttcttcaagccttatgtaacgtagtttattttttattttctcaaaaaatgtgctgaaaagggtttacgttgattgttttcttttttctctttggtcaatctagtctaaagtcaagaacccgttacatgcagtgttcttgttatgctaaatcatttattggaaatgttaaaaagtatttttttgtgactttctttctatttcttgtcatttttcataaagattatatttttattgcaaataataaaaataatgtttgttttactctttggtggtaagtaatcgatttctgtgaataatgggtgccagttcttaaattgatgagagatacctttgttccccttttctttagtgtgaggttttgtgaaagtaaaattttctctgtcatgcaggc

SEQ ID NO: 27532 - DNA, 744 bp, Glycine max
  Intron number 1 from transcript Glyma18g45940.1 (locus Gly ma18g45940) derived from phytozome v7.0 (chr-ID Gm18; pos 55637654 to 55638397 reverse strand)
ctccggaacagtttctcgagggtgacggaaacaggtacaattttagttgaaggaaaaaaaatttgttgatatatatatatatatatatatatatatatatatatatatatatatatatatataattttatttttttctctattgtccgaaaatgggtgcttggtagaagcttgatgagtttcttgatatatttacaattagttgtggaaaagatggactttaaaattgtgaaaaggcaacggtaataatttgatttaatgaaaagtttgtggtgtggaataatgctgtggaggacactattatgcacgttacttcacgagtgtgaagcttttgccatctgggtacagctggtttcaccttgttttctgcttgaattcttctacctacctcttatgggcggtggtgtgtgccctggtgatgtgcaagaagtatcattccggaagatgcacgattagagtgacaatgaatgacagtggtagagagtgaagaaataaaaatttacaagatttcaatcattcaattatgcattgaggcatgacttgatgcatttgtccatttgcattctctacttgtccctcccttccacttgtaacaatttaaccacatcacttatgctttactctgtttagtgtttagcattcttggttgagtctagaactgtttgtttttgaccttgtacaagttgataaatttattgttaattgttttgtcagcatcacaaagcatatagaaaccgtgaatacc

SEQ ID NO: 27533 - DNA, 345 bp, Glycine max
  Intron number 1 from transcript Glyma19g40270.1 (locus Gly ma19g40270) derived from phytozome v7.0 (chr-ID Gm19; pos 46696058 to 46696402)
tgggcaatttggcatactctattcccaaaatcaatgtattttaaatccttctatttcatcatttccttcttttttttagccacgcaacatcttactaaaaatgacttgaatcagattccagagaattatttgaaattttgaataatctcattctctgaagatttcgtcaattcactgataaatatataaatatgcttttcaaaaacccttcgaggtttaatgtagatgaagcactaatttttcatttttgtaggaatttggttttccaagaattaccaatttttgatatactaatttatatcttttgtttcttaataatttagccagggaaactcttcaaacact

SEQ ID NO: 27534 - DNA, 424 bp, Glycine max
  Intron number 1 from transcript Glyma19g36880.1 (locus Gly ma19g36880) derived from phytozome v7.0 (chr-ID Gm19; pos 44164456 to 44164879 reverse strand)
acccctttacttaccctattttaccaccaccattagttcatagtaagataaaattgttgattcattttatccatcttcgatttgcaacaacttcttaaaaactaaaaacaaaaaataaattgaaactcaaaattaaaacaaaactggttttagtttttaaaaagtaaaaatggaaatccaccccaaatgtggccttagtttttaacaactgaatgttaaaaatttagatatttacttgagacgcataaaggcagaaatttaagaaatgaatctgcgtaaagatttggtgcaaatcataacagccttttttatgcttttctctctttgtgtgtggttttctataattatagtttataggtttggccttggagatgctattagatatgcggagcaggcaatccatgttcaattttgaattgcaggt

SEQ ID NO: 27535 - DNA, 268 bp, Glycine max
  Intron number 1 from transcript Glyma19g34960.1 (locus Gly ma19g34960) derived from phytozome v7.0 (chr-ID Gm19; pos 42558136 to 42558403)
aggtaatatattcttttttttttttatgattccaggtttacaagtaattattattatataatctaggactatgtcacgtgttagttaaagatttactaagactatagaaacatagtaattcaagaccataggataattttggaaggtttatcttctttgatttgactgtttgtattttgataattgtatctctattaagttgtttattttttttctttgaatatgaaaattaggctgcagagctgttgtacaagaggactgtgccaga

SEQ ID NO: 27536 - DNA, 1010 bp, Glycine max
  Intron number 4 from transcript Glyma17g29270.1 (locus Gly ma17g29270) derived from phytozome v7.0 (chr-ID Gm17; pos 31705505 to 31706514)
ctgcatttgccaggtgtttatataacatttgtttaaacttatgcaaggatgatgctcacatggcaaatgggtgtcattatacatcatcatgctttaaatgcatctgcttgtgttactaggattcaacttaacaaattataatttgtatctgcatatctggttcgggagaaactaaatggtctgttgacgaagggacagtcattttcagtgtcaagcttattattcatagcactgtaaaggctccattagtatctagctatactatggtcctgtttggataaatatttcattaagtacttatagcagaagaaaatatcacgcttctcttacaagttaaaattagcttatgcattagccaatatattgaagttttctcattttaactttgtcaaaagcttattttaacttatgcataaactaatttatttaacttataggatgagaaattcaattcattttacagtctaatttcttcttatccaagcagggcttaaaatattttaaactaacgccagttattttagttatttcatgtataataagtctccaacatttccacaaatagaaaaattccaggactagccactaatgctttcagactcgtgtaattatcactaatgttattcctgcatttaatttccatatcaaataattagcactatatacaattatctcttttatctttttcatacacatacttttcaaaaatattcataaaaaaacaaagggggcacaacaaatgttatccgactttggacatagcaaaaacattttcctttctacatctaatttatactcttaagccttacaccttcctctctaatagaaagaataggcattgggagtgttcctcttttcttttctcaaaagaggaatatgtagaggtttttagtgtagatttctactataataatatgattggttgacagtgtaaataaaacaaactgttgttttatacttttattacaagatctgatttggatacatttgctttaatatgcaggaggaat

SEQ ID NO: 27537 - DNA, 639 bp, Glycine max
  Intron number 3 from transcript Glyma19g31910.1 (locus Gly ma19g31910) derived from phytozome v7.0 (chr-ID Gm19; pos 39689363 to 39690001 reverse strand)
gcctcccgctgagtgtaattttccgaaaagagaaggtttaatcccttgatcttgttaatatatttgtgtgagctggtttgtatctgtgagctaatggctagctgcacagtataatgtaaactaccaaagtttgccagttgcacttgggaggaaaataagtttggaatgattgctctctctctctctctctctctctctatctatctatctatctatatatcattctaacaataaattattcatatcattaacagtacataaagattgcttgaaaaagaaactaattatatgattggattatttcaaagcttaaactcagtgaacaaaaggctggattgttttttcttcttgtgtacatcttttgagctaatttactttaaatccttgagtgaaaacactgtaaaactctaactgtccaacacatcatcgttcatctcttactattagaaaaggaaatgttattctacctgttgatgagaaaaaacatatattttctttttgtaccctgtgatcagtcaattgttattagtttatccatttagactttttgattaactgtccttgtattctcttgtgcacttggataattgtatttttcttgcagaaattgtggaattacttgccaagcaactggttgac

SEQ ID NO: 27538 - DNA, 592 bp, Glycine max
  Intron number 2 from transcript Glyma18g49690.1 (locus Gly ma18g49690) derived from phytozome v7.0 (chr-ID Gm18; pos 59060935 to 59061526 reverse strand)
atcagattgcataagcttttgggaaacaggtttgtgtatatattttcttctttttttttgttgaattaaacaggcgtgtatatactgttaactaaatcaaactgagtgtagtgatacctcttgataaatatatgtgccttatatttcatatttgaatccatattatttgcataaaacatttgtttgttatttatatttatatactcagtttctcttccgtctcactgttaacatatattttttcatttctttcttaattttttatctcacacacacacaatatatattgttaactaaattacgctcatgagattaattaaaatgcattgataatgaaaaaaaaatgtatgtttttttacagagattttatttgttgttatttaatcatagattgtcatttctcataaaattattgagttttataataattaattgcaaaaaaaagttgtatttaagatggtttatattatattaaccgtgtaaaaaattatattaaaagtgcatgaaaatttaattcatgtaatattgcatagaacaagagtaaattaacttgtcattaaacaaaattaaaattaattgtttgtcgatgtag

SEQ ID NO: 27539 - DNA, 643 bp, Glycine max
  Intron number 1 from transcript Glyma18g52600.1 (locus Gly ma18g52600) derived from phytozome v7.0 (chr-ID Gm18; pos 61165025 to 61165667 reverse strand)
catcctcgagttcggtctccgcattacccgtgctggtatctctcttttcccatctgggtttcttctttctccaacaaatctcaaatctttatccatccattttactcttacatacatcatacatgcttcggtcttcggtccctggtttgaatcgtcctgctaactgaactgaaactaacaattctaacgactaacatttgccaaaaaaaaaaaaaaattacatgccttctctctctgttatagagactctttttttttctttttcatggcccttatttttagcaaatagttagcaaacatataacatgcgtaaatcaattgacacgaggttgttccaatttaatcagtagtctgaagttgttccagtttaatgagcagtcttgaattcgagtcatgtgttaaacatacaacttgagattgtttcagtatatccagcagtctcgaattcgagtcctgcgttaagcgttgcaatagagaatttttcgcccacagtgataagagtcttactgtagtctctgaccaaataaaaaatagcaaccgtttgcgtagtttgatgttgtgtttattcattgtttggagctatgttttgtttttgtggctgttttcatgtgtcaattggattgtggtgcagatatttccacgg

SEQ ID NO: 27540 - DNA, 486 bp, Glycine max
  Intron number 2 from transcript Glyma19g35660.1 (locus Gly ma19g35660) derived from phytozome v7.0 (chr-ID Gm19; pos 43162801 to 43163286 reverse strand)
cccagctatcaagagcatcacttcttgctgaactggtaagatattctctttaactttatctgtgttttacctgttgcctctaaatatttgctgtatagtaattattttaacctaaattttcctacgctgttgagtaatggctgttgagaattgagattacaaggattagatgaaaaaaagcaagagaagatataaactattattaattggatggcacttgtggcagaaaatactaacctcactatttatgctaatattctatgtagtatagtacaactactacaagtgctcatagcagttttgatttgtcatatatcttttttttttccaatttcattttggcttcaatagcctttaattggaggttggttgaagtctgggttaccatgactattgctaagttaaatacaatattttcaaaatgatgccagtagactcagtctaaagtttgtttctgttggttcattacaggcatccaagggtgtg

SEQ ID NO: 27541 - DNA, 705 bp, Glycine max
  Intron number 1 from transcript Glyma18g05390.1 (locus Gly ma18g05390) derived from phytozome v7.0 (chr-ID Gm18; pos 4111849 to 4112553)
gtttgacctatctattgacaggtagttttaggaattgcttgctatatttttcttgtcatgatgttggtcttgtgagatactattttttatatggttttgttgaacctctgtgacaattgatattattgtgttttttggtcaattggtgtggatttgatggtggtaggttacattttcctcaagtctcttcctccttatccatggttactggtcgttggtgatcaagtttatgagctctattattttgggaataatgcttcttgcacatccctaagaagcaaatcacctcagttaaaactcactaggttcagcctaatggtatgggatttgggtaatttgtattaggttttaggttcaaatcttattgtttccgttgtacacaaaatcaactatggatataggtatacataaaacaaggtggaaaccactgtgattagatggtgtgaaacaggcacaaggatgggggaggggtgagcaactgtgctctttgttcacccaggaaatttcttgtctctaattctgcaagcttttgttataattacaatctagtctgaaagttctttagtgtctctatatatttatactttgttctatgatttagccaacattgaacttccattgtttctatgaggctttgtatttgacacacttgatatttgatatgtgacagacacaatacagagtttggttcgacatcttggtaac

SEQ ID NO: 27542 - DNA, 861 bp, Glycine max
  Intron number 1 from transcript Glyma20g37750.2 (locus Gly ma20g37750) derived from phytozome v7.0 (chr-ID Gm20; pos 45529746 to 45530606)
tccctttctctctcgttgaggggggaggagttgaggttactggatttaatttttaattgggactttgaaggaagctcatcagtttttcatctcactatgttcggcatttaattaatttttgccctcaatgcttgattgaattttcatagttgaaaatcatgcgctttactccatttgaactctaaactaaaattcaagtcattgcttttccccccatctgtgaaattggtacactgtgacaagtgccaagtgtttctctctcgtgctcttgtaccttgttgtgctgctgactttcttatctttctcatgtaaaaagaagttgcaatgtattttatttcttatttgttgtgttatgtgagccaggtgaaagcaaattagtgttaattcaacgggaatttggtttgtaggtgctaggttccaatactatgttcttttgcgacctatttttttattgaaactttgggtttttttgtattaaaagaaaatgaattttgatttacgcattgttgatatgatattatgccagttattatttatttgttgttatgcatataataaataagtcaatttttttaattgaaagaagaaaattttgattttctctttgttgatctgatattatgtcagttattatttatttgttattactttattgtgatgctgcctaagctatgatgctaccttgaatgtatcacctcctctccaccttttggctgagaaatctttgtccgttgatgttctttaatgaagtcctttttagcacatgatagaaataaagaaattgatgcttataaatgctagactccattgtgttggtgtaaattgattttttttttccttttaaatatttgtataggttaa

SEQ ID NO: 27543 - DNA, 573 bp, Glycine max
  Intron number 1 from transcript Glyma19g37020.1 (locus Gly ma19g37020) derived from phytozome v7.0 (chr-ID Gm19; pos 44288211 to 44288783 reverse strand)
ttcaagttctgttgaagatctttcccccaccattggtaattgtaattcattcattacattcatgattcaaccccctattttcttttcttctattttttttttctagttttgttatttctatgttcaacctttgcatgctttgaatttagctgtcgcacttgtttttcttatacattgtttgcaaccaaatggtgtctctgtctcatgcttgtcgatctattgtttaaagtgacgctgatgaagttttgagtgttgaatttgtgatttttttttcaaattattgtcagtttaaaagttgctttacatttcaggttcatccaagttcttctatgttttactttgctttcatgattgaatctcttggtctttggttattgactctgcctaggacttgtgtaggattgactggtcttttgttatggttcttttatgccactagaactaaccagaaattgaatttatgttcctcttgtattgtctatgctgtttgtctgacttgagttttgatatgatctgatgtcgtttctataatatgtaggtgttgattttaagatcaaaacgctcacagtgggt

SEQ ID NO: 27544 - DNA, 261 bp, Glycine max
  Intron number 1 from transcript Glyma18g05330.1 (locus Gly ma18g05330) derived from phytozome v7.0 (chr-ID Gm18; pos 4067641 to 4067901)
aaggtatccattctattccaattctctccttttgtctttttattaatattttttttgttaaattgagctaacattctgtgctcttaagtttggcttcttgtcatacttgtatataaatgtaaggtgtccctttcatacccccttttgtgttgcttggacatgcttgtgagttttttgttttccttttctctttttgataatttgattgatgtgtgagcaatgatggttaggaggggagaagaagtgtctgaattctgagct

SEQ ID NO: 27545 - DNA, 912 bp, Glycine max
  Intron number 2 from transcript Glyma17g29500.1 (locus Gly ma17g29500) derived from phytozome v7.0 (chr-ID Gm17; pos 32151806 to 32152717 reverse strand)
agtggctcttcaaggggtagcagtggttatcgcaggtgcatagacttttccttctttattcatttttgctcttactatacagtaatattaatgtcatttccatctcatgccttttacttttactttactttctaggttgttaagctctgacaatttcagtagaagactttgcaggcagaatttgttcactattttttttttgtatcacgataaacagttttctagcactaaagctgtatttttctaaacacaacattctaaacaattactagtttctactgttcctctttcaagatgaacatgattatgtatcagtgtacactatacagcttactagaatcatattctttttactatgcttcaatgtcaataatctaacttgtcatattagtgaatggtgtttcatgtgcattactgtaaagcataatattctgatttgaaaaagaaacatgatctcactcattatttgctagctgatttattgtggttcatttcaatgtatatcatacttaagaagtggttatagttgtaaattttgtactagttagcttttgaaagttattattcaatagttctttacttgctattgtattttaagagaatggtatggttttcttactgtttttctttttaatgttggtcttaaaagatacttccctgggccattaatgatgagatttcatctgattcaagtgtttgcatgttctaccattttcgaatttattcaatgtgataagtaatacggctatcgaaggattctatgtgattgactatcataggagtgacttagtgcatttgatttagagttctgtggttatttgatgtttgaactttgagttagaatgattttcttcagttgtctttagaatttcgatatccttatttcatttatgttattcacagatcccatag

SEQ ID NO: 27546 - DNA, 1022 bp, Glycine max
  Intron number 1 from transcript Glyma19g22670.1 (locus Gly ma19g22670) derived from phytozome v7.0 (chr-ID Gm19; pos 27575752 to 27576773 reverse strand)
tgtaaagtcttcgcttctcccgttcatttcttcaggtagcatatgctttatgagctttctggaaactctgattatttgatagtgatatgttagcgtttactctatagtgttggaatttgtattcttttatatttcgcttcagaaacatatatagaccgggaaatagaatgtgaagctattcagtagtaagttttttagtttctgaattgcaattgtatttaaaaacaatagttatggttctcattttttttttttttataattgatgattttggtccctcttgatggaacttaggattctagggtgaggtacaattacaaaattcaccaactataaaaaataccacgagcaaaatcattgtttttagggattaagaccaattttgattttgattgaaaagttaagggacttaaaacacatcttatcctatattacttaagagcctgtttggtgtagattacttttgaagaaataattttttttttcaagaaatctcgtatgaagcaggaaaaaaaaaagcaattatttctccttgaatcactaagacgatactgataaacactaaacagttattcctttggatagaatatagatgttgcagatgtatgcatgcgcactgattttagccaaatttatatgaaaaatgcataaaaaatagttctgtgggattgggaaggaggggggaatgatacaatgttcttataatttcagctttgttagtttcctgctctccttaagctccaataattgatagttttaaatttatcaaactctcaagtacaacctttaaaagggaaggtagaagttgaagttagtttatgcgttgtactgcatcgtattgataaactaggtatctgaactctaagcaatcaagggtgttgaattcaagtttgaagagattactcagctgacacagggtagaatgtagatctgtacatgtattcatatcgagttattcttctatatagttgtgttccaccctgaagtgaaataaatttgtctgaatctttcagaagaacgtc

SEQ ID NO: 27547 - DNA, 944 bp, Glycine max
  Intron number 3 from transcript Glyma17g33760.1 (locus Gly ma17g33760) derived from phytozome v7.0 (chr-ID Gm17; pos 37710638 to 37711581)
ctgcattcactaacttcaaacaggtaattgtgagagtgtgtgtatttttttaaattgattttttaagttagtccttcaaccaatgtgtttaaataaatgaagtaatgaaaatgtgtgtgtgagtgagtgagttagtgtatatgttttttaattggttttttttaagttagcccatcaatgtctttaagcagatgaagtaatgaaaatgtgagtgagagtgtgtttcattttctttttaatttttttaaagttagttcttcagtgtccttaaacaattaatgagatttcctatagttggatttgtgtttttctcatgaattactgagaagtgcataatggttcatgtagcctcacaagaggagttttagttgttcaaaggattaagtatctgtgctaggttttgatttcataggagaataaaaaagttaaaattaaaaattcaaagtgtagtatcttccattttgaaggtatcaaagtggagcacatgatggtaatttatgcatgtattttttttttctattctcaatggttgcctattttccaagtggtgttctagtgtttacaccatttgccagcaagcaaccaacataaatcaaattacatgctttacttacaaattttacccaagcaaaggtgtccttgggtagctttcatgttgcttttcccatataaccaagggtcttcttggtcaagttggtagaatgtgggaacatagaaaatgaaggcaaaaccatttcaactaaagttatgacttgaagtggaaaagaatacattctcattctgtttccatcttcttgcatttcttttatatcaattctggtgtaaagtgatttttgtcccaaattttgtatctcaacactttttacccagtcagttaagtagaaactaagtgtagttgcacagatttttacaaaattgtaactgattgtgcaggtaattgaaga

SEQ ID NO: 27548 - DNA, 720 bp, Glycine max
  Intron number 1 from transcript Glyma19g35430.1 (locus Gly ma19g35430) derived from phytozome v7.0 (chr-ID Gm19; pos 43014667 to 43015386)
tgccaccgtctccggccaccgctctcgctctccaggtccactctctctctcacttattccctctgcgcttcttcagcgactttcttcccctttttgctgcttctcctcgatctcgccgctctcgtttcctctgcgtttctctttctagatttgcttttctctgcagcttttcaatttccccaaccgagattccgctttcatcatttctttctttttttgctgttcgggattcgggaagaacaacctcctcttaatatagccctttcatcagtgtgctctttgcgtgtttgtgtttctgttctaacggattttttatttttattctactgctgacgcatgaggtgatttgatttttcatgtcaattcgctgtcgtatttgaacactatgccttattgtgcttctcttcttactctctccttcgcgcatgtttctgtttactgattgaaaatcacttcaagttcacactgtatcagttctaatagcgcttgttctagttgatttctaggtatccctgaatttgattgcattggggtttggatcttgtgtttttctgttgattagttcttattccacttttaatgtatttagcttatgctgttttgtatttgtatgtgtgatgcttatgtgtgttgtatttcgttgttgttcagcttacagatctaggtgtgtgtagggattgttaatgttaatctaggtgatttgtgcgtgcagctgttgaa

SEQ ID NO: 27549 - DNA, 502 bp, Glycine max
  Intron number 2 from transcript Glyma19g35430.1 (locus Gly ma19g35430) derived from phytozome v7.0 (chr-ID Gm19; pos 43015494 to 43015995)
aaacaagctactcacggacaggcctcatcgtggtgatctccctctttctctgtttgtgtttaccctttttggtttttcatgttgccattgggagttttcttttttaaccccccaaaattattgctttgattggtagaagattttctggatgatcttcttgctttggccatattgactctttggttggtattgtaacggatggttttcttaaattgggtttttggctttttgttgtttgttttggggtttagtaggagcatatttccgttgggttttcatagaccgagttttggatggacacatctctcttggtgatccgtctgattttatatattcttggccaatatgaaaccaggctggaggtttctctaaattgtcaattgcttttatatttccaagttgcatgctgttgaaattttgctgtgcctttttattatcctatctcagtcttcactgaattgtacctggattgcagcatcttcactctcaagaagtcaatcag

SEQ ID NO: 27550 - DNA, 515 bp, Glycine max
  Intron number 2 from transcript Glyma19g30080.1 (locus Gly ma19g30080) derived from phytozome v7.0 (chr-ID Gm19; pos 37745896 to 37746410 reverse strand)
aatttggttctcaaattttaaaaaacatgttgatttagcctgtcatctctaagaattcatcctgtttttaaaagtttggagggactaaatccacatgtttttagaagagactaaatccacttgtttttaaagtttgagaaccaaattcatcaatatgaaagtataaggaccttggttacatttgatagaaaatatagggacaaaaagcacatttttaccaaattaaaaaatctactagaaacaaaaaagtttgaagatacttttggtttatttttgttccaccgtgctgaatcattaaatctgagagaatgttattccaattagagtgaagtaatactattttcaagtgcgttgtgataggtcaaatcagatcagtcttgtgatttataagtataaagacaagccagaatttcttatgctttccttttctgttgaaatttgttatggatatctcttaattcagtgttgttatattttctttgtgtgttttataatcatgtttttcatggtaccag

SEQ ID NO: 27551 - DNA, 337 bp, Glycine max
  Intron number 2 from transcript Glyma18g09090.1 (locus Gly ma18g09090) derived from phytozome v7.0 (chr-ID Gm18; pos 7896729 to 7897065)
agcaacaactgggttctgtctgaattttgagataaggtgtgttttttcttctcatctgcatttctgatcggtttttgctttggtagaaaggttggatttgtctgtttatatagaaaactgtgcatttagattcattcccatgcttgaattttggctatcattgagtgatttggatatggattattgagttgtgagattttgtgccttggtgtgttttttgagatgagaattttgactcaaaatgtgtgtttttttttttaaattttgttcaatctcaatattggaaatttgcaattagtgattgatggtctattggtcatggttggtgttggaacag

SEQ ID NO: 27552 - DNA, 999 bp, Glycine max
  Intron number 1 from transcript Glyma19g11560.1 (locus Gly ma19g11560) derived from phytozome v7.0 (chr-ID Gm19; pos 14676777 to 14677775 reverse strand)
aacctttgcaacaattttggggctatactcgaggtaaggaatcatttctactgcaataagcagaattgactcaacggtaaaataactaaaacccaagttaggcctacaataaaaaccttttggcagaaagcaaaaaaggcctcatatgtaggaaaaagtctaaatatgttgataaaaaaggaccactatataactatttcatttaaaattaaatatttcttttaaaatttattttagacctcactcaccattgacccctcacaacaagatttacgtaaattacatgtagatttttacggttaataggataacaaaatatttctatacataatatatatgtaattcacaagtgtcactctagttgtaggatgatttagacaaaattatatcaaaatttaagtttaaaccttattaccacctgttttagcaaacacatatgtcataatattgaagatatcaaagttcaaaatattgttggtcttcaaatttatgcttgatagtatacaaatctaacaaagttgtagtcaatagaatttgtatttgtttatttatgataattaatgattatctcatagtacatataactagaaacacttatatttgatagaattggtataatttttattttatgtatgtttctttaagtcaatactcaaatctttctgtctttgaagttatttttaagctatgtgtattattttttggattgacacgattatttattcttttatatttttgttttgcagcttatcttagaggtattatttttggtaagatccttctctttgtttccttaaaaacgaattaacatcatataataatattcatgggatttgctgcttgaaccaagttataaatcagacgaagaatgttggtgcttcttactcatatggtgaaacatctatgcaggaataggcagcagaataacattcagtacaaaacagttggacaacgcagttggactgcaatatttcgatggaggaatattcgtaggacgaa

SEQ ID NO: 27553 - DNA, 460 bp, Glycine max
  Intron number 2 from transcript Glyma17g17730.3 (locus Gly ma17g17730) derived from phytozome v7.0 (chr-ID Gm17; pos 14767608 to 14768067 reverse strand)
ttattgcactggttagttcttcaataacactccaattcgcgtgagaaaaaaaaaacatagtttaatttttgggattaggaattaattttaggtaaatggtgaatttggtgcttaaaagtgtaacaccaaaagttaataaatattcttaaaatattgattataaaattaaaagaaaaaatatttttatcaggatacctaaaatacattaacatgaattttttatgttctcttataatttttatttaatcacttagcacgtaggaagtacaacaatcaaaattatatgattgtgacatttttcacacatttgaaaagtaaattgttactgcttcacatcttcagaaagtgggcatttatccaagttaatttctttgaagattggttaaaaaatgaactaacaaacgcatgtgggggtatgtgtgtagtctggtggaccttcatacacggttgaattgggaag

SEQ ID NO: 27554 - DNA, 548 bp, Glycine max
  Intron number 1 from transcript Glyma19g43530.1 (locus Gly ma19g43530) derived from phytozome v7.0 (chr-ID Gm19; pos 49164196 to 49164743)
agaaaccccttttcttttacgtcaatcttgccaaggtacgtaaatgtattctttgattcttttctttttattatttgtaagttttttgatggaatattccaactcgcaacctatccctccctccatttatcttttaccattaactcaatcttatatgtctctttattatttgaaagtgtatgcatatgtacgatcaaatgagtcacattgatttattataataactttctcttgaaaaagattggcttcttaaatgttctctttgcctaggtctgcaaccaagactatgataatattaaaggaaacgttgatagatatggtcaaaagagttaattagaaaaaaaaaaagttatatttgaaagtaacaatattctttatgcagtcactgaatttgttgtttggattcctgatttatctcaatcgctctcacatttctcgaaggccttgttattttcgttttcttatgtataaaaaattatcccctggatcctatgtgtataacgctgaaatgatttatgctttgatacagaggtacatacagcaacgcg

SEQ ID NO: 27555 - DNA, 251 bp, Glycine max
  Intron number 2 from transcript Glyma19g43530.1 (locus Gly ma19g43530) derived from phytozome v7.0 (chr-ID Gm19; pos 49164773 to 49165023)
ggtactgtttctctaaaacttatattttcattcatcagtctttgaacataaaaatcaaattttcttccgtgtctaaattgcgggaaagttattataaatataaaactgaacatttttaattttttaatgctatttactccatatcatgtagcagctagttttgagtccatctgtatattcatgttcatcattaacctagtgtaatcctgtctacaggtataactacggttgtcacaattgccgaaattttg

SEQ ID NO: 27556 - DNA, 875 bp, Glycine max
  Intron number 1 from transcript Glyma17g35020.1 (locus Gly ma17g35020) derived from phytozome v7.0 (chr-ID Gm17; pos 38979023 to 38979897 reverse strand)
gcactggtggaaattggattgcattgcccaaaaaagctggtttttctctcttccctttattagcatgcatatatatatatatatatatatatatatacattatttcaacactttcttggacacccattttcattcataaatatttgttgattctttgttcctgttttatattttttttctccaattgaaggataaccaacaccccatgaaaatgaatccagcctagattgttcttagacttttcttggatacccatctgcagcaaacatcattatttatttactttgttttattcaacatgaagaggacttggaatattttgtgttattgatacaggcatttttccttaatatcaatgatgattttcatttgctagctacttttttttttgtcaatcttttggttaagagtcaaaactaatatctcatgatattgcaatcaatttacgagatagatttttcttagaaaatattattctatacacacaaacctaaaattatatgtttaatcaacataattatctaaaaacaaccatgctcgtgctactttaatttgaattaaacacattgaaaaatgctatctatttccgtttccataatttgtacaatttccaagtataccacgcgttgttttttttttgaatccgggttcaaaattcataaatagcttgtgaagctttcacggcataaaactaggagtggggagtttcacctattatatatactttcttaattaatttctcatttcaacaactataagatttgattttctctctctctctctgtgtttttcttttactttacaaaatatcacgtcatgatagtatatattattatgcaggccttagacggtgtggcaagagttgccgtctacgg

SEQ ID NO: 27557 - DNA, 1000 bp, Glycine max
  Intron number 2 from transcript Glyma20g09810.1 (locus Gly ma20g09810) derived from phytozome v7.0 (chr-ID Gm20; pos 13608811 to 13609810)
gggaggatctgaaagaaacggtgagtttttcagttttgatttcagtgattcgaagagttctgaatttcttttggccttttttgttgtggggttcaaaattggatttagttttgcttactctttaattccatgtgtcgcaattttgttgtgaaagtttatgtgattggtttggtgtgaaaaagcatggaaatttacatgtgttaaaggattttgggtagtgggttgagtctattggtttgagaagtgttaatgaaacggaacacattttggtatgctcttttatgtggaactcgtgtcttttgcgtaatggaatcttgaggggatatattctttgaatattctagcacgttgacttttaatttttggttgaaatgccaatttctcccttcaaattcggcagttcactctttggtttcaattttgtgagtcaaactcaagtgcagttttcatcagtatgccaagtactttaattgataaaactaaaactggggacacaaggttagggcttcaatttcatccttttttttatttgaaaattgaaatactttgactatatgtgtaccttacctataaggcgaaaaaacatgaccctcttatgtctcttgttgcttgggaatggttcttatgactttatcactgcatgggatcctaatccttcaataaaattctcaattatatatttctattataaagttggtgtttaaaagaataaacagtgagaccatactactttaccatgtgaagcttttcctttttcacttgagggaatctgtgctccttggtgcttgaagattcagcagcagataaatacaatgttagtgaaaagaaatgagaaaactagaaatataaatggcctaatcttttggccagctgattcattttgtagtcggacttaacttatatataccatgcgcctttgcatttttctctttgaaattatgaatcagaaaactgttttgtgctggtgcttaatttgttcttgcacaggttcaagaggtgt

SEQ ID NO: 27558 - DNA, 720 bp, Glycine max
  Intron number 4 from transcript Glyma18g06670.1 (locus Gly ma18g06670) derived from phytozome v7.0 (chr-ID Gm18; pos 5270232 to 5270951)
accttgcaacctatccatccctgactaccctgtaagttcaaactttcatgcaaaaaatatattttatatttatttgttttctgaacttttgttgattaattgtcaaatttgtattgcagtttattggacaacaatgaccatcttgccagcttaactccagaagtgtatgagctcaagacattttctgaattgcatgtagctgaagaacaactaactggtgccaccactagagaagcatgtgttaggataactaataactggtaagcaaacaatcattcagctatcaaaagataatggagattccaggtctactaacgattatgactaaaatagtattatataagtagaagacaactttcaatatataatataacttttggggttaaaaaagactcaaattgaaattctaatatagtatcagagtttatcataatgatccttgttaggtctattagtctaccggttattgggttattattgaaccgcatgcaatatctaattctgcaaactttacgtttgagatgtcctatgtcagtgattgaattaaatttttcttttgctttacatagcttctatccacagcaataattttatatatgatttttttcttttcttgtaagtccagaatagtgatgctcaagtgtctttattaactatggggtgcatgatacatcagattatgtttaaatttgcctgcttgtgacaggcacattggcacac

SEQ ID NO: 27559 - DNA, 891 bp, Glycine max
  Intron number 1 from transcript Glyma18g52910.1 (locus Gly ma18g52910) derived from phytozome v7.0 (chr-ID Gm18; pos 61353820 to 61354710)
agttcatacttattttgcccttgcactttgttgtggtttagcttttgattttatttttaaaaatttgataagaaaaatatatattgacttttgacatgaaataataatccctttaaaagcctggtcaaagaatcttcaatgttgcactcgaataattgaccccgattagacaaagatataccacctattaactgtagtaagctggagttatctgaacatagctaagtgtttgtagtatttcaattctgtgtctatttaagcttttgaaatgtacttgaatgtggccagatctctagaatgttttttttttttttatcaatgtttcatttgtatggctgctaattttctgagttaactggtgctgaacgggggttaaaagctgccttttgctgttgtactgaaaaattacaaagggatgtgatgattattctaatgttatgttacctcacgataccttgagctaactaggaatgtccctcctaatttgttgctacacgaatcatgtctgtttgagtacacataaagataatatttgttcctcctgagaagttatcctagatttattgattaattcagaagctcacatttgatgtgaaatcataattcttccaaagatctcaaatcatttaattaacactccaggtcaaaaaacttgcattattgctagttctagattagttgttctcaattatgtgaagacaaactggtttgtttgaccaagtttatttctcttcttaaattccctatcttcatggacgtttttactctatttggaagacaaaaatatgtctaagttataaatattgttatctttaatttcttacttcaaaatccgatatcaaggacttgtatgtagttataaaaaccattatcaagcacttgttatatcca

SEQ ID NO: 27560 - DNA, 398 bp, Glycine max
  Intron number 1 from transcript Glyma20g31030.1 (locus Gly ma20g31030) derived from phytozome v7.0 (chr-ID Gm20; pos 39691929 to 39692326)
ataaccaaactcttcactctgcttctgcttctttggtcagttcccaattctctactttttctcgtttctcttcttaccctttaatcattcttcacggatttttgatcccggacacttttcctcaactgggttccgaaaaagtttctgtctttttcacgcaatattctattttcaaactcttttagcggcagcatttcccctgttttctaactctgtacttctctgtcacggggtagttttttaattcacgcaattctactttttttttttgcaattttattataaagggtcatcggttggtgaagttttctcgcaactgggttcttaaatcccgcatctttctccatgtgtttgtgcatgcaggaaagcacttaaccaaactctctgtttcagcttcc

SEQ ID NO: 27561 - DNA, 858 bp, Glycine max
  Intron number 1 from transcript Glyma17g20180.1 (locus Gly ma17g20180) derived from phytozome v7.0 (chr-ID Gm17; pos 18692027 to 18692884 reverse strand)
ataaatacaagctcttgaacagtccggtaaagcaagtaagatttggaactttttttattttgtatttcttgccgttggacttgtaggaactgccttctttcaattcgtgtaatttttcctgtccttcgtaatttgttttgatagcaaaaagggggaaaatttataaacattaagccaataagtttgatttgacaagcaaaacgatttttgttccctgctgtaatggattgggtttgtattagattacacctgtagatgtgactacaaacctcaagttgtgatgatgcaagggaaaaatagtagacaagtgttctttctgtcttatggctattgtgatggaaatgactagaaatagtcgcagaaaacaatgctctaaatttgctactgcttaaactttattgataatgatatgcaaataacctttgtctgtaagtattatattttcttttgattgaggttttggcattgctttacaagtgttttgtaaatttaaatcattcactcttacagagtatacaaccttctctttgccacatttttcttggcagtggcactccctccatcccttttgttgtttctctatgtgctcaaaccttggttcttaccctaagaatttactttaacatgtattgcttcgtacaattctgatattccattggacactatcatcttattttgttgtgctccattatttttcacctttttgaaatgaccatcttgtagtactttgcatgaatgactatatgaattgaatggattatggcacaattactagcaaatcaaagtctaagtggtcaataattctaacaaaatgcttctacaggcaacgcctgctgaagctcagaagtttgcaaggta

SEQ ID NO: 27562 - DNA, 392 bp, Glycine max
  Intron number 1 from transcript Glyma17g37870.1 (locus Gly ma17g37870) derived from phytozome v7.0 (chr-ID Gm17; pos 41609337 to 41609728 reverse strand)
gtaagctttaaaacaatggtttagtaaatgtataaatttttacactaatactaattaattaggtaccgtactactgatctaaaaaaaaagtaccgtactactattataaaggtcaattaaaatttttttaatgcaaaaaaaaatcaattgagttatcattcatattagctgagtgtaaaaaatatctaaaagaactaactaaaaattaattcaaacaaaaaaatcaagagaaaattgaaatctaaattaaatttggtaacaaaaaattacagtttatttttcaatttgtcaattcatcttcaggcgcgattcaattcaactactgtagccgaggtgcgatctgaggcaattggaagagcaatgatagcacagggattcgaggacgaagagaa

SEQ ID NO: 27563 - DNA, 581 bp, Glycine max
  Intron number 1 from transcript Glyma19g38890.1 (locus Gly ma19g38890) derived from phytozome v7.0 (chr-ID Gm19; pos 45739565 to 45740145)
catagattttggattgtctgttttcttcaaaccaggtttggctaaaatgttcattttctttttccctgcttgtctaatcaatatttgttttccttctgccatcgtttgttttttgttttgggaggtaattaattagttaacttaccttttttttactttaacgtctctttggaaggatgttttgggggaaaaaaagagacatttatttttaaattaggactgttatataattttaatatttataaaaaaaacaaaagattaagatggtaagtgcatgttaatttactatttaatttcttttatttaaaaatttaagagagttatataatatttataaaaataaataaaatattaggatattgagtctgtgttagtttattattttatttaaaatagtttgatatgagaacatgcagagctttcctgaagaaataaattgtagctgatgcttccctcaaaataattacttgaaaaactaaaatttcctgcattgttctacttacatggttgctatgagtctttgtcactaacaatcttaatttacaggagacatttttaaggacgtggttggaagtccttat

SEQ ID NO: 27564 - DNA, 486 bp, Glycine max
  Intron number 1 from transcript Glyma17g16570.1 (locus Gly ma17g16570) derived from phytozome v7.0 (chr-ID Gm17; pos 13309387 to 13309872)
tggtaaagccttccttgtctgcaggttagtttatttccgtttttacttgttattgttattatgttccttcctctaattatattattcgtggattatggttaatgtttgaaatatctctttatttttctctcttatgtaaaggaaagaagaacaattgatgtacttagaatttgtttgctgtatggaatctacagaaatggttttgttttacttttgaatcaaactaacatattgcgttctcttaaaaactatagttcatagctgcttcaatttgagaccttatcaattagttctctaggccaattgtctttctaaaaggttttaatttttaaattgtggtcaccatcacagttttgttgcaaattgcaatctttgatattatgggaaattgaagacatcctaccgaaatcgcaggcacaaactgtttattaaaacgttcatttgctatggtgttcatcctttgatttgattttaattttgtagggg

SEQ ID NO: 27565 - DNA, 607 bp, Glycine max
  Intron number 1 from transcript Glyma20g17990.1 (locus Gly ma20g17990) derived from phytozome v7.0 (chr-ID Gm20; pos 25179462 to 25180068)
caagataccccctcaagttcgtcatacccaaaaaggtttccagtaatcttccattttactattattattatattatgaatttaattggaatgcatctaaagtgcatttttacatatcaacaaaaaaaaatagagtgcatttttacatgaatttaattaaaatatactaaaaactgtgatctgattacaaattagcatgcacaatcctttacctttataataattatcttcaaaatatttcttgcatgacaattatacttttttttttaatatagccgtattattggaaattgttgactcgaggataattttttattagttgctattgtaatttttcttacattaactgcgaattataatcaaactctttttgtatttccatataattgaaaattgttgaatttttgttgtactaattactttaagagttgtatataagataatttcgaaattaaattcttcttattattatactcttagtcatgttttgactaagctacatagactttgtatgcttgtgttgtggagcgatcattggtataaaaatcatagcttggtatgctaaaaatgtttctttaactaattgcaggtgggttcttccaaaacag

SEQ ID NO: 27566 - DNA, 422 bp, Glycine max
  Intron number 1 from transcript Glyma19g34980.1 (locus Gly ma19g34980) derived from phytozome v7.0 (chr-ID Gm19; pos 42581056 to 42581477)
ttctttctctcaaggaacagatcgaacgggacaaggtttttatgatcctcacccccttttttttttcccgaacttctttgatggtgtatgatatagggtagtgggaagattgaatttttttctggtttttgaatggggtttgttaagaaacctctcttgaactaagtttttgtgattatgtccttttcaggaaaccagggctaaattgttcacaatgtattgaatttttattttttttaaatactgcatatgatatccgagggttatatctcataggataatggcatcattggttaataaaatgatttctacttatgtacctacaggtcctacagaatacctatttttacattttactagtatttttttctttctgattttgaggttaattatgctgtgtaggaggacgaaagcctaaggag

SEQ ID NO: 27567 - DNA, 212 bp, Glycine max
  Intron number 4 from transcript Glyma17g37490.1 (locus Gly ma17g37490) derived from phytozome v7.0 (chr-ID Gm17; pos 41240420 to 41240631)
aaggtaactgtatctgtcagattttcacatcacatttttgtgaatggtttttctattcattaacttatggaatttgttggatataaattatttccttctcttttgattttcaccaaacccttatatcttgttctgcggctgatatccgtgttcatgagttttttaagacagcatatttcaagtcagggatccaccctcttccaggtgctcag

SEQ ID NO: 27568 - DNA, 574 bp, Glycine max
  Intron number 1 from transcript Glyma20g31000.1 (locus Gly ma20g31000) derived from phytozome v7.0 (chr-ID Gm20; pos 39666018 to 39666591)
caagggctccttgcaacaaacccttcttccttcaggtcttctttgcatctcaaactatgcatattgccatttttcttttttggttttttttaatcaacttaagaccgggaaaaaaatgggttctttgaaatttaactttttttttttgaaaataaattcttggctcaaccaatttgaaacttataatttggctccatgaggaattatgttataataactgtattcaagattttgattttttattttattttatttaatgttgctctttataaataattttggacttctagaggttctgaatggatgagactgtggaaatctctttagtctctacccttttcttgcccaaggattattgacttacatctggatttatattgtcagtttatatttttatttcaattgttacgttttggaagtttgaagtgaaatattaccactggggggggggggggggtcaaaatttgcatggttgtgataattagcttgataaagtttgttgtttagcttgtaaagtggaattttgaaattgaagtttctaaatacatgtttttgttggtatttgaagaattca

SEQ ID NO: 27569 - DNA, 940 bp, Glycine max
  Intron number 4 from transcript Glyma18g46510.1 (locus Gly ma18g46510) derived from phytozome v7.0 (chr-ID Gm18; pos 56230374 to 56231313)
gtgctgtatcctatttaaaaattcagttctaatatgatttatatggtaactgtttctttaaggttatgatatgtctacttttactgcaaccttcccttttaatttggcaattcttcactttgtgatttgattcaacgtgacatgtattccttaggatttttgtctgatgtgaaagtatgtcacaacttgtcattctactttaaccgtattttaagtgggtagtgacatagtgttatactcgcttgaaaatggaaggaaagactaatcctttgagagtcctgaggtgctgtaatagttctttatttttccgtgaaagatttttgttatttttctaatcactttatggtaatttgttcccttttcttgacatcaaaagggcaagctatgagatcttgccggcttgccattttgattgcttgtgacatgcatgacaatctataataattttactgatgatccatacaccatagcttgcatgtgtgagagcagtttcatccctttattttgaatttattatgtttaattcatgaaatcttttagccatcttccttttagattttgacccttttgattggtatgaaaaatggagaaattatattttccgtaacgtctagccaacacatttatgctatttttacaattcaggttcaatggtcaactattaaaatgggtgggttcaatggtcaactattaaaatgggtggtgggtagtgacctagtggtattcagttactctgttcaggcctttagggtcgagttatttcttttttatgactttgaaagaacaaattggattaccatcaattccatcaaatacatacatttcagtttgattttattgtttattatatgaggagtggagatctgaagtgatcaataaataatatatatgattctagatcttttgctcctttttcttgacttaatatgtagcttcttcc

SEQ ID NO: 27570 - DNA, 546 bp, Glycine max
  Intron number 3 from transcript Glyma20g38440.1 (locus Gly ma20g38440) derived from phytozome v7.0 (chr-ID Gm20; pos 46033638 to 46034183 reverse strand)
ccctctctaatcactcctcctgaatttgcctccgtgtatgactcatccgtcaccctttctttcttcttcttatttcaaactttaccttttttgctgtctggaatattttttatggtgtttcttttgtgttgacttttgtgtgtgtctgtttcaatgttaattagaactgattttaatagttgacccttttggggaattgattcctgttgtgaaaatgttgtcactgttgttggtgatatcacttcactttgggaaatggttttcaagagaatgttgacttatatattcaggtttattcgatgcactatttataatagccatagtccttttctagtttgtttttatggttggtgagggggctttgatttgggttatgtgaatggtggttgaggagaaaaatatacttggcttatgcattgcggcgttctaatttttttagaaaatattatttgaattgagagttgttcttaaggactgaatttgagtgtacacaatatgtttacatttgcaggggatcaaagatatttgggtcttttgtgagttttc

SEQ ID NO: 27571 - DNA, 866 bp, Glycine max
  Intron number 1 from transcript Glyma20g28210.1 (locus Gly ma20g28210) derived from phytozome v7.0 (chr-ID Gm20; pos 37165632 to 37166497 reverse strand)
tgctaccaagaacttccaaattggtgacactatcagtaagtttgctcactctaattgcatggtgtgtttatgttactatgtaattgtgttggttttgcttcattgttagcagatgagttcaaatcattttgtaaaatggaaaagtcctagccttttgatagttctgcatcctcttcccagaatacaaatcaacactattttgcaattctgtaatacttttttttttactagtaagaggagtacaattcttctaagacagttgtattgttgtctaaaatttattggaaactataaaatcatagatgagactcataaaaatttgtgatttcaaataaatttcagtaatgcccagggtggagaaaactctaattccttcttttcttgtttttgcatcaagtaccccaccattgcacttccatggctagcatttctcttttaaattttgtttctctttattattgagataaactatgtgttcaaggaggtccctacataaaactcctggtttttactcatctatacactattttttttattttgttttcttatgatttttattcttatattagagccttttacacaccagtttcatgactatagttgtaaaccagcatgacccaccacttccacttgcattaactttttgtgctctgcacgagctcttttggatgaagagacaaaacaacatgcaatgagattgttggcctcaccgctgacaattacatagtatatttcataagcattcaaccgaaaaatcattatagagcatggtctttacttaattatgattattagtagtagcaacataacataactcaaattgttggtgatttgtattttgtttttttgtccagtattcgaataca

SEQ ID NO: 27572 - DNA, 897 bp, Glycine max
  Intron number 3 from transcript Glyma18g03790.1 (locus Gly ma18g03790) derived from phytozome v7.0 (chr-ID Gm18; pos 2605465 to 2606361)
gtagtcttttcttccctcgtatacttcaaggtatattcatcttaattttgtcaatgtactacatatgttttcacacttcacgataaattatttgtttgtttatatatatatatatatatatatatatatatatatatatatatataaacacaaaatgcaagcttttaaagcaccactcatacgatcatcacgaacaagattagtatccattaaattaaaagatatttatcatctttaacttaagaaaaaaatatataagtaaataaattttaattaaattcacccctatatttatttaatgaaataaataaattataattttagttcctttttatttttttatatgtaattttggttttcttttttttataattttagtgctcatattttaaaaagttatattttttgtctaatattcaattttttctatttttattttttattttaattaattaaataattttttaataatatcttaaatgaatttgttaaatatataggatttaataggattaaaataaaaacaataaaaaatatacaaatttgtcaattaaatcaaagttacagattttctgaaaagaagaaactataacaaaaaaacagaaaaatcaaaatcacagattaaaaactaaaggataaccaaaattgtaatttaacaaaaaaatcttaaaatactctttagtagagattttaatttcaataatttttttctattcttgatatcaaaatgaaagaaatcttaaaaatattttttgcagatatgattaatagaattaacttagttaacaattaacatgatttttcccctaatattcaaaactagaaagaatatattgttgccatggaaaaataagccccatttcttgttgtgtctagcagggattaagcctcttgacc

SEQ ID NO: 27573 - DNA, 496 bp, Glycine max
  Intron number 1 from transcript Glyma18g03140.1 (locus Gly ma18g03140) derived from phytozome v7.0 (chr-ID Gm18; pos 2068589 to 2069084 reverse strand)
atattatcgtcgaggaagaggtaggcatcagactcttcatttttcttaattttttttttgcttccaattgatatataagggaatgatagttttgaaatatgttttctttttttgtaattaagggaaattgttttgctacagtatccttaagatgctgcggccagtgatgttttatgtggttgccaattttaacagcatcaattcattatatctacaaatacagaatgcaactgaaattcttaccctagtactacggtttgttatgttcttgtcacagactgtgtcagttatatttcagaaggctgcatctggagtgggaatagatcccagttcttcaatttttgtaagagccatttacactcttttgtatatttcctatggaaagaattgttagcaatggcaccagatacttgctctgaaacttaatcatttgacctgacattacattgtttgattttcagattgaaacaggttccaaagttgaactgcctttttg

SEQ ID NO: 27574 - DNA, 715 bp, Glycine max
  Intron number 3 from transcript Glyma18g53350.1 (locus Gly ma18g53350) derived from phytozome v7.0 (chr-ID Gm18; pos 61613788 to 61614502)
gtcgagtgaagaacttacgcttggttagggacattggtattattctttaatgtatcttaactcttaacccttctttgattgtcagtttctgccaattatcccccctccctgctctatgtggacctattttacatcttcaaattgtgtgcttttgtaaaacatacaagtgacatttctttttgagcgtgtagatcagtatgattgagtacttgctcattcctcactttgataatgctctgcattggattgtactttcttgtatttaagccattctacgaactatggaatataatagtctctcaggaatctagatactgctgtttttgtactgtttcactgcgatgattcattttccattttatggagataatatgctgctcgcaaatttatacatgcctgggtgggaacaatgtttcttttaggaagttgtttttatatggtttacccaaatactggaaaaggatccttaccatgtctctttaaatattcatttacctacagatatagcatttcccattgggctttttgtactgcttcttgtatagccaaatttttgtgtcaaaccccttctaatggtttggtgattttatgcgtttgttcccttgagtgatatgttcatagttactctatagtcatattgttgtcaaactgcatgatttaagttcttacattggatttatttattttttgtcagtgacgggagcttctcgtggtt

SEQ ID NO: 27575 - DNA, 200 bp, Glycine max
  Intron number 1 from transcript Glyma19g40420.1 (locus Gly ma19g40420) derived from phytozome v7.0 (chr-ID Gm19; pos 46834070 to 46834269)
gcaggccaaagggtgtgaccttccaaggtactctcaatttcaatcttttggaactttttttttataattaatttgtcaattatttttttgaatttcttaatttagtgtttcctgctttgtttttctactgatgcagtatttaggaagaaaatgatttctttttgggtactgtgtttgtttttttttttggcaaaggttca

SEQ ID NO: 27576 - DNA, 601 bp, Glycine max
  Intron number 2 from transcript Glyma17g34460.1 (locus Gly ma17g34460) derived from phytozome v7.0 (chr-ID Gm17; pos 38422641 to 38423241)
ttttctacaagctccacaaggacagagttagttttttcattagtatttattgtgtttttggtctctgtcaatacaaattttgttgctcacttgtgtattcaatcaatactatttgtgattgtggtgcctctcttttgaaaaaggcaaaaattgtgtattattattaataaaaactggtcattaacactaggagtgtaaataaccagaaacaggttacaaccagtggatccaataatagtggatagagtttacatttcaaagcatcccacacaaacttcccatgcatgttgtgtgtttgtttttccattgaacactaaccaaacagaagttgttgcttctcacaaaacggtgctttagaacgtgtgtccatggaatgaaacggtaaaccaaatgttgcctccaaattttccacacagcagcaaaccagaagacaacctgccagatttttgccttttgatatgtcacttacctagtttttaagtttctctctctctctctctcttcttttattttaatgatcttctaggcatttgttatgtgtaatttgactttagtgataataccttcagttttttaaagatcggcactacttggataagga

SEQ ID NO: 27577 - DNA, 858 bp, Glycine max
  Intron number 1 from transcript Glyma20g39110.1 (locus Gly ma20g39110) derived from phytozome v7.0 (chr-ID Gm20; pos 46544268 to 46545125 reverse strand)
tcttcccaggattttgttgcttggttcttccgctggtatccttcactctcagatctatcacttttcttgtctcaatctttttactgtttaacatcatcccatccgctttttttacctacaaatctctcaagtatcattaaattactagagtattcttttaaattttgtctgtgaaaaaaggtctttttttttttatttatttctaacaaaaattgtctctcttttttaataatctttgaactggccttattgtttcagtatatcaaatgtctgaattgcttgattagctcctggccgccatggttcataaacaaattttgagctttctgtctccctgattacattttggttattccggccagccttatgtcaaatttaaaggatgccttagttactagttgcattgctgataagtttagtttgagagttttaatcttaatgccttccaagtttgaaagttgtttcatgtttggataaacactccatgtgaattaaaaattgcaatgacagctctatctactgtcaggttttaaccttgtaggagttgaaaggaagtatatatcttttgttcttggattcgatatagactgatttgcagatcaacttgtttcccattttgagtgttgaaatgatatccaactaattatgcaggcttgagtttacatggacttgtggtgttaatccacatgcttcttgtctgtgatagtttcccccagttcattcacgagctgctttaggagatgtagtaattcgcaccatgtgttgcatcaatgttcaagcctgaaagagttgtcatatatttgagttatttcttttattacaggtgcacctatagcagggtctgccgttgatcagatt

SEQ ID NO: 27578 - DNA, 403 bp, Glycine max
  Intron number 2 from transcript Glyma17g33470.1 (locus Gly ma17g33470) derived from phytozome v7.0 (chr-ID Gm17; pos 37371667 to 37372069)
gccaagaggcagcttggagaatcaactcttccgaagtaagtttcttttcactcttctacttgtcctcctttatttttctcattctttcctcaaaatgggtaggactgtacatgaagttcataaggtcatttattgctgtatttctgattatatcaatggtaatcactcaaagtcaaacatgattacaagatcaagctgaataatgattatcaaatgatttagaattttggatgttctgttctatatggtcaagcacacctaattgtttcaaatctctctttttttttttggatactgatgagtgattacaaaaattactaactgaaaaaattggattcttagcttaaacaaagccttaataacagcttcttttgttctaatacaaacaggatactctgctgcc

SEQ ID NO: 27579 - DNA, 935 bp, Glycine max
  Intron number 1 from transcript Glyma17g31050.1 (locus Gly ma17g31050) derived from phytozome v7.0 (chr-ID Gm17; pos 34187450 to 34188384 reverse strand)
ccaacccattcggttcactccctgcaacatcgaaggtacgcttctcatatgaactcataccctgaaagaaattgtttgcacgctttttcaactctccaaattggttcagtcttcactgtttttcctcattatttagttcactgttgttctgtaaacctttcccttgtttaattaacagtgtatcactcgattctttaggatccgttttgttgagtggaagaaaaataatttacttttttatctgtgccatgctttttggggttggttaatttgtttatagaaatagacatttttcccttatttttctgtatagagaaattataaagcaaaatgcgtttaaatcccagtgttgtgcaaaaatgaaaagaaaaacaaaaaccttggtttctcaaatctctacatttagatcacattgtaatttggtgttagacttgtgaaatctatgtctaaaatgaaattcattcatttctggttttgtaatccatattggtcattacaacttttaaattcgtctgcaactgttcagattcattactatgaactgacttttgttcatcatgtttttattcgtcacctcgcctcccctattgaatttcaaaatgaaaattatgaaattgtgcgtggttatctcaatctgggtggttgtgctaatatgtaaggaagtgcagaaattgttaaatatttgggaaataaaaattatgatctgggtttgattcttacttccatacacataaaaaaaaatacatgtgttgagctaatcttcctatttaaagtcactgttagcggatgcaatgccttatctgaactggttttctagtgtaccatgtataactttcttttcattttaattgaactaaaaaagaactgcggttgatcatgttgaacaattgttgggtttatgatagtgatttgtttgtcttttgctagagtaaaga

SEQ ID NO: 27580 - DNA, 495 bp, Glycine max
  Intron number 2 from transcript Glyma18g46220.1 (locus Gly ma18g46220) derived from phytozome v7.0 (chr-ID Gm18; pos 55977290 to 55977784 reverse strand)
ccaaaggcagattcccaagaaaatcacttggccaggtttccatctttttctgagaaattttgggatgacccattgtgttgcagtgctccaaaattcatttttttcttcgtttctgaggtatttttatggaaattgtaaggagtgcttcgttggggtgtttcatcgaacagagggtgggtgggttcatggggtgcttggtttgacctgaattttgagctgtagcactttaaaatccaattttgtctatgttgcgtttttggaatgattttgggggaaacttttgaatacttcttttgggtctgttatcgaacagacggtgtgtgtgattggctgctatggtatgatctggattttgtgttttagctcaccaaaatctgattttatgttttggttttcttgtttggactcagaaattgttttggggggcttggtgtgaactgaatctgcttctgaagtttttgctgatttggttgttgatgtaatttgtagcattat

SEQ ID NO: 27581 - DNA, 977 bp, Glycine max
  Intron number 1 from transcript Glyma20g31850.2 (locus Gly ma20g31850) derived from phytozome v7.0 (chr-ID Gm20; pos 40457075 to 40458051)
tcgaattggcgtgtgcctcttgcaatcccccaaaggtattattattcccataattaatgcttttattttttttccattttttatttttaaatttccccattatttttgcgttgctcgtgctcggcttgttcattctctgtttctgcactgaggcaatttggatcaaattttatcatctttagtttgggtgattcgccccctactttttttcccctctttgtattttttaaaatattttttctttttttttgaaggtacggttgtcggaaattttttatttttttcatcgtttttgaataaataggcgaatttatgagatgggtttgggtttttatgcttaatttttcgattttgtgcaaacttttaaaatgggttgtggtggagaggtcgaatccagaatttttcattgggttttgccttgagttgactttttggggatgcagaagataactgataaatctgatgataggaccactgggggttgtgaatcaatgcaagttgggaagtgggaatgctcaagttgcataaatatgtagtcatgaattgatatttgatatttagtgtagcctttttttttattgaatcacaaagggcgagggataattcggatccaaggtgcaaatcttgataaatttagagttattttctgtttctggactgcaaaaatcatgaaaaaaaaattatttgatgttgatccatccatgatatcatatcgattcagtgttgtattaggttttgaatactgatatgaacttcttgggtttgtgtgcatatttttggtttgatctattagataaatttagtctgattttaaaggtttttgaccctttagtcttaaggttttgtttaattttgtttgtcagaattctgagaattgaacttactgaatcctccacagtttgtctcttaacccaaaattccataaagtattcttatgtatcccttccctccatttgcaggttttttgaagcagaaga

SEQ ID NO: 27582 - DNA, 983 bp, Glycine max
  Intron number 2 from transcript Glyma18g02480.1 (locus Gly ma18g02480) derived from phytozome v7.0 (chr-ID Gm18; pos 1570242 to 1571224)
tgcaattctcgcccaataagctttttgtggaggaggtatcgcttctacgcattttcctgtttcttttcaagtgttcaatttcattttattgattatttatttattttccaatgttctgcatccaacagacattaaaggtttttcttttacgttcggctagcacttagggcaccggttcaaaagtgttcaatacgccccttatcatcaaatattttaattacttaaaaaaaaggattaagtgatttttatgtttttggatatatggtgtgtttaagaggagcttatcagcttatggaagtgcttatgacattcttataaacttattttagctcattttgtaagtttcacacagaagtttaacaaaataagttcatgttaggttatttcaagaaggttcatagtcaagtttatgaatgagttcttatgtgataagagtatatcaaataaaggtttgtttggaagaatttatttacaacttaattagacttattttatgaaaaacacttgtgcaagtgtttgggagagcttaataaaatagcttatgatacgtcagtgaaatgcttttagcttatttcaataagctctctaggatgacttgggaaaatagtgtacaacttttatgaaaacaatttaacccaatatcctcttcaatagtagaaacaacttatacatagttgcttatatgataagcacttattcaatatgcccttgattaagatgtttacctaaatgtgccctaagtacataatattcataagctcttgtttgatacgagtttatcctatatgtacttaattaaattcttttatcaataactactttttacttttgttttcttagtgcatgtctttttactttcgttttcttagcacatgtctttttactttcaattacagaattttgttggagcagtgattttatcgatgtaaagtgattgtaactcttcttatttggtgtttccttccaggctattggggctgaat

SEQ ID NO: 27583 - DNA, 894 bp, Glycine max; identical to SEQ ID NO: 26962
  Intron number 1 from transcript Glyma17g17430.4 (locus Gly ma17g17430) derived from phytozome v7.0 (chr-ID Gm17; pos 14253526 to 14254419 reverse strand)

SEQ ID NO: 27584 - DNA, 878 bp, Glycine max
  Intron number 1 from transcript Glyma18g16750.1 (locus Gly ma18g16750) derived from phytozome v7.0 (chr-ID Gm18; pos 17398573 to 17399450)
ttttgcaggtatgactattttgggtatgggcaaccatcagggaaggtttgtctttatatgaaatgtttgttcgtgttgaatcatgattcgtcatgcttaattttggatagtggtagagttgtaaacatacatgctaatgaacattgttttgcctgaactgtagccaagtgagcagaatacatgttcaaacattgaggctacatacaagtgtctagaagagagttatggtgccaaacaggaagacataatcctttatggataatctgttggcagtggcccaactttggatcttgcagctaggttgccttaattaagagttgttgttctacactgttctatactctctggcttaaggatcagaatatttttactctaattatatattttaatcatattgctttctgcattgtccaatacattttaatgaaaaaaatattttgatgataattatttaattatttcttaatcaataacatacatttgtttttctttttatagtttaaagattcatatatattttcaatccattttcctccactatacaagggatgctgatctccctattttttaatcataagaaaaaggatcaacaaaaaaagcttgtcactttagttgaatttgaggtgtgagcattcctcaacatttgattttcaagtgcagagagtttgacgaatcaatatcttggtaaatgttgctgtgaaaatgtcatcattcccataaaagatcaccatgaatattttgacataatgttatacttttttctattttcataaagtaatcaactttagtaatgtaaacccccatgtttgacatgataacaaatttataaatgtcatgattttcttaatatttggctggaaggcataggtgggttgaat

SEQ ID NO: 27585 - DNA, 731 bp, Glycine max
  Intron number 1 from transcript Glyma17g12400.1 (locus Gly ma17g12400) derived from phytozome v7.0 (chr-ID Gm17; pos 9372820 to 9373550 reverse strand)
cagcgcttccgattaccctttgatcactcaaggtaccctctttgtctttcttgatcagtcagtgttttttttttgttggtttctgtgtgtgttttagggaaattttgttgatttcttatttgttttttctctctctcagttttgtgttaattgatttgaattctgctgtttttgttttggattgtatttctgagatgtgatgtgagaaccaaatgtgtgtgtatcttgttggtagtagattttggtccgagataaatttggagagtttctgaattttaaattggtctgatctggtcccaactttgtccaagttgttccaattgttggcttgctcatcaatgagttgtttgtttttgtcagcagacaggcttgttcctctttctctctctttcgttgtagcccggggtggtgggggaggaggaataccaggtttcagataaaagtaaaattgcttctaactccactaatttctgcactgatgtttttttttatgttttgaagagtaaccactaaccaccatgccatgtatattggacgcatgataatattcatataaaataaataaatttctgttgtggatattatgatggtttgctagttaaatatacttaaaatctgtaatttgttgaaactgtgaactgtgaattgtgttgccctgttttcacaatcacctgctacatctcttttgctcaacagatctgctgcatacactgtcatcaattccaagacac

SEQ ID NO: 27586 - DNA, 790 bp, Glycine max
  Intron number 1 from transcript Glyma19g34790.1 (locus Gly ma19g34790) derived from phytozome v7.0 (chr-ID Gm19; pos 42374603 to 42375392 reverse strand)
tcgcatatctccccgtctttcgtcaaacttatgtcagttttcttctttttttttgttggcacgtggttttgattgcttcaggaatatatattatatatagccataacgggattacttgtttgttactcttgtctttttactctctattatgttgtctttttcattatttgtttttgacactcgcttgatttttattgttatgtgttgcttctggatattgtttgcataaatatccgatgcaaaattagatttctcgtggagttaggaatttgtgaaacactatcttagtagtccctgaaattagaaaaatgtcaaatcaatttttgaaattgaaatttgttagtcatgttaatcctccctgtatttagctttgttaaggactatgataataataataagttacaagatttagaaactacaataataatttggacatttcagagatctgaatgacagtgatttcaattttagggatttatttgatatttttctaattcagggactacataacaacacctcgcatattcagggagtattgattaaaatggagtttactcatttctcaggtgtcactggggattttatcttttacagaatattgattttgaaatgtttaactgtattgggcttcatgttctcacttattttccacacttctatttctacattttattatgcaataccttctatttgtacattttactgtgatagattcttttgcatccttctctttcacatttatttgaatcctacatcctcccttattgatggcagtgtttgaaaggaaggg

SEQ ID NO: 27587 - DNA, 693 bp, Glycine max
  Intron number 2 from transcript Glyma17g08710.1 (locus Gly ma17g08710) derived from phytozome v7.0 (chr-ID Gm17; pos 6423674 to 6424366 reverse strand)
cgtcgtttaggaccaatccctcaccctccaaggatgtacgctactattttgttcttccagccttttcccacttttaaaattctcacttaactcgaatggttctgatgtagactttcattttgtttagggtttttaggactttataattctcatgattttgtgggtttttgtataatttgctttaatcttccagtgttccatgtttctggattaggatcatgattttactgttctctagtggcttgattagggtgttatattacgtaagcacttagatactgttacaaatttgctatatagtcctcacacttgatacttggtaaatgtgaagtttcattccagtttatctcttcaccctacatttgtgttttcccctccatttgtaggtcctgatctgactctttgcaattgttttcaccctatattatgatttcaacacactgagtgtgttttttgctgcttcttaagagagatttttttgtaaaaaaaaaaaaaactattattttttaaaaggattttgttttgtcctttttctgacatactatatgttatgcaattcttttgttaatttgagatgggggtggggcatagcagggtggcaagctgaaatatttctcttgctttccacaaccaagatttatccatcattaatgatttttttgtctttacattaatgtaaatttaaaattccag

SEQ ID NO: 27588 - DNA, 884 bp, Glycine max
  Intron number 1 from transcript Glyma17g38040.1 (locus Gly ma17g38040) derived from phytozome v7.0 (chr-ID Gm17; pos 41744138 to 41745021)
caccaattttggattgtccgtcttcattgaagaaggtcatcattttacgcgcttttgcattcattcattcctttatttaatctatttaatgcctatgcactcacatcacattctctagatttaagttctaattgcttattctttttcttttttcattttctcctttagtaaaaaagattcaaaacgttgccgtctaatttcaaatttgttggattccaactttagattaattaaacattgtactaaaaagaatgataataatgtatagtatagtaaaagaaaacaaggtagcttcagcatcagatgacttaattagcttgcttgccaattgttattatggagtcaaacgagtaaacgatttcccattataaaaatgagcaatagaggaaaagcagagacaagaagccaagtcacatgtggctactaacataaatcatatgattcaaaattgcactggtagaagtgatatttttatatttaaataaactaataatattttgacacctcttcgttcaaaacatctcattcacacctatcatttttttgtatttttgttttcttattgcattttattatctatcatttggacactcagatcaagttaacactcttcatttctatctatttatattttcgtgacacattttactacttcactttccatttctctcttgatatctacaatctacacccctcaggtgaccaatgagatggggaaaaatcgctattatgtttttgtttcttttggaaactagctaattttgtcacagaagcaaaatttgtacattttttagattgtgtgtgaaaatttattagttgtattgtactaaataagatccaattcaacaggtaaagtgtataaagaaattgttggaagtgcatac

SEQ ID NO: 27589 - DNA, 688 bp, Glycine max
  Intron number 1 from transcript Glyma19g30910.1 (locus Gly ma19g30910) derived from phytozome v7.0 (chr-ID Gm19; pos 38606592 to 38607279)
accaccttcgcactcttctcccttgtaattccaaggtatacacacatgaggacctaattgttagataactttatctcttataattattatagttaagaatttaattgtaacatatgtaattctaagttaggaatttaagtatcctagattgaaataaaaaagtacaaagttgcacactcatgcatatgtatgtgtgcaatatttgtttcattattaattaattcttactttggttttgagcaattgtctccttttcttactagccagttgtttttgaatgaaaaagagtgattccttcttttgatctcaaaggttgcatactttttgaccaacaaagttaaatgtgtgtcttctagttgactatagactttaattgtcatggaatatgtacatacagcagaatgagctagctagattaatttctaggaataactcataaaatccaaagttttaaacgagattcggattcgtattcatttcatgtttccataaagaaacccccagcttgattggtaaagacattcacgcataattgaatttgggaaagtgagtttgcttttacaaagataagttatattaataataccatacattatattacaatatatagtagtattaatttcacatggttgttgttttatttttggtttcagacagacaaggcttcgcttctggcgaaggttgtcca

SEQ ID NO: 27590 - DNA, 660 bp, Glycine max
  Intron number 3 from transcript Glyma20g35440.1 (locus Gly ma20g35440) derived from phytozome v7.0 (chr-ID Gm20; pos 43711692 to 43712351)
gctacatatcagctagtgaggtatacattttatttttcttttcggtggctttagttttctttctttgatgtcaacgtcatttctaatattcattaacatacaaaaaaattgataaagtcagggtttctgctaacgtgaacaatgcaggtagggccaacaggccagtatatgttgcaaattagtttacagctattttttctttttcttgaaagtgtcagagctctagccacttttctttttaccttaataacataacgaacgcaatttgcaattatatatcagtagttaaagctcatgacatttttttaccaaataattatttacagagttttttattttccacattttaaaattatttaattttaagtattatttagacttaggcatccaaaattttgcaatttttatatgtaaaaattaacaactaggacagtagaccgtacatttccgcatgcaatgaatattattagctgcttgattagaaaatgcattgggtttgtttgacatttgagtgctgtagagaatcttacgtttatctttctctctctacgtatataagtgtatagagacacttacatacacatagctacctctactagtggtatagtatatgatagtaaaattaatatatgtttctgctgtgtgcagttgagacacgta

SEQ ID NO: 27591 - DNA, 908 bp, Glycine max
  Intron number 1 from transcript Glyma17g37880.1 (locus Gly ma17g37880) derived from phytozome v7.0 (chr-ID Gm17; pos 41612025 to 41612932 reverse strand)
agggcacgtggcgacgccttgatcgaatcgattaaggtttgttgagccgtttcgattttgcgttcgtgcgcaactctctctgcatgttgtttcttgcataaatctgccaccccttttgcgattaggttaaaataggaccaaacgctaccgtttagatgtgttttgatcgaaccctagagccgagatttggccttgttgtgagcatagatctgttgctcccgagtcttttactgaaaacctataaattgtttagggttttcttttgggtaattagtaaacagatgttatttggtgagaccgagaaaagggtttcgtttttttataaggattttaaaatgcatgcggttctttcctatcgctaacaattgtttttaatatttagtgggtctttttcacctatgtgattataattgccaaaaaatcgaaacgctttttctaaaactaatagtctctgttatttaaatggtgaattcaaatcttggatcggttttttgtataaagatcactgcatgttgtgattacagtaggttataatctgaggtataaagatgtgagatcatatgaaactcgggcatctagattagtgggtgattgggtaatcttcgattctcattccatttgtagaagtaactctgagcttttttactattgtgtggcatggtgattgctactgtcttataaatttaagagatattaaatgaaatatgaataattattgttcttacaattgttgaaaagattgttcttgactaccaaaagattcgtaaagagatatgaattagttcttgttcttgaattgcatggtgaagcaagattgaaatgcttgcatagcatgtttgtttctttggacttcttccctatcctctatttgaaaatgttattctggtgctctaaagctccgagaggag

SEQ ID NO: 27592 - DNA, 877 bp, Glycine max
  Intron number 1 from transcript Glyma18g48400.1 (locus Gly ma18g48400) derived from phytozome v7.0 (chr-ID Gm18; pos 57822355 to 57823231)
ccctctttgtcctgttattttcttctgaaaaaaaaggttagttttcatctgggttttcttctttaagcccgatttttcatcttttgttttatgtttttaaatttagtttctgggtttgttgggaatggtgtatgatgttttgtgttgttttgggattattaggcatactttttgtgctgtgcttgctttgaattctctattaagatttaattgatggtgttttatctgattaagggtgtggttggataaataacataattgaacgcttattgaataggctttaggttgttatcatgtaagcctgtatataagttgtttttataattaaagaggaaataaggttaaattgtttttaatgtaagttttaagttgtttctgaactgttctagagatttattgaaataagttgaataagctgttttcataagatctttgaaatactacttggttatgtcataagataagtttaaggttatgtttgaataaacttttctataaacatttgtaagagaataaaataagaaggaaaaatgaattgaatttcttgaataaattaaaatgaacttatatactgaaattttattaaagtttagatgattttaacttatgggagaagctcaatccattataccttcttttttcttttcttataagtgcttatggagaagtttatccaaacatgacttaaataaactgcaaataagctcttccaaatgcacctgagttttaaattgagctagtttaaaaactgtcatatgatataaaatgtatgatcatatcatgttttcatgaatatattataccttgattgtctaacatactggtgggtggtatgatgcttagggcttacagttattgactaggacttttagcaagc

SEQ ID NO: 27593 - DNA, 817 bp, Glycine max
  Intron number 4 from transcript Glyma18g48400.1 (locus Gly ma18g48400) derived from phytozome v7.0 (chr-ID Gm18; pos 57824096 to 57824912)
aggtatgaatgctaatacatgtattctttctggaaatggtgttagttgttatttcgtacatgcttttattgtttggctatttatttatcagcattattttgtcattttttctgttttgcattattttctcaggtaatatatgcatacttatgtatgtatgtatgttttttcttctgttgtctatttctatataagatgacatggtgaaattgaaacaccgtgtagtgaagatggatctacatgcagtgaaacatattgatcaatgcttgacttaatttgaccttatcaagatgggatttgaacaagttcctgttttgtcatctgctatacctataatgtctttggtctcaaaactacttgtaatgtgcttagagaaaagatttccttaacctgaatcagttacagtaaaaacagcattaagtaatgaatttatgtctgtggtggtgccttctgttttcatttatgtctgtaaatagtaatatggtttttgacttgcaataacttcttgagaaagagcagagcctatgctgattttatgtgatggcatttccagttttgcacattcttttagatttgaagggtcttattaatccattttatcatataacttctcttcaagatttttcatttgtaatcactttcaattacagggatttcatccttgtccataattagaggtgaaaccatttgagttttacaacagttattttattgaaaagatcacatgtctgtatacagatggtcactctgaattgagacttcatacctttttaattaaacaggttagcatcacgccattctaaggcagcttctagtg

SEQ ID NO: 27594 - DNA, 619 bp, Glycine max
  Intron number 2 from transcript Glyma19g01590.1 (locus Gly ma19g01590) derived from phytozome v7.0 (chr-ID Gm19; pos 1208718 to 1209336)
aagatctcaagacagtggtatgttgactatgttcactcatacaacaattttcctttctattttgttttgtatcactttgatatctaaacaccctagcttattgtaaaattgctttttaaatttgtcattatccgtgcgatttctttattttttaaagataggtccaatctagccagcttgtttaatttggtaaattctattgatgtttgtttcttcaaaaaaaaaaaagaaaagaaaagaaattagctgacaacgtcatgtgctttcagctttctattcctgtactatatatgtaccatcgaaaatgcttaatattaaaatatcttacacagaggaaactttaagtagaaagcaatgtgtaaagaacaaagtgaaaaatgtagggatatagttaaaaatgtagcacattatttatttatttttaacttttcatgactttcactcctttgttaacaaggacaatctctacatgagatagatatggaagatatcttagaccaatcaaagatatacattcaatatttagtaaacagactacatctcaaatgtagaagctgttgatgcatgaatgtgttgacattagcatacataaattttgttgttaaaaacggctagaaat

SEQ ID NO: 27595 - DNA, 886 bp, Glycine max
  Intron number 1 from transcript Glyma18g08850.1 (locus Gly ma18g08850) derived from phytozome v7.0 (chr-ID Gm18; pos 7603534 to 7604419)
gcaatttcaaggtacctttcttcttcttcttcttcatctctgacctctctctcttctctcacacttcagttcttcctcctcagtgttcccaccgccccagcctttgctccagcccctcttttttgagtcatccagaatcaacaccagcgtttttactcagagtatgctataaagtctcaatctttctgttggaaacttccttttcttctatcaattgggatacccatttggccttttggcagattgttgcctcaggagtagccataggcccagtttttctctgcctgtaggatttttaaggctctggatcagttttcctgtagggtttctctctgatctgtttggagacacagatattagtttgaggtttttgtggctgcggtcaactttggagcttttacagtttcaggagatgatcatgtctctctggaggcttgtgagattgagaaaaaaagggtcaagttagccatccttagatggtgtttttttttttctgatttcaaagcccttaattttttagggaattttgtctgtttttgtttgatataattttgaagggcatggatgtttaattagggtttctgacgttttccccacatgaaaaagtacttggcttttgatgattctggttagttttatgcagcagacatctttgtgttaacctgagtagggttcttcttaggagtgaggaaactgaggttgttcaaaaggttgtttgtgtgttaggatgatgatatgctaaaagattcttgctttatgactatggatttgtctgattgtccttttggactagtgagtccaaagggtctgcaccctttgccattgctttgaaatcaagtgcatatctgctggtgttctgttaactcctgttggtattctctttaag

SEQ ID NO: 27596 - DNA, 968 bp, Glycine max
  Intron number 1 from transcript Glyma20g38330.1 (locus Gly ma20g38330) derived from phytozome v7.0 (chr-ID Gm20; pos 45950752 to 45951719)
ttattactgtatgaattattctccttttcaatgccaatagttgttgtatgaaatggggtcatatgatgatgagtgctaagtgtttgctgaaatggttccgttaacctttctggtagtttgtttttctttaagtaaacatcatttgcccagatagactggacatcaatatttattgtcaaggttttaaattaatgtcacggttgtagttttgtcgcaatcattgacattgtagaaaattgtgggcttataactattcagttaaattctttcccgcatgtttcaagatattaatggtcatccaaaatttttccaaaatctttgagggcttagaattattcagttaaattcttaccctcatgttccaagatattaatggtgatctaaaatttgtccaaaatctcactcttccttgttgtaaatatttatgttgaatgaaagattgaaataattaacattgttaattatgtagtttcccaaaactatttattttgggggtgaacatttcaatgttctgtcatcaaagattttatatactattatatcttttaggctacatgtgtggtatcctctttaatatgttattgcccatgtgtggcaatttttgtgtgcagaaaatgattttagaaccaattatctcttttcagggtctaaagatacgctgaagacttattatttgaaaagcccataactgtcaatttaatagacctaatttttttatcagatcttataaatgagtccctgatcaagttagtaacctatttttttcaaacaaatcagcaatctctttataaatgatcaataataagatatttaacatctttggttgctattgaaattgaagattattcattacactatggttctgtctcatcaatgcacatcttgtttcttgctattttcaatgtttttttctcttcaaatgccattgcataggcacctgtaaggcaacagcaaaattccgagccctt

SEQ ID NO: 27597 - DNA, 883 bp, Glycine max; identical to SEQ ID NO: 26727
  Intron number 1 from transcript Glyma19g41320.1 (locus Gly ma19g41320) derived from phytozome v7.0 (chr-ID Gm19; pos 47625628 to 47626510 reverse strand)

SEQ ID NO: 27598 - DNA, 550 bp, Glycine max
  Intron number 2 from transcript Glyma17g06970.1 (locus Gly ma17g06970) derived from phytozome v7.0 (chr-ID Gm17; pos 5026293 to 5026842)
aaagaggtaaattgaattaatcaatgaatggttagtgtaagcattgtgaactatgaaaaacagctgaacaggtttcaatcaatcatgtgctttttcatgttttttgctgctaattatgtatgcacagcttgttttgttgtttctaagagtatttagttttcttactttcatttagagaagaacatgggtgaatattattaaggacatttttgtagttttcttactttcatttagagaagaacatgggtgaatattattaaggacatttttgtttagatgggagaggagggaggagtggccgaagagcaatactcaaactttatttcatttggactgcttgttttattttattttaattcaggaactttgtaataagaaaacccctgaaatgatttgatttctgttcaccggttcatcctcagatgttgttggtcaacatatatgagaatgcaatttagtttttattatttgttgttgttgcttaagtgcatgcatgttctctcactttttgacagactgaacggccagaatctttaaccattagtccctc

SEQ ID NO: 27599 - DNA, 576 bp, Glycine max
  Intron number 6 from transcript Glyma20g35900.1 (locus Gly ma20g35900) derived from phytozome v7.0 (chr-ID Gm20; pos 44087547 to 44088122 reverse strand)
gtcatcagccaaaagtatcagaaggtgagtaataagattattcagcacatgtcaacatattccttgtataacttgctccataatcttattttacatccaacaacaaaaatacatttgatcaaaataattccaattggagacacaagtcagttaatcttgtttctgctttgtgtgtatgtgattttgtggttccatggactctgttgtctttagttattagtatttaatttttttttttttttgttctttgttctttgtcttgtcttggtcattgcatatgcagtaaataattcttcacagttctgtgttcatgtctattgatcataatttggaatggatatttcatcttcttattaacagaataatacaaaatttcttgtaatttttttcatctgttggttatatattgtggtagctgatagactagaaacagatttttattgtcttatatgctgtgtgtttctaatgatgttgcttcatcgacacctttatgtatattgttcctactgggaagtttgaacttttggttaattactaacagaaagcagacgggcttctgttgatatcttcttaaag

SEQ ID NO: 27600 - DNA, 532 bp, Glycine max
  Intron number 2 from transcript Glyma20g35900.1 (locus Gly ma20g35900) derived from phytozome v7.0 (chr-ID Gm20; pos 44088926 to 44089457 reverse strand)
gacctgacaagtgaactgccagagcaaacgacaaggttagttggataaatctttggtgcttatttttaattatgtgttaagattatggaatgaggaaaataaataaagaaataagaatcattaatgctgctgaaaatggccaaataaaaaataaaggaaaaattaatgctgcggaataaagtttatgccaagtttaaaataacatggagagttcttgtacaacttaaaatgtaatgttgccctcgagtaacctactaccactcctttgttggttgacatttaattactcatgttgatggtttttctactgttaatttccctgtaaattgtgagtgttctctaaactttttgaactttgattgatgaatagtcatctttgtttctggagtgtatttgtggaactgttatccccataaatctgtgaagcttgatgtcagagacaatagaaactcgttgtgtgcacataaacacaatactcttggtgggtgattcactgtgtcttctttgtatcatcaggtatagtactcaggac

SEQ ID NO: 27601 - DNA, 214 bp, Glycine max
  Intron number 2 from transcript Glyma18g10850.1 (locus Gly ma18g10850) derived from phytozome v7.0 (chr-ID Gm18; pos 9695534 to 9695747)
tttctgtttcaggttcgtgtgatttttattggggtactttgttttgaggttgtgggtgttagtttatatataagttgaaaagaaaaaagtgatgactgctgaaagggtgctagtgtttgtgtttctgcattgtcctttgtgtgttctcatctatttgcttctttttttttcactgttaggagctccggtgattcttcaatctgggattccgttg

SEQ ID NO: 27602 - DNA, 469 bp, Glycine max
  Intron number 1 from transcript Glyma18g10080.1 (locus Gly ma18g10080) derived from phytozome v7.0 (chr-ID Gm18; pos 8886794 to 8887262)
ccaacaattcccaagcacaggtaccctctccatccctttttctctttccattaacaaacaaaatgaagcttaagcctctaaatttaagaaaagaaatttcttttacataccttgaaagtaagattctaatatttaaatacatatatatgaaatatattatgtcatgagaattattcttacaaaaatattaaatattaaacatacaattatgcataaatagtcatgattaattttagtcaattttaaatttttgatcttgactatttctgtatagtttattctataatcaacattagaaaatttcatgacaacacattagtgacttaatattatagtcgatctctagctaatcatacatgttttcctttaaaaaaaaaaaaaatctaatcatacacgtcaatacgtgtacatagaatgatcacatgttgtgcaaacattaattttggtatgtgatatgtgcaggccatac

SEQ ID NO: 27603 - DNA, 763 bp, Glycine max
  Intron number 1 from transcript Glyma19g01100.1 (locus Gly ma19g01100) derived from phytozome v7.0 (chr-ID Gm19; pos 776581 to 777343 reverse strand)
agtttttggcttatattcttcggagagtactaaaggtaacagtagcatagcacccccattcattgtctctattgtgctattgttttgcttttcttttctttggttcctgtatttaatgttaatgccttcaatcacacacatgacacacacccttttgtgtatatgctcttaatctcaatcaggttttgtttggtgttgcattttccttgctttctgctatttccaacaaaagttttttttttttttgtttcttgattgtgttccttgtttcattcacattgctttttttgttgtcttgagtttgatcactgacaatgatggactttcagaaaacgttttttgtgttgtgttgtgaattgtacataaggagcatctgggaagaagcaatgtcacgcaattaaatcgtccagatggaatatttttatttgcttttggcttctttttttctctttttggtttgctgtaatgggttataaagtttgattcatttcccttttacttttgtatcttttttctgtttctccttagacagtagcattcttttttattgaaatattattagcacccgtgaagtcatcattggttttggggtctgcacctgaaaagtgaaaattggttcttgattttggatgacacccccaaaaattattgtattgcaaaatgcaaacttcgatttttttttgttttcctatttttgaataatttctaactgttttttttttttgcttattaattttaggtgaggtgctgattgttgtgttcg

SEQ ID NO: 27604 - DNA, 764 bp, Glycine max
  Intron number 1 from transcript Glyma20g32200.2 (locus Gly ma20g32200) derived from phytozome v7.0 (chr-ID Gm20; pos 40814401 to 40815164)
tgcttccactaaatcccccactaagtcttttcaaggtttcaaacttttctattttgttttgagattttttttgtattttctcttttgggtttttgtaattccagttatctgttctgtttcatctgttcatattggtggaattgccacttgctgttgttgttgtgttacattgaatgagcctaacccagtaatgttattttttttttgtgtgtgtgtgccattttcgtaaattgatattttatcccttttgttggtctagttaatgagtgtggatattggtgtgtttgagtgaagaagagaaggtaacaagttaatggaaattgatgaagagatatataatgggaaaataaatgttttagtgatgtttctgatcatctttttgtgcaggattctcatttctctttatttttaattaaatggttaagttcagtatcattttacaattacatgactagtttatagtccaccataaaaggggtctaactgtgtactattacagtatgaatgatgatactgtttagctgtcccattgcttctttggaaatacaaatcatagttttgtattaaatttgagattgcatgatgcttagtgctaggctgctagccttaaactaagatcctcaaaaagagatgcttttcttaggcaatttgtgcttttgacttttgagacatctattgagtatttaataacacatttttttatggttattgcctttttttaattgtcagtgagatcaattgctggtactacagaagctgcatcg

SEQ ID NO: 27605 - DNA, 785 bp, Glycine max
  Intron number 1 from transcript Glyma18g48190.1 (locus Gly ma18g48190) derived from phytozome v7.0 (chr-ID Gm18; pos 57678970 to 57679754)
tgctgagtgagatagattttgtggttgggctgggggttaggtctaatgaaaaggactagtctttcataaagtggtgaataaagatttgaattagtaccttattgtagttcaagtgaattgccttgttgagtacctatagcaatcccaaaaaaggacataagcaacttgttattcattactttgattcatagatgtgatgcatggctaaattattattgattttagatggtacaagatcatgaacaatgaggttccttatggaatgtctcatttgactctagaaattttaatatatgcaagggaaatattttgctgaaaggagtctccccattgccttttctgtttgatggaacaatttattaacccacagtttcagaaacttgttctgattattgtcaagtcacagaaagttaaagtaaacatattctagtaggtaacaagtcactaataagtcactctttgccactttctccctgaatcctagctctactgcaaaaggtaaccttcaaattgaagaatccccaaatattgtagaattaggtaagatatcaactataagtatgcttatgcagtgttaatgtgtcatgcattatattgcaaaaatatacctgccctatgcaaaatgagtctggacaactaacaactgtctaagaggctaagctctgtcttattttcaaaattcactaacagaaaatcaattaacatgaagtaatatcattctcgaagccttaataacatttttggaattaggattggagcgtttgtagtggagtcagtagagtagc

SEQ ID NO: 27606 - DNA, 980 bp, Glycine max
  Intron number 2 from transcript Glyma18g45070.1 (locus Gly ma18g45070) derived from phytozome v7.0 (chr-ID Gm18; pos 54817530 to 54818509 reverse strand)
tgcttgttcctgagtttttccagagcaaaattaaggtgaggtattgtttatctctcttttgtttctaccaataaaaccaaatttgtgttatgaataaatttttatggagtaatttctttcttacaaaatttttccttgaattaaaaagtcatactatatagctgatatttacctaaaaatttactcagtatatcctcaacggattcatttcctatatgtcatgaatatatttaaatttttacatttctcttaattactaaacagtttaatatttacttgtgcattgtacaggataaatatttattttcatatagttataattaaaattcacaataataaatattttaaatatataagttttattttatatttataataaatagtttagattttgatataaggttattcataaattaaagaataaacggttaagaaaatatagtatacaaataaagataaaaggataatagtttgagatgatagaaaaaagtattttttactagatataagtatatctttaattattcacatgtcacgtcattattgatcgaaattaagataatgcatttatcttagatttttttcataaagagagaagagaaagtgtaaaaagatttgatagaaagagtaaaaagaatgagaaattccctatagattagaggttttaatttatagtagagatgatgactagcagaaacgtagatcaaaagaaaaaattgaacatgactttgtttaaatttggcatatatgaaacgccgaaagggggtctattcttccatatatatcgtcctaataaattaatatacatatattatttaataatattcttaccaaacttctaatgttcgtgttgccagatcagatgatagttttaaagtatcgtatcaaaatcctttatgtacatatagatgcaagtatagctgtataatgtatttgttttggttttgggtttaacctatatatagaattgggtggatata

SEQ ID NO: 27607 - DNA, 569 bp, Glycine max
  Intron number 4 from transcript Glyma19g35160.1 (locus Gly ma19g35160) derived from phytozome v7.0 (chr-ID Gm19; pos 42715780 to 42716348 reverse strand)
ctaattttttgtatcaggttagttctatttccttctgtttgaaaacaactctctaattgtttaaaggaagaaaacttggatacaatttttaagtgttatttgtgtcattctctaaatcataattagatttctaccttgttaatctgcataattctttaatacaaatctttgttaggcagattatcaaagtgaaactccaattttgattgaagaacaacacaaacagcaccttgtttaaaaattcatcatgacagcctatttgttgggtcatactaagctactatttacaacttttttcagagaaattggttaatttatagtaagtaaaataaaaaaaaagtagaggtgcatccagagttgatttcaattaaattattttgttattttaactaactttaaatcaaccgttgatgtttagtatagaacaaatttatcttcagaataacttgaaacagatcatcataatcgtttacaaacacaaatacttggttttattagtgtattttttggtgatggtttttgttgtttggacagtacaaacaagactgtgaaggagcagaggagtatta

SEQ ID NO: 27608 - DNA, 1013 bp, Glycine max
  Intron number 1 from transcript Glyma18g48860.1 (locus Gly ma18g48860) derived from phytozome v7.0 (chr-ID Gm18; pos 58266593 to 58267605)
cgtcaccggcaccgtcgcccgcgacgccggacccggtacacctctgtttttttttaatctcaaaatcgttgttctagtttatttatttatttatttaattaaagtttcttttttgttcttcgaggggataaattagtgtcttaagttattttagtttaataaattaatattaaatgagggaataagttactaaaataataataaaaaaatcaaatggctactagtactaagttacttcaatgaaataataaatttgtgattgttaggactggaaacacttttttactacttgtagcggtcatgttttacttgatattgtactagtttcttagcactttttatgttgttttctagttaaaattagagttctacctcaataatatgtgtaatgaatgtttttattaaaggtcaacatagttactgaaactccaatactgattatggaacctcaccaaaagaactcatggaacagtatttgagttttgttcttttattttctgggttagttggaggtgctagtacttgcgtaagggaggtggagactggagagggttgaacttcatgtaggaagccccttatatgacttgaacatgaatgcggtatgacactcactcaaggatgccacaaattttaaaaattataagatagggcacaacatataaaaattaatatcaaattaagaaaagaaatcttgcactaaagatatcattgtctcaaaaatttagttagttattgaactagtttaactttataaagaatttttataccatcaccaataatagattgtcctgcattttaagattgttgacttttgtaataattattttaaaagtcgcatctacagtataaaaatctttacaaatgtatgaaaattaaactcaaataccatctgctgtaatgcctgatatgttatgattatttacagttactgttattccaaacttagtggcttattcatggtttgtttctatgatgtaggagtaacaataagttttatacttgcgggagcatcg

SEQ ID NO: 27609 - DNA, 362 bp, Glycine max
  Intron number 2 from transcript Glyma20g00820.1 (locus Gly ma20g00820) derived from phytozome v7.0 (chr-ID Gm20; pos 537793 to 538154)
gttgcagagaaggtaattgtagtaagaaaagaagattaactttaaacagtatatgtcccattttctcacataaaattaactttaaaaaggagcatcttctgttatctaataattcattgtattatttgctgcattcaggacaagacttcaaccagagagctacatatcagtctctgaggtgcggacttaaactacattataaagggttttcataactctttatccattttttacacttgttatctggtatcttgccaactgtttctttgattttataattcgaacatgtatattatgtatgtgcttttctttttccattgacataaggctgctggaaagtgaccccccccgaagttcgtgaa

SEQ ID NO: 27610 - DNA, 874 bp, Glycine max
  Intron number 4 from transcript Glyma17g21240.1 (locus Gly ma17g21240) derived from phytozome v7.0 (chr-ID Gm17; pos 20541603 to 20542476 reverse strand)
aacaagttaagggtaagttttacctcctttttgtttctttggtggatgatgaatgttttgacttgttcttcttttagatgacgtcatcatggctcatcaatcttttataacttcttcacatgttatctctttcctgtgcaatattttgtcatcaactactagttgatgtcaaccatgtgttaatattgaaagaaaactagtaacagaaacagatgccaaaaaattattcaaagttgcaaacatggcatgcaagtatgtcttgaaaatttattggtaataagatctagtaagtgatgacttgtgaaatattttagatccacatttctaaaggtagagagagcagcttaaaagtccaagcttaaaggctttgtgcatgtttagtttggctcattttttagtagttatcacttatcacttcttgtcttcttctgtcaactttatgatgcagtttttgaaaaaggaaaagagctagtattccccctatattgttccaaacattggctagttatcctttaagaagttaatatgtgaacaaaagggttcattttagtccaaatttcatcataagggcatagcctaggaatctattctccgcaaatgatgctttaacatattaaagaagcattttcttatttgccataaaaaaaaacgaagtattttctttttatctgtattgtttttacgtacagtgttatttaccagaatgttatctgtaataataaattattctgttgcaatatatgctcacaatcgactgaaaatcatatagataatgcattctaaatagtccaagacatcgaatactctgtgcttacagatctctttggtttcacacctaggtaaatttggggaaaatattttatttgttactttc

SEQ ID NO: 27611 - DNA, 155 bp, Glycine max
  Intron number 1 from transcript Glyma17g06140.1 (locus Gly ma17g06140) derived from phytozome v7.0 (chr-ID Gm17; pos 4342763 to 4342917 reverse strand)
gatcggaagcggctcctttggggagatctatttaggttcttttctttttcatgcgccgttttctcctcaatttttattaatttggctgtgttttgattagttttgttgtttctcgtgcaggcactaatattcagacaaacgaagaggttgcaata

SEQ ID NO: 27612 - DNA, 987 bp, Glycine max
  Intron number 2 from transcript Glyma19g39950.1 (locus Gly ma19g39950) derived from phytozome v7.0 (chr-ID Gm19; pos 46449282 to 46450268 reverse strand)
gacctgtaagtttcttctagttcgacgtaggaaacattgctatacttactacaaagtaacctcctgttctgtagattcaactttaaagtttattttagtaagacttgagtttttcttagaagcaaagcatgaacttaaatcaatactactactactgcgtgatagttctttcttttatcctctcaaatatcccaatttcttctctggttcttaaattccttttgcatgaactgattatgaataaattgttcctaatgattctatttagagcactgataaacgttaccccaaatgggtacatagggtgcaaggaagagagatgaaaaaaaaaagtgtgcagataagactaatgtagtccgaataaggcttgagcatttcacaccttcaggcttgttttgtgaggttaagttagactttaactctaaattctaagatggtctaagagtctattctactttctgttattgtgtcaccaatatttgtctatgctctagaagtttattcctaggcgtgaggggttgttattgtgccaccctcatttttccgcactcctcatatgcaatccttggcctgggaatgatatggctaatgtaggcttggacactctttgagtgtgacagatctcataagtgatgcgatggaaaataaagagagacaagaaaaaaatgaagtagaaaatgatatagaagaataagtgagtgtatgtttatatttatttttaatgttcaacaacaattgagtttgtaataaaagggtatgtttgggagtagctttcataagttatttttgatgcagtaactgaacctgacttgtagtaccgtatgtatgtaccaagaaaataagttcagaatataattgttttctttttcgatgagattatcagtttgttattaggtttttgctaatttattttgttgaaggatgtgtatgtagtctggtaaattcttttttttcttttttctgcagaacctgggagctcacagcagc

SEQ ID NO: 27613 - DNA, 409 bp, Glycine max
  Intron number 2 from transcript Glyma17g14310.1 (locus Gly ma17g14310) derived from phytozome v7.0 (chr-ID Gm17; pos 11064221 to 11064629 reverse strand)
aaaactgtaagccctaaaaccagaccaaaatcctctatttctctcttcgattatattgttcttcattataaaacttacgaaattcaaacttgtttttctctagattttaatcctaattgttttctacttcaattttactcaaaagttgcttagatatgtttaattttggagatattctacccttaacgtatgcacttccttcacattcatgcaaatcaaaataaagaaacaaacaattatagttgttgttctactttattacaaaaactatatgcatcatgaaaacttcagagataaatctccggtcgtcatggtcttcaacccttgttgatttctgatgtgtatttaccaaataaataatgggtttttcactttttcttctcttgttatcttttgcagtataccttga

SEQ ID NO: 27614 - DNA, 474 bp, Glycine max
  Intron number 2 from transcript Glyma17g12920.1 (locus Gly ma17g12920) derived from phytozome v7.0 (chr-ID Gm17; pos 9834818 to 9835291)
gatcctgaattcaaagaaggtggacaaagaaactggtgagttctttctttcttttctgttctgcttcaagatttttgtttacgaatcttttttttaaggtcacgtggggtttgatgttcttgttagctagaaatgattgtgttgtgtatagatttcaaacatgaaaaaagggaattgattgcgttcatgcaaaaaatgaatgattgtgtccatatttggatggattctttgattgaattatggatatgatgattggcatagttctttcgtggagtttagtttggtgccattgaattgaggggtttttttttcatacaatctttcacataaagcttatccttggaattttgaaatttcaccccatttttatgaggacacgaagttgacccacacttggtttttcttttccttttgactaaatttcctttgcttttttcaggatacaagttctggccaatagtggcattgcctcgg

SEQ ID NO: 27615 - DNA, 806 bp, Glycine max
  Intron number 1 from transcript Glyma19g29920.1 (locus Gly ma19g29920) derived from phytozome v7.0 (chr-ID Gm19; pos 37632131 to 37632936)
cagccaggttcctcccatctctttttatttaattaactaccaagacatcgctgccaatacattggtctttttgttttcacatatatttataatacaactgcaataataaaattaaatattttcattggcactttaaacaaattaaaaaatcattgaaacagatataggtaattaaattttctaaaatgatggaaattcaagcagagaacatatatatatatatatataatagtagaaacaatttgttataatagtcttaagacattgtctaaaaatacaacgttgccacaatcacaataaatttagaagtacaggataagcacaagacatttgatccattgactagttcctctcatggagaagagaaaataaaggagatcgagaaaactatttcttttacattatatgttttctctgtaaagtctcaatgagacaattacactgtacaatggttataaatagaggtcttttcctgtgttaaattaatatgggcttatttacccatcatagaaagcacatatgtctgccacatcaacatattactaattgctttataataataataataataataataatattaatcctaataaacattaatataataatcatataattgggactaatcaaacaccataatatataattttaagatcatgttaatttgagctttagggaaaataatatcacttagtatgatgtccactataaaacaatctaacattttgaggttttatttttgcattatccaatctttaattatgggatcagatccgatacagagtttctttataaaattttggaag

SEQ ID NO: 27616 - DNA, 779 bp, Glycine max
  Intron number 1 from transcript Glyma20g28340.1 (locus Gly ma20g28340) derived from phytozome v7.0 (chr-ID Gm20; pos 37252833 to 37253611 reverse strand)
gtgctttgctctcaataggtacatatatctctatttttctgtccttagactacccaattcgcttgttaataccgcattaagttaccatcttgcttaactggtcaaccaaaaacttgtcccagcggcttgtatttttcattttgtactctccatttttctcataggaatgggattagacttcctttgactgctcttttggccttttcatgttcatttttactattagttattatttctttttgttaatgatgatttaagaagattcgtggaaagaaaagccacaaaacaggaaggtaaaagaagcacgaacttttttattcgagtttgatttgagtgagacaaaaatacagtacaagttgtctgctacaaatgccaagagttatcttggctctgtatatcacggatattttgatgattccagcttctcatgctaggaaaaagtaaagggaccctaaaagtcataagttctttttgctcgtggccatgaaaaaggcagacaacacaaaaatgaaaataagttagctctttcgttgctaagtccagcactattatctgtttgatatagatacaccactgtaacacatattttacacatcggagtttttgtttaaaaaaaaaaatatatatatatatattgtagcattttttatttctctctaaagtttgaaaataagttttacgtgtcattcatgtgttacttacatgcaagtataatttattcttctatctttggtgcggttgcagtatattgcatacaggagctagccagtaccaagaca

SEQ ID NO: 27617 - DNA, 273 bp, Glycine max
  Intron number 2 from transcript Glyma17g37950.1 (locus Gly ma17g37950) derived from phytozome v7.0 (chr-ID Gm17; pos 41696341 to 41696613 reverse strand)
gatcactctccacttctcctcaggtttgattcaaatacataccctaattctctgctcagtttttccttgtgtggttaattctctgtttattttatttatttataaaaaatataggaagaagaaagaatccccaattataaaattcagtctatgtgcaagtttttggttttttattttttttgcatgatcaaagagggtagataagaaaggattttaaatattggtgaataatggtaaatggtgcattgaccttcatatatgttgtaggggcca

SEQ ID NO: 27618 - DNA, 461 bp, Glycine max
  Intron number 3 from transcript Glyma19g30720.1 (locus Gly ma19g30720) derived from phytozome v7.0 (chr-ID Gm19; pos 38369240 to 38369700 reverse strand)
gtcaagagcaattgttcaacaacaacaagccagaggtattgtccttttgaattcttgtatttttctttgagtgtctgtttcttgtttttattatcaaaataagattcaatgagtgttgttgtctgatttttttgggatgctggttcaagttttgttttaagttggatcttggggattctgggttggtttcttttgtaataaatgaaaatatgaaaaatagtgttttggattcatatctttttgaataacagacaagtttcaattttcatgggttttgattactgttcaatctcttcagagcaaaagggtctcttgttttttctttttgttggatttattttagattctttggttttgttgcatgtgaatctgtgtttagatccagagcaatctatcacctttttttaatgggttgcaatttgataggtgaagcagtagtagggggaggaaaacagcagaag

SEQ ID NO: 27619 - DNA, 744 bp, Glycine max
  Intron number 1 from transcript Glyma20g28730.1 (locus Gly ma20g28730) derived from phytozome v7.0 (chr-ID Gm20; pos 37656971 to 37657714 reverse strand)
ttgcaggtattgcattctcatactgattagaatgtagtaatgtacttattattctctcaagctctgtgcatgttgtggtattgtttttgggtttggtttagtgacgaaagatttggatagtttgtgtcagtgttatcaatgatgaatggtcaaaattctcacatataaacacatcattgcgtcttatgacgttgtcatgacaaacctttcttcacaaattgcctgtggcggttggcaaaaaatccgccacaccattttgtcatgacggggccataacggctgtttaacaatactgatttgtgtgaagtcttatattgaaattttgtagctttcattgtataagaaaaaactttttattcttcttttttttttcttcaagtgatatgtgcgcgttgatttgaaatattgttcccacactgagggtgagcaaaggcaaccctcactttaataaaatataaataaatattttgagtaattatattttgttttttctgtttttatatattcgaacatactacttaatttttttattttaaatcataatatatctaatatattaaaatttatgacttactattaattttcatttgttaaaatagattgctctgactgattcaagatcatgtttctgctactgcaaatgaaacacttaacagtcttggtttagagcattttatgtttaaagaaattctcactttatcgtcttgttgaattgtttagtgaaagtcttggactggggtgagg

SEQ ID NO: 27620 - DNA, 952 bp, Glycine max
  Intron number 2 from transcript Glyma19g33030.1 (locus Gly ma19g33030) derived from phytozome v7.0 (chr-ID Gm19; pos 40689618 to 40690569)
ggtgagatttatttacttatttattgtcagtacctgtcaacaatgcttcatttcttggtttctacttaagtactgtaactgaattttgatgcctaaagtatgtaggactgtaggagaggggttgcttggatagttcttctggaaataaccctgtaattgcttttgctttttctattatagttataattgtaataattagttttggagaatttttctgtacagttatgtcatgtatcaaattgtagaactcataaggtatgagtgaatatgtatgacaaagtggtgcactgactacattctgtagaaagcatgattgtttttcccgcgtgctaaagggaacttgttagttctttaccacctggtattgctagattttataagctgaagaacctacatttggctcatgtgttccttttctaacttttgtgcttggtgttattctcttaagttttgtaccgagggctagttcttgattctcatgtaagattaagggatggagttatggacttttttttaaactgggaatagatgagtttattgaatgagcatggggctgaactgacatgtggaggattttttttttttgacttaattgcttcactattgttacacttgtattttagcttgaacctaacacacatatccatgtgtccatatgtagcagtttgcatctcatgtactaaaagataactttttgccatgtgtctatatgccattgtttgcatattgtattcaaaatatgaaaatgtccaacaatcactacttaatgctagatgcaaacatgtctaaactttgtaccttgtgtgcgtgcatgcttgtgttgtgtgcactcctaaaggtatttttagtactactatttactgtttgattaatcatttcaaccctgtctgcagttttaactaatgatttaatttcaggtataaaaggctagaagtcttgtctgcatttacaa

SEQ ID NO: 27621 - DNA, 901 bp, Glycine max
  Intron number 1 from transcript Glyma18g08380.1 (locus Gly ma18g08380) derived from phytozome v7.0 (chr-ID Gm18; pos 7139342 to 7140242 reverse strand)
ccagaaagcctcatatcaagaaagaggtttgcttttgttttgctctcataattttctttcttggtttggtttttttgttttgcagttttaatctgtttttgtttaaaaatgctttttttttttaaacgatagagtgagaaaggttgttcttgtttgttctcccaatgggcaatgtactagtttttggatcttttgttgttgagatgggtttgttgttttcttgattcgttctttttttttttttttgtcaagcactatgaatgaatggatgtccaagtgtgagtggaatgaatggagtgtgattgaaagtaatggaacaggatggaactagtaaacattctgttgtttaattagttttatgatatatatcccctagtccgagtttatggaagaacgtctgttggttaaatagatctcagtatctccgggaattagtctctggctcttgactaatggttaccctggcttaaaaaaaaattgatcatttttatgatgaaatggaatggaattgtaagggcttccaccccatacttggggaagtaaaagaaaagtattggatggaatggaatggaatgacttttattatactttaaactatctaaagattctaaacaatggaatccagtatcatttggttgcattccttctcatcaatccaaatgtagcctatggtatgaggtgggatggtttgatttaattttttttttgtttatatttttctttatgaagttatttactatattctatatcaattgcatgatatttggattttgttattaaagatgacctactaatgcagtgaaaatgctgtctggattcagtgatatttattcactatatagattaagctaactgtagctaattgttttggacttgtcatttgctagacctgcttaacaat

SEQ ID NO: 27622 - DNA, 484 bp, Glycine max
  Intron number 1 from transcript Glyma20g01890.1 (locus Gly ma20g01890) derived from phytozome v7.0 (chr-ID Gm20; pos 1422953 to 1423436)
aggtccttttctttgtggagttgtttgtgctgctaccacacacaaaggtcatttcaataactatagtaattccattttctgcggtgcagttgtcatcccaagggccaacacatgatgagattgatttcgagtttttgcgaaacctaagtggagacccttatattctccgcacaaacatcttcacccaaggcaaaggtaacagggagcaacagttctatctctagttcgaccccaccagaaacttccacacttattctatcatttcgaagtcccaacacatcatgtaagtgatagtaaacaaatattcaaaatacaaatttttgtttattagtaaatagtctatcaactaatattgcagagtacacttttcattgcttaatttgctttctagattataatatatctcatatttattgctactggatgataaattaaacaaaaggatgcagacctacgttttggaaaataaagaagcacgaatcta

SEQ ID NO: 27623 - DNA, 867 bp, Glycine max
  Intron number 1 from transcript Glyma17g37770.1 (locus Gly ma17g37770) derived from phytozome v7.0 (chr-ID Gm17; pos 41506166 to 41507032 reverse strand)
tcgcaaagaggccgagaattgtgactgcttacaaggtacgtactatcgtgtacaaattaatataatattatattttcattcactcatcatcatgtatatggagtttctttttgtgcttatgtgctgattaatcattattactatagatctattagaataattaaaagaacgctactagatctggcttctggaactcacttggttagtactactatcactgcatcaggttcattttcttttctttttatggtgtcggctttctgctgcaataattgatgcttcattatttttgttgtttgagcccatatgttatttcgctgaagttgacacttgacccgtgtagtgggagaacaggaagggaccacgtggccatactttatcatgcctcgttgaatattaaataaatatcttatttgtttcccctaattatatgtgcatgactttgatagtgtaacaattagtaagcaccgacaatgtggttttacttttgtaaattggaaattaagttgagggtaacaaaagtgaatcaaaatctttatctcaatgtcgatcttagaaagaccaattgttcactacagtctatagtacatgaatttacaagtgccacctcaaacaatgtttctttatttcgataatctatgacattattctttctttctttttttcttttaacacctaaccaaccttataactacacctcaaacaatgtattttcgcacatcagaagattttgtatgagtacaacctgaaacaataacgcagcttcactatgggtaaattatatggttttgagtttcatgtatgttcattttgagtcctttttctcgatcaggttttcaagtgtgtcactcacttggaggaggcacg

SEQ ID NO: 27624 - DNA, 708 bp, Glycine max
  Intron number 2 from transcript Glyma18g38680.1 (locus Gly ma18g38680) derived from phytozome v7.0 (chr-ID Gm18; pos 46329633 to 46330340 reverse strand)
tggttgggacattgcaaatcgtcattactgggccgtaagtacaatgattccttttcatcatgtactgaaatggctgaagctgatttattattatgtatcttcttatcccaattatatttgatattgggttatgttttctccttgcatctcctactgaccgctctggatctttggtctgttgggttgaattgaacttggaggatgttctggttgaacttgttttatttgtttgcttattcacctttttcattttttcttctgctcttatgatagaaggataaatctgtagatgtaataattgagccaaagaaaagggttgagaagttgtgacattgtgcatcattaaacatctttatagctaggcaatattaattttcctcacgcttgcggcatggtaaatatggtgaatcttgatgctgaagtaatacgataaatgactgatatttacttgattctcagtacatttgtatttctccatgccccactagtatagttctttgcacattacaatcataaccacttgcaatttctttgcattgttttttttttctactcttgttcagttatgttgttctttgagagaatttattttccctcttgttcctaatagcctccaaattctggtgttcacttcaactaaattaatcagtcctttaactattatatgttcagtcagttggattcactggtgtggctggtttaaccctt

SEQ ID NO: 27625 - DNA, 616 bp, Glycine max
  Intron number 1 from transcript Glyma18g38680.1 (locus Gly ma18g38680) derived from phytozome v7.0 (chr-ID Gm18; pos 46330464 to 46331079 reverse strand)
gggtcagccaaacattccataaagtttatcctaggttggagcctcgtgcacatgtttctgtaaccctgattatagtgaacatgttaataattatagttgcagatcttgttttctgataattgttgggtttctttgaaacatgggaacgtaagggaaaataaatataaataaaatgtgaacgtaccaactattaatgttttatttcatatttaatagtatctagaaaattggatcacataagccgatcaaattgacaatttttttgctaaatgcttacgtgaattttgacatcttccacagtgggaaaacaaggcagctttctcattccacagtttatgcatttggattatgcgtgtttgtgttatatttagacagatttctgtaggtacttttgatactggtctctgaattcgattttcacctcgattatctatgaaacctttaatgcagacatttattatattaattatccagtgaaactcgaattctaattgaagaacagtatcaaaatatttaaggaactacatctaagttttgtccgcataaatataatgtgttttgttctcaccttgtccttttgtccttttttgttttaagggggtcagaatttgggtcc

SEQ ID NO: 27626 - DNA, 515 bp, Glycine max
  Intron number 3 from transcript Glyma19g31000.1 (locus Gly ma19g31000) derived from phytozome v7.0 (chr-ID Gm19; pos 38708274 to 38708788 reverse strand)
gcaatttctggtttccagctcaaaccttcacggtaaacccttcaattagcttcttcttctttttaattttttttaaaggaaaccctttaatttgcttatgagctacctttattattagaataaatagtcaatttaattcctattttatatctcactattattttattagtccatgaaattataaacaaactcaaataagttcttgaattttgttataattttatttaattttttgaaatttatcttctttttttgttcctttaacttatattattattattacttaaatccttcgccagggataaaatgaaaaaaattgatcaaatttcatagatctaagtgaaactctaaaaaaattcaaaaactttagaatttttcttaattttaagaactaaaataatagtaagatacaaatttaggaactcaattaatcatttattcttattattacttggtgagattccttttatgtttcttttttcatggagtaggggttcgtgacgccttacttagat

SEQ ID NO: 27627 - DNA, 389 bp, Glycine max
  Intron number 2 from transcript Glyma19g00250.1 (locus Gly ma19g00250) derived from phytozome v7.0 (chr-ID Gm19; pos 63457 to 63845)
aagtaatctcttctttttgcactttgattttttttagactgtatgatctgattcatcttattatcttgttattttcggcctttagtgtcatctactgcgatggtttctgctagtgctataggacatgaaatgtggcatgtaatcattttcaaacatgaaacagattaggatggtttatgtttctttgttgggcattgtagggacttgtacaatttcattttcctacttcaaagaacaatgaaatgtcatcatgcttccacttgcttttacaaacatttatgggaggtctggaattccttactaggaaacaatataggtgcaggttatgtattaagagaaacagcttgcttattttatttgatatttttttgtaggaaattgcaaaaact

SEQ ID NO: 27628 - DNA, 517 bp, Glycine max
  Intron number 1 from transcript Glyma20g02250.1 (locus Gly ma20g02250) derived from phytozome v7.0 (chr-ID Gm20; pos 1909762 to 1910278 reverse strand)
ccctttaatcttcgtcaacgttacttttccacctcgtacggtaacacacgcttcttcttcttcttcttcttcttcttcaaattggtacttggattctgtgtttgcttaattgaacctctgatccatgaatctgaacgatttcatccaaatcattaccatttgtttctttaatttgaaggaagatatttttctatatgttagctggatgattcagattccattttttttgacaaatatgaaaatggatatattaatttcgatttcgatcaggattttgactttcacgcgaatgattaatgattaaagtttggagagtacttttacggatttcaatgcataataatgaattctaatgcaccaaatgaagaaggaagaaattgttgctttagtttttaggctttccctgctttaattctaacatgcactgaaattttacttgattcagtgattaatctttgtgggtgattgaatttggctggttactgcagagggattcaattgagagggaaagggactg

SEQ ID NO: 27629 - DNA, 753 bp, Glycine max
  Intron number 1 from transcript Glyma17g35390.1 (locus Gly ma17g35390) derived from phytozome v7.0 (chr-ID Gm17; pos 39343132 to 39343884 reverse strand)
tgtctcagtccggcaccaatcgcgccaagcaaaaggtattattcttctattccattcccattcccttcaacgccatttccattactctgctccgcttgctgacgtggcacacatcccttcaattagaactagtaattgcatataactttttttttttttttacattgatttctatttctataacatcagtattattcttatgtttatcaccagtaattttgatttttctattttttttttgcaatctatttgttaatttaacattaaatcatggttttaaattgtgactgtggaagtgtgtttctgaaaatttatattgtgagaaaaatgtaatttaaaaccatacatataacaaaaatattaacctaataacacattaaaatgataatgtaccgatgtgacaacataatttttgaaagtcattctttatgatacaaatttttgtaaaaaaaaaaaaaagtagtgccacgtcagcttcgttgcccagtggacctccacccaccgtaaaatagattgcttaatgtgtaattaattaaatttgttatagtgaacatcgactcatgtattcccattgcatcgttgatgccaatcttattggttgggtttgggaatattttaattatcgggcttgaattagtgctccatgcttgagaataattaaaatttacgaatgttgttggtgttgaatttagttttgtttctttgttttggtgtgtaggcggagaaactaattgagcttctgcggcaaccaag

SEQ ID NO: 27630 - DNA, 650 bp, Glycine max
  Intron number 1 from transcript Glyma19g28990.1 (locus Gly ma19g28990) derived from phytozome v7.0 (chr-ID Gm19; pos 36558595 to 36559244)
cctaggtacactgccttatatgatcattgctgttttatgtgttgtttacatgaattctgtatttggtaggttgtatcttcatgtaatttggcttgattctttaggtcttttgagtttggtgtattttctttactcaatttttggcattggatataagaaagattaatttgattgattttcaacttgattgtgttacttgctcagttagatgtaaccttaaacttggtatattttccaaattgcttctagggtccactgtttagcactctgccaaattggaaaactaggaatatcacttcaatttggatcaacatattactactctgctctgtagttatatgtttaaatgtaattctagaatcttataatttaacttgttcatgttgtttctatcattgtttcccattaattggttgagttattgtggagtcttggtggggtgttaagagtataaaaccatttggagtccaaattcatatcgaatgaattttatcactttctagtttctaagcttctattttctcattactctaaaaccagaacttaatttttgtttagacgaatccatttttattatttttcatcttttcttttataccaataactttcatttctatctgcttgcagtgatacctcagttggtgtagcac

SEQ ID NO: 27631 - DNA, 824 bp, Glycine max
  Intron number 2 from transcript Glyma17g12240.1 (locus Gly ma17g12240) derived from phytozome v7.0 (chr-ID Gm17; pos 9260261 to 9261084 reverse strand)
actggtaacaaacatcaaactcttggttgttctctttatggttgagattattcattattcatcatatgtttatggcgtgtttggacaccaagtacatgatggattaagttaaaattgagtgatgatgtattttttttttttatattgccatatcattgtagattgttatatatagaaaaattgttgatttgttttattaataattactatattcaaagaaaaagtaattgattcattgtataaaaacttttatagcgtataattaaattgaagaaaagttatttggaataaaatgattacatgaattgaatacggaaaattatcgagtattatttgtgttgacacagtattcatgccaaaaatttcctttctgtttgaaatgggcacttgaataaaggttaaaaaaaccctggtatattaaagaagcaaattttggttaaataattgatgtgggatggatgacccttattggttggataacatataagaataaattttatcctacaaaatcacggtgctaccataaaaaaagttagaagcaattattttttgccttgccttcactgtaaaaaaataattgactatttttcatatggacctaatccaaacacatttcagaaactctgttagtcaacccgttaggtctagcttagtgataagaagtttgaatactttacatcaggtttaaggtttaaatttcatttccacggttgtacatcagaaaaagattctgttagtcctaaaatgcttatatggtactactatggtagttgttgtttaactcattctgtgaattaatgaaacgcctgctttgttttgtagtt

SEQ ID NO: 27632 - DNA, 655 bp, Glycine max
  Intron number 3 from transcript Glyma18g03490.1 (locus Gly ma18g03490) derived from phytozome v7.0 (chr-ID Gm18; pos 2362289 to 2362943)
ctctcactgcaaaggaacattaaaggtgcctttttttattattgtatttttttgttttttgcctgttttgttagctgcattatttattattttatttgatagcatataaatattcttcttatttttatttgttcaatactgctaaagatccttgcttttgtttgacgctgccttgcatccatgtaaaatttccatgagaagttcatgatttgatcagaaaatgaatgtagacaccactctccttctttttgagtctgatgaaactaagaattttttaagtgtaaaatcttcactttattcctgctatgacacagatcggctcctttcatgtcatgtttggataaattggaaaagaaaataagaaggcaaaatgcattgaacttctctcataagctaaaatcaacttatgtgcatcttaacttctatgatagtgcttctataaaagttaagtgcttaaattgattttagcttatgggagaattttgattcatttactttcttattttcttcttttattagtacatatgaagtttattcagacaggaccttaataatgttggacagtaattgacttagcatttgtgtgtatgagcttaaagttttacacggattaaagttgatgatctttatgtttcagctgagtaactattcctca

SEQ ID NO: 27633 - DNA, 743 bp, Glycine max
  Intron number 1 from transcript Glyma18g14530.1 (locus Gly ma18g14530) derived from phytozome v7.0 (chr-ID Gm18; pos 14349797 to 14350539)
gtcagaaaaatctataagcctttgtacttagctcaggtggggttcttcttttttctgctccttgtcttaatgtgattgctggaaatactaatggcaataattaaagtgaaaaaagaagtttcatcattttctatgtctttcatttgtcaaagtgtttgtttatttttggttttgggaattgtttttctttgagtttgtgtttgcttatgaaacttgtggacttagtgcacagctttctgcaagcaggctgtctcaaaatttgcccaatttgttgggtttaatgttttgttcagattcttgtatttcattgtttttgtttctctgaactggtaaatgtgcatgtaccttcaaactttaactgagagttgaatttccctttttggtaccttgaaatttgaattttgggtgacttatttattcatagttcagaatggcaaaaactattcatggttccacttcattggtttgcttgttcactctctctagtaaagtccacacatgacccactcaaaggtttttctctttcagtttctattccttttctattttcaatttaaaaattgtttatgcttatttgattattcagtttgctggtaaacagattattttattcttcttttaaggctgtgatcaaggactcaaaatctggcactcaaaagggtctttggttttgtttttctattatattcaaaatctaaagttattttcttttttgtgccaacagacaactgatttggttagcc

SEQ ID NO: 27634 - DNA, 1004 bp, Glycine max
  Intron number 2 from transcript Glyma20g29040.1 (locus Gly ma20g29040) derived from phytozome v7.0 (chr-ID Gm20; pos 37995738 to 37996741)
gcaaccaggttttgctttctcttcattcaatttctccatttgtttattgcgttttcagtgaaagagctggtcagaattgttaatgattgaaatatgtttatttggttcaaggttgaattttgagtgaaattttctaaattatgttggttatttaggaattttgaacaaacccacaattgaaattggactcagaatcatggaaatttgttattttgttggagtttatcattgtcactggctaactttcttccattaatttttgttgttgttggtggagttgatgtttttggcatctagcagtcacgcagatgagtcttggaattcatctctaaatattttgttaggtccttctgtggttagtttttccatgtcactttcttataggttcttaagtgcacgaattgcttctatatttgtgagtagaaaggctaacggttgaacacagacttcgtttttgttggctagctattgagcttagattaagttggaatctctaactgacagtttttaggcgttaaggatagaaactggcttactttgggtcaaacatgtcatgagtctgtctgcaaagataagtgtaccggtgctgccttggccgaatgattggtttccattgtgatgtgagaatgatggaatcactaaacaaattggtggcttttgaatccatgcttgtaaattgcgcataacagatccaaacaatctgaagaagagaagggattcaataagcttatacatcttgctaaccaaggaagctttaattttaacaagattttaattaaaatgtattgatagtgtaaaggttttttaccttgtcatctaattatagattgttatgttaagattattgacttttgtaataattgttttaaaagttatatatagagtgatttctgattagttcatacttcacggtgtacaaatctttatattgatactatatcaaaattaaactctttgcgtaattgaagattcatattttacttctttcacatattaccagatat

SEQ ID NO: 27635 - DNA, 456 bp, Glycine max
  Intron number 1 from transcript Glyma20g28880.1 (locus Gly ma20g28880) derived from phytozome v7.0 (chr-ID Gm20; pos 37829357 to 37829812)
cactcagcgtgttcaacaagcttgcgagctattaggttagtcatattctaactagttcctttgatcaccgtttgttaggcttagtatgataataatggtttgaactagaggcttcaattctttgattcgtggcatatagtattggttaatagcttagcatgttggagtgtgattttcttatctcgaaattatgataatgccaaggacttcagaatggtgattatgtattctataagatttgggtttctaattgaagtaattctgaatgatttatagtttaactctctttgaatttattggttatgttattatgtattaattgatgtattgactgttaagaagagtaaatttgtttctcgtggcaagatgttatttgaaattttttctttgtttttgttttttttccataattgttttgcagccaaaaacaattgtcacaccaggcatcttgcgaag

SEQ ID NO: 27636 - DNA, 438 bp, Glycine max
  Intron number 2 from transcript Glyma17g05490.1 (locus Gly ma17g05490) derived from phytozome v7.0 (chr-ID Gm17; pos 3821956 to 3822393)
cctgcagtggttgtcctcaaacaagtgggcttcaggtaaatgcattttttctctattttctaaggccctgtttgaataaatttctgaataaaaacttattggaaaataaataagaaggtaaagtgaataaagtttctttgataagttaaatttagttttatgtaagctaatttataaaagctctctcatttagctttttgttaatcttaacttctacataagctaattttaacttatggcagaagcttaattcattttgcatttttattttcttcatctgtaagtacttattgagaaggtttatccaaacatggcctaatttgatgttctgtttgtagaatagtaaggtcaagaatatgcccccagagtttgtgaatgttgtggttgttggattttgttacagattcagctaaatttttttgaccccgggagttcatc

SEQ ID NO: 27637 - DNA, 692 bp, Glycine max
  Intron number 2 from transcript Glyma20g27160.1 (locus Gly ma20g27160) derived from phytozome v7.0 (chr-ID Gm20; pos 36370238 to 36370929 reverse strand)
cagaattcatctggcccaggttgcttagaagggtaagtctctctctctctctctctctctgcatatttctgagtgaaggtgttcgtggcaactcagatcgggattcactcgattgattgcggttgcgattacgggtgcaccatcatctatggtgcgcccgcccgcggctgatcattgattagctgtagttgcgttgtttcactgctgtcatctgacgcgacacgcgcgcacgatactcgaagtggatgtcatctttttttttcgccgggccccgccacttgcgggtttcttaagtatgatgtgccaagaggaacgaaaatattcatcgtgtaaattatagtagaacgtagaaatatcataatttttttctcctaataaaattatttttatttttaattctaagttctttaaccaatcttatggctccgtttctttgccattgagaaaataagcattgataaatctttcttaatttgaaataggaaataatttatgataaatgcaaactttgaatttttaattgagaagactcgattttgaattttcagtctcgtctgtttttttttttttggtaaaacgaggaatcgttgcgattcttgtgtgaaattagtgagagtttgttcaatgcacgggttctaattttttgtttaattgttgcagtttggctgctctctgctgctgctgtctgttgg

SEQ ID NO: 27638 - DNA, 646 bp, Glycine max
  Intron number 1 from transcript Glyma19g35560.1 (locus Gly ma19g35560) derived from phytozome v7.0 (chr-ID Gm19; pos 43117290 to 43117935 reverse strand)
aaccccatcaacaccgtcttcggtaacctctcttaaccccaattttttttatcttctgttttagtttttctgtttatgcatttttattttagttatcagttataggctaaactattcactttctccttatagttattccatttttttgcttaatctgtttttttagtcctctaattagaatttgcattttattctctcagttttgggaaattcttttttagtccctcttgtggtcaataatcgttctagattgtacatccaaaccgttaaaaataattcatgaaagacaaaatcaagtattttacgaaagcaatgtaaattataatatttataactaaaaaggacaaaccctaatttaagaccctaaaaacatttttttagggttagtatacatgctcggaagggaactaaaacctaaaattagataaaactgtaagtatcaaatgaatagtttaaccctagcaatatgtatataatacctcaagttttcagatctactgtggtatagaaatttgatcaattataagattcatggtattgagttaatttaaatatttttaagaatgtttgatttatgtttcaaattgtaagtgttattgtgagttgcaaaatggctttttcgtaagatgctttgtttttgttgcag

SEQ ID NO: 27639 - DNA, 851 bp, Glycine max
  Intron number 1 from transcript Glyma18g10960.1 (locus Gly ma18g10960) derived from phytozome v7.0 (chr-ID Gm18; pos 9811680 to 9812530)
gtatcggtaagtgcctttctttccattctctctctatcattttatgttgttattatcgttatcactgtgattctgtgtttaatgggttttattgtgttttgagattctgagtttgtacatgtgtgtgtagtttgccttgtatgaacttttggtgccatataaggaaaaagggttgtttagttttgcattgcaatgatcagctcactgtcaatactttactcataccatatacctgatattcccatttttttttattgttgttgatgtggttatgaaccaaaaaggttaagtgttagtcaagggggttgatctagtggtcaccaagctagggaatgtttggataagaatgtgtttaggaatattctcaagtgggaagtctttggttcgaagacaaatccttggggagggggtgaattggtacaaaccccctccggaatacctccgaagaaggaaacctgtggattatacttaaaaagaaaggttaagtgtgcaattgccataggttttttaaggtcattaattcttgtttgaggtctacattctacagcctaccgtagaatttggtgaaaactttcaacaaggttgagactgatctggttttaaaaagtaaaataattaaataaataaaattgatttattggcaactaagttttgacactattttcttcggccagattgaatcgcttaagttaagaattggtatcattttggtgtgtgagtgtgaatatggaataacaaaactccggttctttattttttttttctgggtgtgtttttgctttgtagttcattttacaatgaatctgtctgattctgctattttgttttggtttactagtgaaagagaaaag

SEQ ID NO: 27640 - DNA, 674 bp, Glycine max
  Intron number 1 from transcript Glyma19g01870.1 (locus Gly ma19g01870) derived from phytozome v7.0 (chr-ID Gm19; pos 1494959 to 1495632 reverse strand)
gtcgtctcatcatagatttcattagtaagaacaaacaaaatattctataccatcaagtagtggacacgggtcaggttggatcaaattactcaaacataaaaattatgaaattatatgacacaaaataaaaatatttctaaaaattataagttcaggtttatttgggttatgacaagttctatatgctaaaatcatatacttgaaccgatatcactatatttgtaaatttaaaatcaaaaccaaacaatgatctaaatagatatgaatttttcttttcaatttggttcgggtaaatcgaattaccaggttgacttaattagacccgttcccgtttgtaataccacatcgagcataattttatacattgtaagtataaatatatttttagaaatattttttttattccacctttaaaaatcattctaaatatatatgaaaatttaatgcatacgacaatccacagttagatcagtgtgtaaatttacattgtcattctaattaaattcataccatgtcacattttcacaattttttggttgatctaccccaggataaattcatgattaattgcataacaaaaggtttgtttcaccatttatctctctcaattaatgttcttttcaatgcatgccaatttagctgaagagttgaagctgccatacttgagtgcatat

SEQ ID NO: 27641 - DNA, 451 bp, Glycine max
  Intron number 2 from transcript Glyma19g27060.1 (locus Gly ma19g27060) derived from phytozome v7.0 (chr-ID Gm19; pos 34228282 to 34228732 reverse strand)
ctttccctctcgatttcatcgaatttgacgttcaggtaacccaaccattatcgtcttccttccttctttaacattttgttcttaaaacaaaataaaattaattcaattgtcggaaagaaaaaaaaaaaagaataatctgccgaagcttgtttttgttctttgttctgtgtcgccgcgtacgtacgccttattttttcgtttccgtttttgaccctgtggcgtttctgtaaataacttacatttcctgcggttttaaatattgtcctgaacgaaactgtgtttcttctgttggaatcggtgccgattggctacttgcttcgtttgtttttttttgttttttttgggttcgtggctttttttttctctgaaaaaaaaatttgaacgaaaaggagaccgaactaaaaaagttaaagcaaaaatgcacgtgtggtttttgtgtaggtgacgagag

SEQ ID NO: 27642 - DNA, 891 bp, Glycine max
  Intron number 2 from transcript Glyma17g11230.1 (locus Gly ma17g11230) derived from phytozome v7.0 (chr-ID Gm17; pos 8432579 to 8433469 reverse strand)
tgctgcaaggcagagggacctgaccacctgaaacagtgagtaactctatttttttgtttatttgatctttttggtaacatacacatctctacccagatttttatttttaatctttaatattccagtgtttagcaatatttttagcaatttagcctgtgatgtaactgggattagacattttccatctataactttcagactttcagtatcatcagcaactagttttgaataccttattattgatttttgggacattaaaaatgaaatgaaattttaaacatccttactaccaggtttcagctttggaatttcgctcaagatcttcatttcatcctctgaaattccaaagttgacaatagaagttcaaaactagctaccaatgatgatgagaatcacaactaagaaaagaaaaatatccctaaaaacttgtatatattaacatggactaaagtataacaacaagcattaaattttgtagaatggaggctgagcaaaaaaaaaaagaaaaatttgtagaatggaggggtgccctttaaggcctatgtattttaaacatctccatgaaagaaggggttgattttctcattcaaatcagttgcattttctgaatttttgacactggtgatgaatggatgatgataattatagttgaaatttgtaatctttttcatcaacatttagtatatatacaaaacttggttcgcttgcattccccgtcttgtttttttaacgactcttggctcgttcatttcagggtacatagaacttttggtgccttttttttaaaattttttttttcttgacatcagggattctatgttgacaccgccatttctgattattgttccatttttagattcacttgcaaggtgaccttagagatagaagagg

SEQ ID NO: 27643 - DNA, 484 bp, Glycine max
  Intron number 1 from transcript Glyma19g22730.1 (locus Gly ma19g22730) derived from phytozome v7.0 (chr-ID Gm19; pos 27822161 to 27822644)
gcctcactctcccagccaacaccgaatcccttaaggtagatttgatttttctttttttgtcctgagtcaaagatcacaaaaagaaattttattttattttgcacatcgtgggatcgaacccatgattcttccgttaaatatattaatatattattaatactaggactaattccgcttgccatatattgttacgctagctcaaaggaattttattttgcacaccctgggatcgaacacacgattcttccattaaatatattgttttacctcgagtgagtgaacatagtgagatcttaacagcagtgtccacaaactatatataaacgcagtgagatcttacactactgcacacaaaccgaatgggttaattggatttgaatttcatttctctgcctcccttaatttcatttcaatttgaattaacatgacgcgtggaaaatatatggaaggtttctttcgcggcaaaggagcttgacgtggcgga

SEQ ID NO: 27644 - DNA, 814 bp, Glycine max
  Intron number 1 from transcript Glyma19g40020.1 (locus Gly ma19g40020) derived from phytozome v7.0 (chr-ID Gm19; pos 46503925 to 46504738)
gcagtggctgtggctcccaactccagcgcaactaggcaagtatatatctccttatccatcatcacatcaccctttttatattaagacttaatcatcaatttcttacccacattattttaaatgatttaatttgatatttaatttttttaaaaataatcaatttgatttttaaatttttaagagatttaatttgattttcaaattttaaaaaataaatcaatttaatattcaaattcttaaaaataaataatttaagtctcaatttttttagaatttaataatcaaataagccttttattagtatgttaccttcttctttttacataattgggaccagttttgtcatgctactggataaaaaaaaagtgtttacaacacactaagatacaaaattacgaggaaagttaagtaaataaaagatgagtcccaccttgtgattcacaataaactttatttaaatcagtacgttaaatacggtagtgtattgttagtattttctaaaataaaataataattataagaaaaatagtttatgcactaaaaggtgtaattatcttaaaaataataactaccatagatttttaatttttcactgatttaccgtatgaacttctttgtacatgcatagctatgtttttattaatttgattttctctttcgtggttttttttttatacataacttgagagaattgttttttgttttggcattatgtggctttaaattgtttgacatgacaataattgagtggtaattaaatttgatgtgaacgagtgtagatttgtgatacacataaaagccggggcatacttcg

SEQ ID NO: 27645 - DNA, 1019 bp, Glycine max
  Intron number 2 from transcript Glyma17g36450.1 (locus Gly ma17g36450) derived from phytozome v7.0 (chr-ID Gm17; pos 40393813 to 40394831 reverse strand)
ctcttcacaacctatcgctatccctccccgtaagctattttttccattcctcttaagattctgtcatgtttttttttcccttataaaacttagatctttgtatgctaggacttgaaggttcctttaaaatttgtagtttgttcactttcttttcatatagatgttaatttgatggcaggaactcttatacatagagagaaagagagtttaatttgtatgtactatcatcaatcaataaaaaatattaggtacgtaaatgaaagagcttaatggctatacatggtctgtgtaaaatttttatactattaaatcaatcggaaatcacttttaatatgactttaagataaatattgtaaaaattaacaaacttaccttacatagtgtttttgtgattgaatgatagtgttaaaaattgttttacccagttggtacatatgtttttttcttgatattaaaagtggacaaacttttcatacatgatcatctgtgattggatatatcttgcaagagagtatcagccaagatgagtgaatgtcaaattgtcaactgtataatcaacaatgaccatccaagtatggtggatatctggtcaagatttactcctttcacttctaatggattcactatccacatgtttggttgcacatactgtgctccgtgacatgtgtccatctgaagctctgtgggctttcttcagtgtcattttcttgttttgacgtgaatttgaagtgcaatggggattaaggacattgatccaaacacacactatctataaaagatcaagtgttatataacaataactgttgtgttgatgacactggacaatttgttatttcttatgtgttttttctgtagccttaagctttacttcatttttttgattgctaacataaacatctttcctctgtagctattttttttttcgtccaagcaatctatgatatatccaagttaattattgtggataactagcagtcttgatatttcgataaattctgagttctgactctgcctggcag

SEQ ID NO: 27646 - DNA, 756 bp, Glycine max
  Intron number 2 from transcript Glyma20g16160.1 (locus Gly ma20g16160) derived from phytozome v7.0 (chr-ID Gm20; pos 22459983 to 22460738 reverse strand)
aacatcatctcgggctgcctcttcttgtctcccgtgtaagcttcatttctctcttaactttctatgtttaggtcgctattcattcattttatccttcttattttttaattaagatatttaattttctatttttaaaaagtttacgatttttttttattttttaattgagacattttgttttccacttttaaaaaatttacaattttaattattataatcaatttcaaacgttgatgtagatgttctgtaaatgttgattaataactttatttattatatatatggaaatgtttttttaaattatttaattaataacaaacttaattcattaaaaaaagaattaaaaaaatatatcatcaactagtctctggaattaatcaaagggactaaaatcacaaattttttaaaaaaataagggaataaaaattatattttaatttaaaatttatactattatttaattacaatttatcattgatatgacttttaagataattagtgtaaaagtcaataaatttattatatgatacaaaatgttatatgtttactcattatgttatttaacatgtagagaatataagtatgatatggtttaattatgctatgataggaagaaataaatacacataattgagagatgttgaaagagtatttaaaatgatcagatgtttgtttatattactcataaaattattttacataagcattattaaaattaaaatgaacatatatatgcaggccaacttttgtccgaat

SEQ ID NO: 27647 - DNA, 1010 bp, Glycine max
  Intron number 1 from transcript Glyma18g07830.1 (locus Gly ma18g07830) derived from phytozome v7.0 (chr-ID Gm18; pos 6564117 to 6565126)
ttattaatagcaggttgctcttctctctctgaattttgtgattatttcagaccatcatgattcggttatctttttattacttatagaagttacagggtttgtttggaaaaaaaaaaatgaaataagcttagcttcaagtacaagttcaaaatcagattttggagaagttaatacgacaaagcttcaaccaattagcttatgcataagctaattttagcttatggagaagtttattaattttttttcatataagtacttaaggagaagtttatctaaatagaacctatatagtctaggttttatcctgaacctggtcatttttaaaaccttgattgagtaattaattataatataggcagtggctacatcatggaactggggaattcatataactagtaattaaataaaaatattgctgtgtgcttatgaccttgaatagtggatcctctatgctaaagctgttgtgtgttttttattccccattttgtatactactagtggaggatcgaatttctcaagaataatatggggatttacattgatgcttctaatgtgcatggtgtggaaatggagttggaatttagacttgtcaagagggtagatggtcaattttttgtgtggagatcaatatggtccttgttaaagcaagtagtgcactattcgctttattcagttaatcgagattttgtgtttgttgaatttggtattgaaaactttgatacatgagtgttgggtgctttgcagttaatgatttgatggtggagtgccattttccccccaatttttaatacattctgaacagatatgaaacttttgatcaagttttccaacttatctgtatggcatttattagcagtttacctccttttttgtagaaggatatatactcttaacttgttaattaggcttataaattgccttacaggttgcattttagttcttcccatcatctaattctgttatggttgatttcagaacacagggatttctggctcttttcactggagata

SEQ ID NO: 27648 - DNA, 409 bp, Glycine max
  Intron number 3 from transcript Glyma18g06580.1 (locus Gly ma18g06580) derived from phytozome v7.0 (chr-ID Gm18; pos 5124346 to 5124754)
acttcttccaccggtgtttccctgacaatatacctgtgtgttttccttcttattctcagtattctgtaacctttaaggtcgtttccagagaattttgtttgttttcatttcatattataaagtaaggtcacattgttttgactttaaaaagatttgtataatgtaatagtgacaagaagatttctgttgttttcaacatttcctataaacaaagaaaaaacattttgtgtacatttttaattatttgtgaaagcaggaaatgaaaaccaagaaatttcctctcaaaccaaatagatccttaacttctcattcaatccttctgattctcttgtctctggccctttctgtctagtactgattgcttaattatgctatgtgaattggttcatgcaggtgtttgataaagaca

SEQ ID NO: 27649 - DNA, 353 bp, Glycine max
  Intron number 1 from transcript Glyma18g44820.1 (locus Gly ma18g44820) derived from phytozome v7.0 (chr-ID Gm18; pos 54553838 to 54554190)
gggtaagtgtgtgatttgtgttcagatcattatgtttcttctctatgtgagaatgagtgctttttttttttgttaacttgtgctgagtctctcagtttcactgtttatcacttacaacacgctcaaccgagttgtcggtttatgttgtgaatagtgctagcaagaatcttaggaaaacactccttttctttttcattaataccttaataataagtagttacaacttacaactaaacatggctcattcctgtctggttccaaattcatacatcaaaagatttaatgatactgagatgttaaacatttccttttggtgcaggtggaacagttggaatcatttcagctgtcaaatt

SEQ ID NO: 27650 - DNA, 538 bp, Glycine max
  Intron number 1 from transcript Glyma18g47580.1 (locus Gly ma18g47580) derived from phytozome v7.0 (chr-ID Gm18; pos 57189489 to 57190026 reverse strand)
aggtaaaaaaaacaactttgataattcactgctgcaatgtatggaccctctttcttggtatgtgtaaaggtcaaagctttttgcagaaattgaattgcacatggggtgtttgagagatttaccaagctttctgtcatatgtcttatatgcatatcttctactcaacatgttatgcagccatatttgggtaaagggtcattttgaattttctattagtattgtgtatgattcaaaggaggtgaggggttttaatggagaggagcggagatgagggaaggagaggtttcacttgtgttggtttggttcaagagaaagggagacaaaggtcactttgctctaaaattaaaattaaaaataaaaaaatcccccattttcatccaaccaaccacattgcttgtattgctctggactttattcatactttctaatctcttagaatcatagaatggtttgacagtctctgctttcaacaactgttttcttattaatatctgtctcattttcttccagatggagctagcaagaaaattttttaagg

SEQ ID NO: 27651 - DNA, 628 bp, Glycine max
  Intron number 1 from transcript Glyma19g40580.1 (locus Gly ma19g40580) derived from phytozome v7.0 (chr-ID Gm19; pos 46951498 to 46952125)
gtgtggaggatcgtcttcttcatcccacccacacagtaagtcttcttctctcctccaacaatcaaatatctcaacaatttcacttcatcagattaactctctagcttctctcgttttacgcctttcatctcaatgctcgcttcgcaatttccttcgtttgtcgtgttttcaacgcttttttttttcttcttcttgagttttgttgtttataatcttcgattgagcgtgttttcgaatcaatagtttatctaggactgcaactactggttcaagcacttcttcataaattgtctttctgtcgagacctattaatcgaactcattcatttaccttactccatgatgattttttctgcactagtagttgcgtcttcttgtatacttatttatggattgcatttgttaaaacctttctgttccattacaaacgcacttagttgaaattgatccaaaacgatgcttaattcagtgaaattaatggtaaaatgtattcatgttgtgcatgaatagctttttctattagtttttttttctctttccctttcctctttatgttagtggatttcagtattgctgcttcattttttgggaatgcaggagttcagttcagttaggatatctatttttta

SEQ ID NO: 27652 - DNA, 966 bp, Glycine max
  Intron number 1 from transcript Glyma19g02460.2 (locus Gly ma19g02460) derived from phytozome v7.0 (chr-ID Gm19; pos 2193967 to 2194932)
attggtcttgtaagttcttcattcccaaggaaattctattatccatttgtgtgtgtgtttgtgttttttccggtttgaatttaattttgatagactgtaatgtaaaattatttacaatgtgaatcaattaggaattactgtgaattcaaaatacatcttgctaaccagtccttaggacactggttaaggaattaaaaaaagaaattttttaatgcgtaaaccatagagaagtgcaaacaatcattggaacacaattttacgtatcccaataaaaaactttctactcttagttccttattcactgcccttgcagcactggttcctggttagcatttgcctaaatataaaagttagcaatctggtctgaaatccatgattgaatgcaaacaaaacagataacaaaagcctaatcccactaggtgaggttgactatatgaatcatactatgtttttcaacttggttaaagagcaaattttcagagatattattcaccatgagattcttcttgagtcttaacaattctctccaatatctttctaggtctccctctcccctttttcattgttaattatgttaggtcatcaacacacaacgtaaaacttgtcaatatactgaatatgtaccatgattgaagaattcattctaataagttcaatttgttaatacatgatagtgggaaaatgttttgtagtgacactggatcaaaattaaatccctttagtgttcgccataagataagatgactacaattgttttgtagataatagattttttggttgagtaaaatggagtttgtgttattggtggactggatagtgtactgctagcatgtctaattttatgaatttggaattttggtcttgatggggtacagccattgcggtaatatgccctctttttgttaatgagggagaggttttggatggacagaataaaagggtagccacaatttttgacgtttcaac

SEQ ID NO: 27653 - DNA, 697 bp, Glycine max
  Intron number 1 from transcript Glyma18g53400.1 (locus Gly ma18g53400) derived from phytozome v7.0 (chr-ID Gm18; pos 61687097 to 61687793 reverse strand)
ttcttgcttttcccattctccattgacactcaaggtacacttttcctattgctgctttctaatctttcatgtatttctctttactttttgttttcattccctaccttttctttatgaggtattttttctggacttgtgctcattttcccacttgccccttaaatgggccttccgtttaaactctaaagtttcaaactttgaatgattattgattgaaaatggccaactggcgtagatttgaattacctaagcaattctaacgaaatgggcatttgtgaatttcttttttcttagatttaacaaggttgtttgtttgttttgctttgcatggatctatactaggctctagttggtatagtggagttaaaatagtccttgattattggtatagtgtttatatttcaaaaccttgccactctagaccatcaaaacctctgaattcatgcacttttcctcttatgtaacaattatggttttgttgaaatagtccttgcttgttgaactgagtttatcagtcatttaaagaatcatctgcgccttcttgtgttatttcacaatgagaataaaaaaagtttaatatcaatcattgtggtttaattattcttatctacggaattgcataaggtgtatttctgggctcaaaaagtatgcttattgcttacaattgagattccatttctttcatttggggcaggct

SEQ ID NO: 27654 - DNA, 1037 bp, Glycine max
  Intron number 1 from transcript Glyma17g37050.1 (locus Gly ma17g37050) derived from phytozome v7.0 (chr-ID Gm17; pos 40916515 to 40917551 reverse strand)
gcagactagtcgttcagctcgccgataaggctcaggtcaccgcccttcctagtctactctatttgcttatgcctagggttttgtaaaaaaaaaacaaaaattccgcgaccgtgattgggccgcaacgtcaatgttttttaagtgttcgtgaccgcaattggaaccgcattggctgcatttgttcgcgattacgcgacgaaactgcaacgccgcaacggccgatatttaaaaccttgatagtaatattaataattagtatctcgctgcatttttaattgttagaatcgaaacgacggctcgtctagggctgcactttttattaatttcgattttaggttatgtgaacgaacttgtttggtctgtttgtttgttcaaattgggaatgaatggtgacaatgtgagtttaattttctttgctgctccacgaatttcaaatcaaaattggtggagaccgatgctgatttgagttagttgtgatattttttttttttaatgtaaggttttgaaagatttccgccacgataatgtcaaggttttttggggtgtttgagtgcaattgtgtttgactgtatttgtctgtaaaattctgtgatatcaaggaactcgacggaaccacaattgcaatttaaaatcatggttgtggtagggtttcattactattgggaatgatttcggacaaatgcagttgatgtggctagtattgcggttgggaagacttcaaaatccttgatgaaggctacaatcgtggttgtggactaattttgaaaaccttttggcgtgctaccggtctgttttggttctttgtgcaggcattgtaactgagttgttaaatacagaatgaatgtttgagtatgtgttttctttctctaatgtgtgctgaacttttactccttgcatctgcagaattatatggcaaaaaaggacagaaagaaagaattatctgcaactattattagaacttatatctcattctcatctgtatttgtgatgcaattttgggttgcaggtttgcacacagcggtcttggaaacgtcctt

SEQ ID NO: 27655 - DNA, 290 bp, Glycine max
  Intron number 1 from transcript Glyma18g46610.1 (locus Gly ma18g46610) derived from phytozome v7.0 (chr-ID Gm18; pos 56327686 to 56327975 reverse strand)
gtgagtgagatcaaattatctgtttggatgctgagaaaattttaatctgcggaaaataaagtaacaacaccacacaacacactttgctatgctattttcattttctttgcaaccaaacaggagaggatcgggaactgagaatatttttttttttaattttacttttatttatttacagtgtagtgtttctgagtttctgttacgaattacgatcttttggtttggtttttgtctgtttgatcttgttgttgcagtgtttgagttcctcgggaacgttcctctgctacaga

SEQ ID NO: 27656 - DNA, 506 bp, Glycine max
  Intron number 1 from transcript Glyma18g36660.2 (locus Gly ma18g36660) derived from phytozome v7.0 (chr-ID Gm18; pos 42976229 to 42976734)
gtatggggatgttgggtgggactaacagaagcattaggccagggtttcaaggagtgccatcatcatctacgctcagttctggaggcatgctttcttctagtatggtggggattccaagccccgtaaatatgcatgctggagttggtgctggacaaggaaactcaatgctgagacctcgggagactgtacatatgatgagggtgagaagtgctcttgttctctcttaatttaattggttctattggaaataattaacattttggagtttgaatttctgcttttggctgtgaaacttaatatccatccaatttggcatcctagttttcacaatgtttccaatagcttctcgactaggttgggcaataagtttatagcaagtcagttctattttgattgatcttgcctgtgtgcatcaattaacatttatggtgatcctattttatttaactaatgatttttcttcccattttctttagcctggtcacaaccaagagcagcaaagacaa

SEQ ID NO: 27657 - DNA, 472 bp, Glycine max
  Intron number 1 from transcript Glyma20g16980.1 (locus Gly ma20g16980) derived from phytozome v7.0 (chr-ID Gm20; pos 23945302 to 23945773 reverse strand)
tttattacttcatctctgagtccgcaggcattcaggttatcatcttttttcttttctgtttatgattgttagataattctttttttcccgtaaatacttatcagagaagaaaattagaagataaactatattgagtttttcatgataaaatcaactcatataatttaatttttggagaacttgattaaaaagaattattataaaagttagaactaagatttttgaacatttcacttttccaaatacccgtgttaacagtcgttatttgtttctatttctccttatattacataatattatctacaatatttataatttttttattttacatctctcatatattcataagtttttgattttttagtcaataatactaatctttgattcgagatttaattacatttatattaaattaaaaactcttcgatctataccatttttttttggcattcaggttctcatctttgcctca

SEQ ID NO: 27658 - DNA, 658 bp, Glycine max
  Intron number 1 from transcript Glyma20g28400.1 (locus Gly ma20g28400) derived from phytozome v7.0 (chr-ID Gm20; pos 37322982 to 37323639)
gggcttgtttctgctgtgtgcgctttgcgtctggtaaccttcatctctttctgggtttgtttttctgtaacctgcgctttcctgttattgtttaatgatgcggttggatcatatgctttcagatgttaatgttggaattagttttcctttccttaacaacaccaaaaaagaaagaaaaacagtttcttgctgaaattgctgtcactacctagctaagttctaatgtctacccaaaatctgttttttttttgtaaaataattctcatctttttccttccgcacttgaatgttgatcgtggcttcataccttttccattgtgtttttttttttcttcctgaaaagttgtgatgtggattcatacctgatacagaggtaaaagtaggatgggaaataattactcagtttatgaacttgtggatgatatatctataaattaatgtgattttttttctttctttcttataaattttagtagggcataactatgtcatttatcagggtccaggtttcactccttgtctttctgcactgctaaaacaacaatattcatatggtgtagctgctttgtcttttgaatttgctgcatctggcattagaacttgtatctcatcctgataccgctatacacttgacatttgacaactttttgcagtgcaa

SEQ ID NO: 27659 - DNA, 808 bp, Glycine max
  Intron number 3 from transcript Glyma20g28400.1 (locus Gly ma20g28400) derived from phytozome v7.0 (chr-ID Gm20; pos 37324412 to 37325219)
ttgcagctgctaaatattcagattgggtaaggtcagtttatgcaatttgattggaagtattattaaactcttctattcttttgccttaaatcctatataagaaaaataacagaatattaatgaataaagatacagacactagaaagtatgattattttttatctattatggtttgcttaaattgctttaatcagttgtctagacactaggtttcaagaagtgacacatctacggatcgaggacatgaacttacacaaacaaataattaaagaactacaacaacaacaacaacaacaacaacgccttatcccactaggtggggtcggctaaataattaaagaactgttaaaaattatttatatgatattgtcttagctctttctgttctacctccagccagcatgtgttgcgtgatgacttggcttctcagagttgatctgatttgattttttttaagagacactggtgatttaattgtttgacttcacagaaattatttagcatgtctgtcacatgattatgaatttaattatatattaatgcacggttgataccaagccaagttttttactgaaactttatttttagtgactataactcctgtaatgaattgaggatgatctacttttcttttaaatttcattattaatatttatatctgcaagttgtggtctctgacaatgtaaaattacattagattagtcattttcttgctgcttgttgtgctgatgttccttccattttaatagttggaaattttgtctacaattcaggattaggaaatctctggaaaagctcaggcctccct

SEQ ID NO: 27660 - DNA, 985 bp, Glycine max
  Intron number 3 from transcript Glyma19g42460.1 (locus Gly ma19g42460) derived from phytozome v7.0 (chr-ID Gm19; pos 48419099 to 48420083 reverse strand)
cgaagcgctgcatcatcctttggggaaggtaacaagtaacaactcttgctctacccgtgtatatgtatttgtgattttgttcatgcatctgcatttgtttaggtttactgtaacgtggtctccatgcttttgttcatccgttattatattttattttttggggggataatttttattgccacccataattccatttgctgttgcttttttttttctttctatctttttgtggttcctttgactgattttattgggcgaaatttcgcatatgtgaaactgacatgtcttggagctgaagaattctctttgatcttaattgttagaaaacagagaaattaaaagctgctccttttttttttgtgaatccttgttaaaatcaagcatgttgttaaaatccccggaaatcttgatgatggatgttttgttgtgccataaatttcttaacagatatattttcttatgtgaaccatgagattctttagttgaattgggtggttgtcctgtatttttggaggcatatgatgctcttcttaaatggaaagcattttggtctttgggtgggggagagatttgttgataaaattttatttagtatgctttctaaactgttggttttgccacctgtgttgctttcacatgggtgtttctaggcaccaaagttgcctgctttaatgctttgtgcaaatagctgcctgctttagtgctttgtgcaaatagtctcatgctttaatgctttgtgcaaatcaagaaaaagatatgcctgtttctttcttgcatggagctcatgtcatcttccatcacatgattgagagcaccgcattagaggcacatattttcattccttccacgtttacattgaatattttatcatggtatactcactaatatattgaaaatttactttgatgattgcatggtttgttattttggttgtgtaaagtgtaggcactcatgtcattgcatgtttgattttatctgaaacaga

SEQ ID NO: 27661 - DNA, 720 bp, Glycine max
  Intron number 1 from transcript Glyma18g41860.1 (locus Gly ma18g41860) derived from phytozome v7.0 (chr-ID Gm18; pos 50829392 to 50830111)
tggcttcagctgctatagtggaatacactttcaaagtatatattagcctagcttaattctcttttgccttatagtacaggatcaaatcttaaataatgatttatataactgttacatatatattttaacaccttatatatatatatatatatatatatatatatatatatatatatatatatatatatatatatatatatatatatatatatatatatatatatatatatatatatatatatatatatatatatatatatatatatatatatatatttgaaatttctctttgattatattatccattttcctttcacatttttctcttatctttctatctctttcttatagttgtacaagaaggttgtaagttgtaacgatataattattcttgtagtatttgttttcaatcatatgcaactaatcactgcctacatattctttcatttcttggtgtgttaatcggttaacaccacaatatcgaaactaaaccttctcgcttaacaacatttacaatacatttggctgtttgtgttttaatttaggcatattaagtattaggacatatatatatttgccacatgatatatatgcatttttacaaaactctacgtctttagtttcttctgccttgaacgtagtttcgtatggagcagtgttattattgcaatttcatgctttgcaggttcaaaccacaacagtcaaccgcttgtgcaataa

SEQ ID NO: 27662 - DNA, 886 bp, Glycine max
  Intron number 2 from transcript Glyma18g41860.1 (locus Gly ma18g41860) derived from phytozome v7.0 (chr-ID Gm18; pos 50830194 to 50831079)
ttgaacgagggaccctacaatatcaccattcattggtaaacccacaaaatcaatatatatgtctttcaaaataacatgaaatcttttgtataccgattctgagtcgactttttccatgtcaatactataatgagcttctcttctgtgtggagcgtagaacatgtttgatagcccttatatattcacaaattctatgaactcaaatactccctttggcgaggtggatccaacctaatacatgtggagccattctaatattacaattagacacataccaacatgagaattaatttgtgttttcctaagtggccatacctaaattctgtactcttagatccttacttttcagtatgactcaaatatgattggtgtctttaaaatttaaatattattgattttttgtttgatcatcttttatttttaaaatgttatagtttagtcaatgtatcttttctgtctcatatatatgattcttcagcttaatgattatgtattatcaatataatttcttttatattattaattaataaaatttatcgtgcgtgcgtgcaactgtgcaaggtccccaatttatattaagtagaagaaaaagacacactctgtgcctaaatgttttttttcataaaaaaagataataaaaaatactgagtgatttgtgaagataattataagactaaaatagtaacttattaatataattataggaaataaatgagcataaaaatgtgtatactataatatcatattctctttatatataattatacataaatgtagttatagagtacaataaatataaaaatatgtacatcaagaaatcttatttcttttatatagaattataaatgactattgttttttaatttttttaaccatacgtgtaggc

SEQ ID NO: 27663 - DNA, 732 bp, Glycine max
  Intron number 1 from transcript Glyma18g47700.1 (locus Gly ma18g47700) derived from phytozome v7.0 (chr-ID Gm18; pos 57285815 to 57286546)
catcacctcctacaataagtctctcccctctctcttttaattaatttgacatatttttcttttctttttctatttcattattcttctacaactttatttttggataaaatagaagcaaaacatttgcaaattaatacatgttctcttttccatttatatgagacgtgccagtttgataaaaacatgaaaaaaggttaaaaaagaagttaatgctagctatacaagtatacgtgaattatcaagatacctatatgttagctatacaattgtacatgaatgaattatcaagataggtatatgcgtgtgtgtaaagctaaaacatataggatgaattttattagtccaatgatgttggattaactgtttttttagtatatattatatatttttcaattaattaaaatataaatagataaatagatgtcctttataatatattaatactaatattacgtacatacctataaatgcttaatatatttaaaaattatcatacataatcattaatatatatacagtacatcacatgcattaatgtttaaatttgttaagttgtattttatataaaaatttattgaaatgaagtgattgatcatgactttttttatgtggcacgtgcctttaattatgaaatatttgaattgcttgatttccaaccgatctcgtttctataactatatgatatgaaacaaatgtagaacggtctaaaagcgtcgaggattcagagatttt

SEQ ID NO: 27664 - DNA, 791 bp, Glycine max
  Intron number 2 from transcript Glyma18g47700.1 (locus Gly ma18g47700) derived from phytozome v7.0 (chr-ID Gm18; pos 57286627 to 57287417)
tggtcaagggtttcaagaatttttctcaattgtttggtgagaaatttaacatgatggtttcattttataatcccttgatttatctgaggatttaatttatgagattaatttttatacattgtcagtctcacaatctttagaaactatcttagatatttttttaaaataattactacaaaagttaatatgataatttattattagatatgacaatatatatatataaaaaaaaacctagcttgttggttaagaatgtgaaagctacgcaaatgtataagtaagaaaaattcaccaatctaatgtattaagattttaagataaagtttgatatcaaaacttgtagtgttttatcccctcgttttccaaaaaagcctttacgctattaatttattaatacattttaattaattgaagagttaaaagtcaataaagaagattataagaggcaccaactaaaagaatacattgcaaatttagtactataaaaaggagaaaaggaaaagaagaaaaaaatgataaaaaaaatctcaaagaaaaattcagacttaataatatttttaaaactttagtttttaactatgttaaatgatattattaggtgatctattcaagtaatcaatttagtgggatatcatttttatgttattatattgtaaaaatcaacaaacttatcatacatatcaatttttaattttcgattagatcgtataaacttttttttacatatgcatatacagactattaaatcttaattaaaattttaatttatttgtgttttgcagtggaaaaag

SEQ ID NO: 27665 - DNA, 630 bp, Glycine max
  Intron number 1 from transcript Glyma17g10330.1 (locus Gly ma17g10330) derived from phytozome v7.0 (chr-ID Gm17; pos 7733282 to 7733911)
gttggaaatccagagctggtgaagatactggtaagaaaaattatgtttatattcactatggttgtgatgtatgaagcaaattcgataccgataccttttggatacttcagctatttgtgaagtatccaagccttaaaaaagttatggaaatccaatacgaatataatatagaaccatagaagcactaaagatggaaattgttgattacaagaaaggagtgagattgatactactcctacttatagacaataggaactgatttataatcacaataatagtagatataaggtgggttacatgattaagggagaaggggggagagaaaaggtcacgggttcaatcttctcggctaacaaactaacatttatcaataaaaaaaatcacaatgatttataatttttatttgtttttcacaatgtccaagaagtatgatcttaatttgaatttgcaaaattgcaattatatatttttttatacatattcagatatatcttgtatgtgtcatgtgctatatgtttttttgagaataattgtatcgttgttgtattgtatctgatacacttatagcatccatgcatcataagttatgatcgggatgaattaagttgttgcttgtgtttgatacagttg

SEQ ID NO: 27666 - DNA, 868 bp, Glycine max
  Intron number 1 from transcript Glyma20g30650.1 (locus Gly ma20g30650) derived from phytozome v7.0 (chr-ID Gm20; pos 39368052 to 39368919 reverse strand)
agtcttaagggtccactctgggaagaagttgcaaggtacacacacatatatacgcataaattcactattcatgtatgtttattttctggtttttgtgttgatgtgtcagcttctcctcctcctttgtctatgctgcttttcttttctctttgtcttgctagcttcttcgacatcatgcatgaagatttatgatttccttttcaatttccaaaccaatcactttgtgaaaaccatttgctgtcagttgattttttattttattttaatgaatcaattaggagggagggagcgggggtaccttataatttatttatattttcaatcatacatatataagatatatagtaattaattaatcatattcctcctagagtcccgtttgtaataagattaccaatatatcattcaaatcattctgctgaaattcttctaactgaatcttgtgttatgaaagcatatccttcgcgagtccatatatagttgcaatgaatcatgttgtgatgagttaaatatttattcggcaggatttgctcaatcaaattttgttgagtttatcttcttaatttcttggcttcatcccttcagttgattggtttgcgtacgtcttattcagtactcttataggtattaaactaccatcgtgtttttattagtacggcaaaaccgtctaaattcttacctttctttacgtgaaaagaagtagctttatttttcgttttattttcactatttccaattttcaatggatctatacatatatatatgatgatgatgatgataaaatttgatcattttctttctttcttctctctctatattatatatgtgtataggaaactatcagaactgggttaccaccgaagcgcaa

SEQ ID NO: 27667 - DNA, 427 bp, Glycine max
  Intron number 1 from transcript Glyma18g11320.1 (locus Gly ma18g11320) derived from phytozome v7.0 (chr-ID Gm18; pos 10093771 to 10094197)
aaggtgtcatcagtgccatctattttaacttgttggttagcacctgtcctgacctctcccattcatcaaaagcttagttgttatttattatttgttttttcttttgcttttaaacacaaaatggagttaccaaatccattaatgagtaatttaagtctctttatggccaaaagacactagcaagaaaaggtaaatgtgcattctgattttctttcatttttccatgtggggaaaagtttggtgtttagtcaatatgaaagaagaattatttcttcttcttcttcttcttcttcttattattttcctgacatgacttgttggacttttttataccttatctaactttaatgtgcaaaatttcaatttggtatgtcatctgcattggtaacactttggttgtgtataccattggttggtgtaaggaaga

SEQ ID NO: 27668 - DNA, 638 bp, Glycine max
  Intron number 1 from transcript Glyma20g28350.1 (locus Gly ma20g28350) derived from phytozome v7.0 (chr-ID Gm20; pos 37270055 to 37270692)
gccactctatcaggtaagtagttcatatatatggtgactttttcagtctcatcacttggttttaaagggcttttatttgcaatttttctcttacatataatattgatctattttgtatttgattgacagagtgacagtagagtttgtaatctaatattcttagaagaaatattattctacactacaccctggttgagattctagaaataagaatgttgcattactataatatttgagaaataaggacacagacaagttataattttattggtggactaagttcatatatctctaaaatctaccatatttttgaagcaaatataaggaaagttaaaaagcactgaaacacgcatatatgcattgtagaaactaagaataaatctcaaaaagttgaattttatgaaattttattttataaaaattgtgtttatatctttttttacatagagtctcaatgtctaatccatacttgcaaatatttataaagtgaaaattaagtacaaaacgaagatttaatatgcatggttggaccaaaacatggttgtaaaagtctcacaagacctttaagtatatatgaatgaactttgatgtttttaaatgtatgagcagctgggcaaactgggagttccacctgggat

SEQ ID NO: 27669 - DNA, 429 bp, Glycine max
  Intron number 2 from transcript Glyma18g48800.1 (locus Gly ma18g48800) derived from phytozome v7.0 (chr-ID Gm18; pos 58214831 to 58215259 reverse strand)
taggtatgtttccgactcagtttcaattcttcttgtcgtgtctgtagaaggcaataaaacataactgaacacacaaaaagaaggcaaaagaaacctatatcatataatacttgtatatcaaaatcaaaataaagggaataaaagcaaatggttcttctgtgatatctacctagaaagtaaccctaaaaaaagccttttattaggggcaaagggacagaaattgatagcaaaaaagattgaatgataactgtaaagcagattccttctttattgtcacgacaaaagttgtgacgtatcatgttttcattcccatgttactttgtcttggctgctatgtgtttgattagaatatcaattgcatgtgtttcacaatttacactattaaccattcaggaagaacaagacgacaacatcacattggaggaggtt

SEQ ID NO: 27670 - DNA, 546 bp, Glycine max
  Intron number 1 from transcript Glyma20g29950.2 (locus Gly ma20g29950) derived from phytozome v7.0 (chr-ID Gm20; pos 38737489 to 38738034)
gcaaagtgtctctctaacctctgcaaaagtccaaggtcagtctttcctctaaaccctaatttcccaatcccctcctcctccttcttccacaacacacttcgcttcaatctcggtgatgggttagatcatcgtttgtgtgcacaatttttgttctccgattcaaaaaaaattaacttttgcgatgtcagtaggtggtcgtgcgtttttgtttcttgggttaatccatgtgatcgtgagaagtgaaattaggggttgattggaattttgggtgcaatactcggtttaattgctttgtagaatgaaattatcgagcttcaatttagggtatataaaacaataatgtgaacatgttctgatggtttgttactttgttttgttttagatggatgatactcttcctactcctatagtgggtagacctgagagaagtttttttttgtgtgtgtgtatgtgtgtgtggtaggaatgaaaatacttacatgtgcttacaagttccatttgctatatgcaggttgcacggttttaactgcttaggtttttgtcttc

SEQ ID NO: 27671 - DNA, 345 bp, Glycine max
  Intron number 1 from transcript Glyma20g26840.1 (locus Gly ma20g26840) derived from phytozome v7.0 (chr-ID Gm20; pos 36171510 to 36171854)
ttaccccttcctttccctctcaaccaaccctgaaggtatgtcctactgcttcatttctctgcctttccctttgcttttcaattgtgtatggtcaatttggtttctcaaaattcatagcatctgaggaacttacaatcgaagctcttcttaagtatagatcatatgttgtttttgtttcaattgtttggttttcttatttttgttttgggaatgaaaataattaaatacatattgtgtttcaaaaattagcaattttctttggcctcttcttagctagcaaacagactttagcctggccttaatagttttgatttgatccaaataattgtgtagggaacgctctgc

SEQ ID NO: 27672 - DNA, 342 bp, Glycine max
  Intron number 2 from transcript Glyma19g24220.3 (locus Gly ma19g24220) derived from phytozome v7.0 (chr-ID Gm19; pos 29600909 to 29601250 reverse strand)
gtggcagcttcaaacaggcaaggtcctctttcttcttgttcagatttagtcaaagttgttttgtttttatggttagttctttagttctgggttaaattatttcagcatgttaaagaaatattggattattgtggtctaaagctgaaaactgggaaaatattattgtgcttggtttgagttgttttaatgttcttgaacatttgaggcattaatttctttgggagtatgttggtttagttgttatagattgattcttgagtggttaatgtagttatatacttatattatatagtatgatgacttgtagacataaatctgcatatctagcttgcttttttcaaa

SEQ ID NO: 27673 - DNA, 221 bp, Glycine max
  Intron number 1 from transcript Glyma17g33510.2 (locus Gly ma17g33510) derived from phytozome v7.0 (chr-ID Gm17; pos 37413974 to 37414194)
gatccctttgatttgattcgcaaaggtataattttttcattcaagctttccataaatttcagatctttcacttacccatctcattaaattgtctgtttttcttcttctgttattacctgcttttgttctgttttgattaattgtacttattggttttttttttttgttgttttctgattcttcaaggggtttaattgcttgagatctcgtaaaggttttgg

SEQ ID NO: 27674 - DNA, 707 bp, Glycine max
  Intron number 2 from transcript Glyma17g33510.2 (locus Gly ma17g33510) derived from phytozome v7.0 (chr-ID Gm17; pos 37414206 to 37414912)
gaaggttgtgtttttgtttgctcttgctttgacttttttctttttgtcttcagctggttttattctgttgcacttttattttgtttgttgttcctgtgatgaggtttgagatttttggatgttttgttgggttttaatatttgataggctttctgtgtagatacaattgaacaattctttaaattgttgtttacttcatcttgatcactttcaattatttgttcccgaaaaaaattagggtttttgcttctgtcctgctgtttcttacttggtgataactgttcatcaatgcattttttatgttcatgtgattagttaaaggttgttgtgtctgtaattcataatacatagtccctttgttgtccaattaagttttatgggattcactgccaagtttcaattttgaaaatggtcatcctatggttgcttgataatcaacctaattacagatgctttatgtatgcttcacttctctgttgatttgactatgcaaattgttttaactggaattcaatattgagttgttcatttgtttgcattcatatttcatgtgatattggatacagttgaattcatttatctatgcatgacacttttatgatttttatttttcctgttattttgatgacagtttggttgatcaactagtatgaccaaattaaattattgcagggtttggctgaagctatctggaatatttgtgttac

SEQ ID NO: 27675 - DNA, 1031 bp, Glycine max
  Intron number 2 from transcript Glyma19g40160.1 (locus Gly ma19g40160) derived from phytozome v7.0 (chr-ID Gm19; pos 46618557 to 46619587)
tgcaggtaattttgttataaaaatgttttatactatcaatctatcatatgcagtgcagattaatttgttagatttcacctttttcttcagttgaggttgactattatttgacttattgttcttaaggttgatataggttcttgtccaattatttgttttggattcaaaatagaaagtaataggtaggttagtggataatctaagtgctgtttgctcttaatcagttcaggactctggagattgtcccaaagatttatgacgtattgcataaagtttttcttcatttcaactatgattatctgacattattgttaaattgtagctttagcctctcccatccttttaaagcccaattgccccttttctcatttctccttgtttttcatgtattacggtatgtgagtttatatcctatcctcatttggattttgttctttgggggtgtgtttgagagttagaagctaatggaaaggaagggaaaaaaaatgtagggtaaacccttatttttgtttggatgttactaattcacaaggcaaaagaaacagaggggtagttaatttaaaaaagatcaacaaatataaatttactatcacgcacctctatttttgaaaaaaaaaatgtaaattaacttaatatactttttttgactgacccgtcctccaatttaggggaacccagaaaagtaagggagggtttatgaaaaatccccattccctaccctcctaccccaaaacaagagaatggctaatcataagcctttcccttccctctcttttcctcttataatccctcatccaaatataccattggtttcattacaatgattttatgccatttctttgaaatagttctttggcgaaaagtggtttgtaaatagacaagaatttacttccatcttggttacttgcttcaaattttaggcaatttatgatatgctagttcttgcttttatcttgagattggtatgactaacttttttgtatctacttttggcagcgttcccttgctacagatcttcagaacctgtcaat

SEQ ID NO: 27676 - DNA, 396 bp, Glycine max
  Intron number 1 from transcript Glyma17g37090.1 (locus Gly ma17g37090) derived from phytozome v7.0 (chr-ID Gm17; pos 40940415 to 40940810)
aagacttgttcctggttagtttttgtttttatcggtaaatgttactaattaatgtttgttagcgaagattcaaacccatgatcttcttccctctcttctcaattcaccactaggccaattttatatttccgttcatgattagttttgatctcatccatctttgcaatctctatgtatagtttgaatttcagagaagatattggtattgagttagagtaatgattgttttattttatgattattattttactagcattagttcttctcctaattaaaagcatgcttgctatgtatataattggtgtatacactttttgcagtggtaataattatattttggctgttactttgataatgaaaggggctggactttgtaatatcagaagccaggagata

SEQ ID NO: 27677 - DNA, 898 bp, Glycine max
  Intron number 2 from transcript Glyma17g37090.1 (locus Gly ma17g37090) derived from phytozome v7.0 (chr-ID Gm17; pos 40940936 to 40941833)
ctatagtgaagggatactacaaaaatcacgtcaaggtaaccgcttccttagtagctactactttgttaatttagttattttgttttccttattttcattaatattatccagccacaatttttggattttaatatgagaaatcacattcttacttcaatattgtacaatttgtttttcaaatatgaatgaaataggaaaagaaaatgaaaagtataaacgggagaaaataaatgatgtgataaagaaaaaaaaataatattatataagaatattgtgggaataaatatgtaacctttttatatattatgacatgttattcttattatggaaatgttataaatttgcgctggggaggtatcgttatgaatttgcgctattactcaaagtaatgaaatatatacaggattaaactacctaatttgcataattacggctaatcacatatctacaatatctgatacaaatctcccattcctgaaatatagtttcttgatttctaaagatacagtttcttaatttactaaaatccgctaagaaattcattttcaatgtgacctgccaagaaataatgaaccgtattatagagacttagacttgtttaaaagaatgttgttacttatacactcttgcaatttcactgccttgatgttcaacatgtgcattcagttatcgagcagttcttagatgagtaaagtgcatttaattaagtacgaccaatcaaatactacagaaaaataatttcagcacgggctttgtagtcctttttattactcctcgtgacaacatttttgtaccaacgattttccagcgaaaaagacatataagtggcctaacattgaagttttcaatttgtgttttgatagagtgtacttacaagacgtaataacttcacggggat

SEQ ID NO: 27678 - DNA, 485 bp, Glycine max
  Intron number 2 from transcript Glyma19g02520.1 (locus Gly ma19g02520) derived from phytozome v7.0 (chr-ID Gm19; pos 2315163 to 2315647 reverse strand)
caggtatgttaaattttctttctttctttttctaaaaaaaaaactgaaccttttttccctactttctctctctttgttttgttggtcctaacctgtgaacaagaatcgattacacttattggaccattgcttctgagacttcttcgtgtgtgactattgttgttgtttcatgagccacttcacatcgatcccacgtgtctgtcaacaaaacgcactcgtccttttccttcacttgtcaatctcactctcaccacttaagatttttcctgcctaacattattatctatcactccattctcatctttatcatgtattagtattaccattgatgattggtacacatttctattaccttaattaaataattgaacccccctaccatgcatcaaattttgtaacactaaaaatagcaaataaaaatcatctaccatttcttaattccttaattttttttatgatgaattaaatttttcaccagaaattgc

SEQ ID NO: 27679 - DNA, 700 bp, Glycine max
  Intron number 1 from transcript Glyma17g18240.1 (locus Gly ma17g18240) derived from phytozome v7.0 (chr-ID Gm17; pos 15465411 to 15466110)
cgaagcaaaggcatctttcacttctctctccttccgttctctttcaattttctctttcaacttctttttttcctcttgatttgccggttccacttgttcttttcgtttggaattttatagctaccgttaacgaaatctttacagttgctaactgctcagtaaccgttccgcacagttttctgtgttagggatttatttggcttgtgtttttcgtgttctcgtttgtttttagtttgtgaaaaagaaatagcgaattagcgaattttccttgctttgactgaattgtgacttaacagcactttttccttgttacggagaaactatgaaaggtcttttacggtttctcatcatttaccctattttctcttgtccaatttaatctgtaattttttttttggtgattttaatctatatcgcaaggcatgtaatttttctaacgtgtgattgctttcgtgttcttcctgggattttcatatccacttttcttatcattatgaaattgagattattttttagggttatttcaactagtcttttttctactacgtttgtctgtctaatgtagggcttcgtagtaaataataattaaccactctctagacagagtgcgttttatactgttcttttcccttgtcttctcgtagttgtgatctaatttactgcaggcagagtgcgttttatactgttttttccccttgta

SEQ ID NO: 27680 - DNA, 860 bp, Glycine max
  Intron number 1 from transcript Glyma18g02670.1 (locus Gly ma18g02670) derived from phytozome v7.0 (chr-ID Gm18; pos 1699162 to 1700021 reverse strand)
gaatcctcgcctgccattcgttcctttcactgtaactctctctctctcctcatctctacctgcattttttttttgttatgaacgtgctttgccgactgccatctctgctcgtgtgtttgcgacttctgatcttgctctcttgcttttcggttttatttgctttaatttatgtgacatatatgaggaaaaatcaaattgaaaaacagttgaagaataacaccaaagaaattaacggaaaaatgaggtagcattgacaggttattttatgctaatgctaagtgtcacgtatttatcagaatcacgagcataacattttcatgaaggcagttgaatgtatccttcatgtttctacaaatatatatatatatatatatatatatatatatatatatatatatatatatatatatatatatatatatatatataaccaaaggatgctctgcaatcacctaagagcatgcaattggcattctgttgggtcatatagtaggacacaagggactgtgtttttcttttttttaaattattatttattaactttggtggtacccataggctgtatactatttttgattggaaacacttgtcagaaatatttgtgttatgttggtttttttttttttcttgtcttgatccatttctgttaaataaaacaatgtgttccgttcttttcccgagcctttttgaaataggcttacttctttttggaaagattcttaatgccttcttaaagggtcaattttcataaatcataatacaatatttttgtaatacttcaatgttttttatatttttaaaggggcaaattttaccattgcaaccagatgcttaatcatgactcttggatttcagatccc

SEQ ID NO: 27681 - DNA, 926 bp, Glycine max
  Intron number 1 from transcript Glyma20g37480.1 (locus Gly ma20g37480) derived from phytozome v7.0 (chr-ID Gm20; pos 45366040 to 45366965)
ggagtcatcaccacctacatatgtatggatttagcattgcatgagatcaagttggaggttcctatggttgccccacttttgtttcatggagtatgtaaatttgtgattgtagatttaattgtgtctcctcaatgtttgcactaaatttgtcacacgaaacacacacaagaatccattttgcatccaaagtgtaaatacataaacactatggcattgtttccttgttggataagtgctttatttatggtacgaaaaataatagtgtaatcaatgacagattcacatataaatgagggggtgcacttgcatctctcacttttataaaattacatataaataacttgaatgtgtatattttatccccccttctaattttatatatttgatcaactttcattaattttttacttctttcatgataataattattaattttattttttaaatagattttctccctgatttaggattctagatccaaaagactgtaatataccaatctctctatgaatttaaagcaaaaaataacttaaaaaattacataatcaaattgaaattagctatttaatttcgtgtgtagttcttgtcgatccataattccatacaatatttctagaattttcttcgaaaaagacaatagcaaattgtggagttgagtcctttgtaattgtgctatgaatatctaaatggtgagaactacaaagagaaaatggaaattgttgaggtatcctttgtaattgtgctctaaatctaagtaggtaccagtatgtttattagttcttagttttgaaatttttgaaaattaaaattaatttagttttcaatttttattaaatttaaatgaaaaatcatttcttatttcttaatttaagtttgtttggaaatggagccatcaagttatcatgggggtaggggacaacaattat

SEQ ID NO: 27682 - DNA, 653 bp, Glycine max
  Intron number 2 from transcript Glyma18g15520.1 (locus Gly ma18g15520) derived from phytozome v7.0 (chr-ID Gm18; pos 15602913 to 15603565)
ggaagccaaagttctgtccatttaggctttccaacgtaagttgctattggtatttcttctcctaaaattttgtattagcccatcaaaggacatgaaactacatccttttttgacttaaaaatttgtaccttttatacaaataagaaattactgacactaacagtttgctgatggaaagtgataaaaacagcaactattaggccacttttatagacatgatgaccacaaaaaaaaaaacatgttaatagactaaaaccagtagttaaatatatagtctagtagtggacagtggtttaggaacatgtgaatcatgtttgaacaatctgagatgccaaacagcctatatatataacatgcaaattatgcttgagagaaagaaaaggtcaaaagcattgcctttagatgcattgtgtcttcaatgttataatacagaacttctgtatattagtttttgagtattaaacttaacttttgccaggaatacttaaaatgcgcttatttgcttgtttctgatttcagcccaatccattcagatatcatttctacatatctgaagtactgtgtgtttcaaataaatttaaaattaagaacaagaaaaatcggcatgtatgttttgttctacactattcaatgcttttggttttggtttcagg

SEQ ID NO: 27683 - DNA, 592 bp, Glycine max
  Intron number 2 from transcript Glyma18g02720.1 (locus Gly ma18g02720) derived from phytozome v7.0 (chr-ID Gm18; pos 1744521 to 1745112)
gtctatctcagttactctttatcaatttttctagcgtgtgtttgattaatcttcatggatgtggtagatttagtttgtattcttccttgctgttgattgcttgatacttattagatttttggattattatgacattattgtgaagtatccctaattttgttgataactttcttaaattatttggttggatatcttccctgaaatctctctctcaacaacatttttttgtctgcaagactcaaactcaaaattttccttaaggatttgagtctagtgttactcgatctatcggtagatacttattaattctctttatatgagatgatagccaaacaaaacattaagagaaattaagagcagactctctaacatactcttctctaaacaaactgaattatcttgatttattaatctaaaggattagtttttgtatgcatttgttaggtgattattcatttggcctttcttgatgttgtttttagcaccagtagacctgagttaattctctcctttaattcaagaattgtagtctttaggacattaaaaatctgatcaagtgtttctttctctttttgattttaggtgtggcttg

SEQ ID NO: 27684 - DNA, 652 bp, Glycine max
  Intron number 1 from transcript Glyma20g22510.1 (locus Gly ma20g22510) derived from phytozome v7.0 (chr-ID Gm20; pos 32486698 to 32487349)
ctgcacaaccagacagagattcaacgccgaaactggtatctttgctagccccgtaactctgtttctttcttcattgaattagtttgctacatctctctttatggtgagagttgctgtttaattgatgaatttggggttttgttcgaattgttgtgaaagcttcttagcagtagcagcagacacaacaattaatttcgatcacgcgtctcccatgaccctatttattattattgaaattatttttcattcgacagtgacagatagaccctcatggcgggtcactgcttcctctctctcctctcaattatggagggattggattggatgcatagcctggtgcaaccagtgccagaaaaaaaaacaacaaattcgtcgaaatttcattggaatcaaattttcgagccttactttgaatttgaatctagtaaccttttcgtgaaaagaagaaccagtagtaccttctaagctactactttattgtttatttgcttaattcgtttattttttgtttcttgcttgggtataattataattctaattgaattaaatgctcaactaccgtgttcacacggaggaatgaagttttaattaattgctttcatttcttgaccatgaagtgcttatccctggtccataggatctgatttgctgc

SEQ ID NO: 27685 - DNA, 827 bp, Glycine max
  Intron number 2 from transcript Glyma18g04960.1 (locus Gly ma18g04960) derived from phytozome v7.0 (chr-ID Gm18; pos 3713260 to 3714086)
gtgatttcaggctctttggtaagaaattaaagcaccaaaaaatgaaaatgtttttggctttagcaatttctgttactccctttttaatgttgttccaaatttgatgtttttctcttctattagtattagtaaattcttacgtttatcatataaagaaataactcattttaacctggccttttgtattatatattcatcctaatttaatgattataatagatttttcttattccatttattttttcacctggccttttgttccctttcaatttgatctaaatagaaaagcaacagaatatatttcgatatattttacttcacagttcactctatgtctcattgtatttcattgcttttttcattaaatattcaatagtcttaaaaaaatttgagttcaaaatctaattaaatcccataaaaaacatgggactgagatctcaaaacactattatatttaggacaatacatctagagagtatacaaataaaggtaatcagagaaaatgaatctaaaatagactttattctatcctaaaatttgagtttaaaaactaattcaattttataaaactaactcataagatgaaaaatgttcaaatattataatctgatagcgtgagatctcatagagttttgtaaattttgggggcaattttttaataaaaaattagatgaatcgtattttgaaacacgactttatagtgtgaagtcttgtattgactattggtttcaattaatgtcatgggagtcgttaattccatacctcaatttttatcttattatttattatgcagaatccagggctattataaggtattttgcatcaaa

SEQ ID NO: 27686 - DNA, 582 bp, Glycine max
  Intron number 1 from transcript Glyma18g44180.1 (locus Gly ma18g44180) derived from phytozome v7.0 (chr-ID Gm18; pos 53864031 to 53864612)
catcgaaatttgtgattccatcaattctaatcattggtaatcttcaactgcaagaaaaggagaaacatagagatattagatagcatatcaatttcgatactatattttgttttattttattttttgaggggttgactttgatcaaccgccacatggttatgatgtttgtgcttttgaatgttgatgtttcatttaatggttgttggttctgttatcagataaaatttgggggctaaagtagttgattttagttttttttttttagtttttgtttttgtgatgaaacggataaggtgattgtattatttggaaaatagtggaaactggttgttctttttagctgattatgctaatttcattccattttttttttaaattctgatgattttcaattttctcatgcataactgttggtcttaaaactgaacaataattcagtctaaacttcctctcagaaaaaccagggtccatggatgattgtacaaactagtgtgtcaagttgcttctttcttgtttttctggacacttttttactgaatctttgatcaataccacatgcttaatttctcaggcagccaaaag

SEQ ID NO: 27687 - DNA, 870 bp, Glycine max
  Intron number 1 from transcript Glyma18g06920.1 (locus Gly ma18g06920) derived from phytozome v7.0 (chr-ID Gm18; pos 5575765 to 5576634)
cacataaccatatggtgtgttaagttattttgtttggttgcaagtgttttctttttggttcaataatcactctaattaggattttttggtttcttggtgggacccaaggttattccacaagtttcatttctttgaattgactataaaactaatcatttaaccacacttaaaattcatcatcacttctcaagagtgtattatgcaggatcaaattcaattcctgttacaagtttttctagccctaaaatattatccgatttctaagtttgcacatgaagggcatgtgcacactcctttttggaaatgttaacatatgacataatttacaattattgttggattgatgtacctcaaacaaataaaaaataaaaaggactttgaggggggtgatgaatgattttggagtggacatgtttagatgactttagagtggacatgtttgcctattttttttttttttttttttttattttgtgttcacacctatgtgtacgttacaacttcgggactagcagtgtgagctacactctacttttaacaagcaacttcatgattttgttatgtagaaattttctaaaactgaaaaagacaattgacttataggatatacagaatttgaaatgtctggagtatcttaagtgatgaagaatttgtcacttctagatttaatttttttgtgccatttaattggaatttgggactcaaattaactttctaaggcagtgtctattggcccgaatgaaaaaacaatttgatactattattggttgaacttggaagataggtgccatagcagtgtggcttaattatggagaatttggcgctttattttgaaggtgcactgtgagactgtaaccgaaggagtagaga

SEQ ID NO: 27688 - DNA, 896 bp, Glycine max
  Intron number 3 from transcript Glyma18g19340.1 (locus Gly ma18g19340) derived from phytozome v7.0 (chr-ID Gm18; pos 21029409 to 21030304)
aaagctttgcagaaggttttgtctgctaggcatttggtgagtcaaaaacttgaaacagcagtagtgattgtgaattcttttggggttgcttagcatgttacaaactatattctatgtttaatgtcttggttggtactattttttctgtgtggaactgtaagtttatctatgttgatattggatgtttttgttgtgcttaagatggacatagaactttgattgggtttgggtccaatctaatttgttttcaaccttcctgtggttataataactgatgtggaattatggaactataaacctagagtaaacttctagggcaaatactaatctaacttgggtctgagatgttatctggccaaacaaacagaaatatctataatatttaatcaatattttcataaataaggtgttgaatgtatatgttgatgttttcaatgacgtgctggattgattttatgattcttggtttaactcatttcgaagaaataatcatccattactggctttttaggcagtattttgcaaaaaatgtggttatttctaccttaaggggtaaattatggttttctgccaagtagtaacaacattaaggggtaaatattgatatgtaccataaagaatgggtcttgactttgcctttaagttttctacctttacatttttcatttatattccgacctctccagaccccactaggcgggagtctcgagctctgggctacccttttatattgtaaaactgggaaactgctgtattagactcttaaattgtaacataccttcagtttctcccttgttttaagtttaccatgacaaagtggaagcctttggtggaactggcatgacatcatcttttgactctaaatgcagatttatcagcatcaacacaacaaacaa

SEQ ID NO: 27689 - DNA, 169 bp, Glycine max
  Intron number 2 from transcript Glyma17g06820.1 (locus Gly ma17g06820) derived from phytozome v7.0 (chr-ID Gm17; pos 4900720 to 4900888 reverse strand)
ctgaagtgaaaaaagaagaggtcagtttttcttttcttttctttgcatggttcagtaatttcaacattttttgtgtgtgcgtagtaatagtagtagttttaatgttttgcgtgtatgattttctctttgatttggtatttatgtttagttattagtgatggacagattt

SEQ ID NO: 27690 - DNA, 927 bp, Glycine max
  Intron number 1 from transcript Glyma18g46540.1 (locus Gly ma18g46540) derived from phytozome v7.0 (chr-ID Gm18; pos 56257856 to 56258782 reverse strand)
gtgcaccacagctttttgatcctgttcctaaattagtatgattcccttttcccttttctctgtgctctctgaaacccatgttgcattctctcttttgtgtgtttggggagttgaatctgttctaattatgaacccagttctccaaagtttgtgtaaatttccatggaaaagccattgtggctgatgttttacttgtttttctttgtgattttgggggtccctttggtgtgatgcggcattttctgctcttttttggaactgggttaggaagctttttatggcattgggattggcctagagtaattccttcattttgtttttgtttcacttgtacttttttgcggtggtgattttctgggtgtcggcacttgtattgcttggtgtttaaggtttttgatgggtgttggtcagagtggaccttttttcatgttcttctagtcctttatcttcaacatgaagcctttttttgttgtttcttatagtttggtaagctgtacatagttttttttttgtcttctgttagacatgtcatattgtggttggagagtggttctcttgtgttgtgttgatgccttcttggctttccttcttttcctaggatctatcttctactttatgctttattttgtatatgtgtggattcatatgtttaatttatatatatggtgccattaatgagaaattttatctgctggaagcttcagtatttttaattttaaggacttatagttgttcttctcaagatacagttacttacagctgatgtaatttaagcacttttttgacactcttgttggtcattgctcattggatttcatactttttatggtattttgaggtgttggtgtttttttcctccacaatttgtcactatactctatttgggaacagaactaggtgataacttttggtgtactgaatattggg

SEQ ID NO: 27691 - DNA, 793 bp, Glycine max
  Intron number 1 from transcript Glyma18g44130.1 (locus Gly ma18g44130) derived from phytozome v7.0 (chr-ID Gm18; pos 53804341 to 53805133)
ccggtgaatctcctagaattgttgccacggtatgtactgcgttaattcttgtgtgttttatatatacacaagcacacaatacacataaacttaagtgccttttttatatagcagaattaggaaattaaataaaagaattcgaagttcttgaacaaacaagagaaactccattgttaatctatagaagaagatttggctactgaggcatcttatactcattgatttccttcaataagttagttagttaattaggtttattgattcaatattcccaacaaaatctttaaattttcgtaatatatgattatatatatatatatatatatatatatatatatatatatattaattaggagatataagactagtttagtggttaagaggagaatgaagagagaaagaaggtaatgaatttgaattctttcaaccaatatatttaataaaactaacaaattaacaattataaataaaagaaaaaaagccaataacatgcatcaagtcaagtcttctctgggatcaagtcctttaatttcttactcatccactgtacactatcacagttatgtgggcttcaattcattaggcaccacattcttcacatacgtcagtgtcaccatatgctggtgtcttgcaccaaccaaaactaaattgtgtgtttatatataggcttgagtttgacttagtcctccatgactacgtataaacacgtgtatccgtagattataccgtatcttgcaagttgctgctgcttgcttgatattgtagaacataaatatttggtttatatacacat

SEQ ID NO: 27692 - DNA, 230 bp, Glycine max
  Intron number 2 from transcript Glyma17g33900.3 (locus Gly ma17g33900) derived from phytozome v7.0 (chr-ID Gm17; pos 37809389 to 37809618)
ttcacaagctctttgagactttcttggagaagagagtagaaattctcaggatcaatagagacttatttaaatttctttggcattgtgttttgaattggaaatcaggaagaagcaatttaaatttaatttctttggtattattttaattattttcttttctccttatttcgtttcatgcaacatcgaaaaacacagtgtaggagttggactaaggtttcttccaattttca

SEQ ID NO: 27693 - DNA, 514 bp, Glycine max
  Intron number 1 from transcript Glyma19g33800.1 (locus Gly ma19g33800) derived from phytozome v7.0 (chr-ID Gm19; pos 41386717 to 41387230 reverse strand)
cgactccaaggttagtaattaataatacctttggttcttctctcattagttcctctagctaggtgtttgaaataagcaatttagtagtttcattaaaactagagattaattggatcatgcacactcttcgattatttttttttttatcgagttagttttttttttattggtggaagaatttgaacttatgatctctggcatctattttcccttcataactaaatcaacctaataacccttcagacacactcttatgtgggtgtaatgctactttctctccacatttcacggttaacatatagtttggttataattatattaatattttaattagtgttatatatattagaagtcaaatgtttgattgaattgatataaagcatttggcttcactgattggattttgtgtgataaatatatatatatatatatatatatatatatatatatatatatatatatatatatatatatatatatatgtgtatgtgtgtgaactttccaacagatacat

SEQ ID NO: 27694 - DNA, 874 bp, Glycine max
  Intron number 1 from transcript Glyma18g52770.2 (locus Gly ma18g52770) derived from phytozome v7.0 (chr-ID Gm18; pos 61267436 to 61268309)
gcctctgttgttcacaatatctataagcctaatcttgtaagtttttctctctaacttcttcatgttacattcttttattcagtgttttgagttataaatatggcaatatgtgcaaggtatgtgtgttttatttgtggaagttggacttttgaatgctccatatttgttacagcacatagggagctaatgtgcttgattgaaacctgagctattttaaatatcttttcttttcaatttgtctaacaaagtgcacagttgagatcgttgctaactattttttagatatagataaagccaatccctttacttgacattgcactgatcattgcagcatactgtgcggtcagtaacttaagtccaacttgtatgatttcctataaatgttagatccgtttgactatcttgacaatttatctcacgcattagttcatgctgctctaaattcaatccactctttgcaaacaatgcaatgaagatattgtagttgcagtagtacattcacacacacaaacacatatattcaaaaatcatttgaccgataaaaaaaaacatattcaaaatctttatcatgtcctctattttcactatgaatttaaattttccttagattgaatcatagtagatagcgaagtgcaaaaccatttatgaaataataaagtctataattttataaaatacaaactcttgataaaaagccatggatatgtagccattaactccctttgattttcttatcataatatcatctgttatcacttacagtcttacactatactatctaaagtgcctaggatgcattttacaggatcaagatctttttactgtaatgttgtttactcatttttttttcctatgtagacattgcctcctgttg

SEQ ID NO: 27695 - DNA, 540 bp, Glycine max
  Intron number 1 from transcript Glyma18g09110.1 (locus Gly ma18g09110) derived from phytozome v7.0 (chr-ID Gm18; pos 7917874 to 7918413 reverse strand)
gtgaaacttgtcactaccctttattgttcttgctagtttttaagccttgctggttctgggtcttcgagtatttcactggaaagtttcaattgctggggggcttctgcttctggttttgttagttccgagttgccttttgagggaactcaagtagtcaagttcaagcttcctactacttctttgtctcacgttttggggttgagtgttgcctttcctttttttttacctttctatgttggttttcatgcagtgaagtttgtttctatttttggatctgcttaagcctggtttttggggtcgtttttttaagtttgtgttttgttgagctaggttctggattagtgaattttgtgttcttcagctagtactaggttgttcagttgataattagtatttgatgtggcagatgtctcttgctttgggatttaacttctaagaataatttctgtcttgtgtcttagttttctaaaacatagagtgaattgactttcttgtagctctttgtggtttgccaggttgccagttactgttgatatcata

SEQ ID NO: 27696 - DNA, 318 bp, Glycine max
  Intron number 2 from transcript Glyma17g06760.1 (locus Gly ma17g06760) derived from phytozome v7.0 (chr-ID Gm17; pos 4821934 to 4822251)
gtgccactctactgttccaaaattcacaggtaataaaattcttcaacatatatatcttctttgataaaataaatatatcaatttttgattttctattttatatatatatatatatatatatatatatatatgctcttcgaaatcctttcccatttttgttgcttcaattgatttagagcatgaatgttctaaatttctaatgttctgggacacaaaaacttaatttgaattaaaattattaacaaaaatacttatacataaaaataaaaataaaataaaaaaacaaataagcaggtacttcagttgaagctcacgtgc

SEQ ID NO: 27697 - DNA, 564 bp, Glycine max
  Intron number 3 from transcript Glyma17g10040.1 (locus Gly ma17g10040) derived from phytozome v7.0 (chr-ID Gm17; pos 7500459 to 7501022 reverse strand)
agaatcattcattgtcagggatcacagaggagaatgtgagtatttatatataaatatataacctttatctgcttaaatgtatcaagatcgaatgtttccacatgctatcaaaatttactttgagactaatttgaaccctaaatggctgaatgttgtttatgatatgacataagaaaaaatgatgaacagcacaaaatatatgcaatttacatgaatgtgatgggtttgcttgacatctttttatgtggagaatatagtaacaaaagaccaggatacatacatgctgtttactagtcttgatttatttattttttatttcatatcagtgtgattttcttttggtgtaaataaattagctatttagcttgcattctgtattttgttttttgaaaagaattgaaagtgtaaaaaactgagtccctatatcacagtaaaattatataatagaacatatttgagcttttcaagtcccttgtcaaaacaagatagggatttgaacttagtttgaatgtctgatttttggctgcagtgtacaagaagcaccatcctcctggtctgtctgat

SEQ ID NO: 27698 - DNA, 436 bp, Glycine max
  Intron number 2 from transcript Glyma18g51920.1 (locus Gly ma18g51920) derived from phytozome v7.0 (chr-ID Gm18; pos 60676690 to 60677125)
ccccaccagaagcaaccttggtgtatgcttctcatctttttagtttaagctacccttattatcttcattacttgccaaacgtgcttgcttagtttttctttttttgtgttttgtgtatgcattttaaaattaggatggattacaacctgagtttaaaatctatgcattgtgtagcgatcttttgcactgtcaactaatcggaaatcatgctaggggtgacttttaaatgagttattataaaattcaacataattaccttacatgggagtttctgattggttgagagtgtataaaatcctttacactatcagggcgtgtaccatggtagaccatcccttgcaagacaattctcacatggctgaatcatgtacagccttctcatttcaacatttgatgtttttattcatttgaatttctttttctctgtgtatcgaag

SEQ ID NO: 27699 - DNA, 1025 bp, Glycine max
  Intron number 1 from transcript Glyma19g42990.1 (locus Gly ma19g42990) derived from phytozome v7.0 (chr-ID Gm19; pos 48810310 to 48811334 reverse strand)
gcactcaaagtgcgtcgaattcgtcactgatcacggtttgttccttccactgttccatcttctccttctccaactcgatttccttttgttcgattattttctgcttccgattctacgaaacagtttatcgcatcgtataattagtctattttagcccatacttcgttgcaacgcgctttaccttatgatcgtgccgcttaatttgtgcgaagggttatgttttcgttttccgacctcttatttgttttctcttttccttcgtttgcgttatttatgtcgatgatttggggtattcaatagcttctgcgtgttcggtctgttatggcttttaggtgtgcgtttggttattgattacgtagctctgcgttttgatttgattcgcattgagtcttcgatgcgtttgatatgcgattatgctttgactggtggttcggacagtatcgaatgaataagtgtgaacttcgcctggattctgaggttaacattgaattattataagaaaggatgtagcgtgtttggaaaccggttgagaattacgaaatcaggtctaggacgtgggagctataactattagcttagcttcttagtaaatgtgaaaaacacttatagagttgtagattttagtatcagtatttgggataaagagtaaggttcgtctcatataatggcagaagatatttgataatgattagctactgctacagagaattcttaattatagtttcttggagctcccgggttataccgttatgcggttatgcctaatgcttttctgtgtgtggtttctgtgggagtagaagtgtttggatgtgtctgtctttaactgtgcccttgagagagtttttctgcgctgcaaactttctttggttaaataaatggtcataattcacaaactattaattttatttcattttatttttaatgcggttgccaatgctcctaagtagaattcctgatattgaattattttttcacctgaggttattaattacactatgtgatttgtgtaattaacagtttcggca

SEQ ID NO: 27700 - DNA, 672 bp, Glycine max
  Intron number 1 from transcript Glyma19g39450.1 (locus Gly ma19g39450) derived from phytozome v7.0 (chr-ID Gm19; pos 46118166 to 46118837)
tctctgctattgtgtaagcccttctcactctcattcaacacttgtttttttctttctttatttattgccaagaaactcatccatgtatacacacataaggtggtctatttagcaaattagagtgtgtgaaaagagatacttttttttctaattataatttgaaaaaaaaaatatttatatctactttttaatcataactattcaaatatcaaatactttatagtcatttattttttttgaaaaatcataaatattcaccacattttgggatcgattttaagtggaagaaaagagagatcagaagaaaaaaaaatgatagatgtgacaagtgatatatgatagaaaatggggagaaaaatagatagaaaataaaataaaaatgagatagaagagaatatgaatctatgaatatttaattactctttgtatgtttatattgattagtcaaaaaatatgtagttgttaaaggtatttttactcctaaaacaacaatttctttcttcattttgtgtactggaattcagaaatgagaattagaattggcacaagtatttttcaagattaatttatacgaatatagttaagatagttaaaggtttattgtttccactgtgatctaaaaaaaacgagtcaaatctggaacaggtttttcttggtgataaacgcgatagc

SEQ ID NO: 27701 - DNA, 997 bp, Glycine max
  Intron number 1 from transcript Glyma17g36880.2 (locus Gly ma17g36880) derived from phytozome v7.0 (chr-ID Gm17; pos 40804348 to 40805344 reverse strand)
aaaggagttcctggtaaatttatgtttctatgatgcaatcatgttgaagtagtataaggctatttgtcagattgatggacacataggtgataggtcaatagtgaagtagctaaagtagcccttgatcatgtcttgtgtactgtcaatcaccatgctctcattgaaagcattgggcacactaaggatgtgctatggtgaaggagttttgagggaaagagaaggggagggtatagttttcatttcaagtaaatattctcctgtttgagaacttttttaagtgagagattatacttgaatgtaactagagatgattgaatggaaatcctcaagtgtgttctccacacttaggctctattatattagaaaacttagcttactcagtaagctgaagagaggtaagtacaaaatacagagctctgaaaagagcaggtatacaaaagacaaaaaataaaatgtaagctactactctaggtacatcatgacctattttccaactattatcatgtaacctttcaatcatccctttggaacacatatatccctccctattcaaaaatgaaaatttaattgtcgctccatttcccttcaaaaacaacctctccatttaaaccatgccctcaatgaaaacttaaattatgttgtcatttaaaaaaaattccagtgttgatgttttattcagtgattgtattgttatatcaacactgtcttctatctagatagcccttcctaatgcatgtacatttatatggtgacaacacccattttgacattaatttccatattgccatgctgtgtgtaattttataaatcaaaagatttttttttggtgcaagtaccctgttatgtatcaattctgactgatattggggagattagcttcagattaatttcctttctgcacatcattgtcttcatgtgttgtgtgattagtttctaaactggctcatttaactcttcctgtaggagttaccttggagcgattatctgaaggtctctc

SEQ ID NO: 27702 - DNA, 730 bp, Glycine max
  Intron number 1 from transcript Glyma20g27610.1 (locus Gly ma20g27610) derived from phytozome v7.0 (chr-ID Gm20; pos 36750816 to 36751545 reverse strand)
gctagaagtatgtgaggtttaactttacttatgatgtgtcaaatagatgttgctagatgaagggttgagcttgaggatcaatgtgttataaatacatatgttaggggtgattttattattattattattattatggcttaattgcaaaaataatctttttatttatcctaattcactaaattggtcctcttataatttaattcaccaattgagtctttttttttttttgatttgattatttgagtcttcaatcccaaaattggacattaacttgctaatgggtaacattgactgcaccgtcataataggattaagatgtgtgatagtcaatgtccaacatgattatgacacgtaacaatcatcgttacccattaatagtaaacgtccaattttaagattggaaactcaaatagtgagattgaaaggaacggaaactcaattggtgaattaaattatagggaggctgatttagtagttgggataaataggaggactattttttttattaagcctattattatctaagaaaaaaaaatttttaactgaactaagtattaaaggaattttagacttacaaattccagaagctttgtggtatcttgaattccttgtctctctactaagtttcatgactaaattcagttgtcttccagatgaggattgtattaatcataactgttcttgggtttatgcaggaaaaggcaacaaatcacaagctgcaatcgctaaa

SEQ ID NO: 27703 - DNA, 721 bp, Glycine max
  Intron number 1 from transcript Glyma17g17370.1 (locus Gly ma17g17370) derived from phytozome v7.0 (chr-ID Gm17; pos 14190103 to 14190823)
aacgtttccaattctcaccttcgcccagtgatttggtacacctctcttcaccgattctgtttttcattctctccctttggttttttatttttcattttttctctctaagaaagttgtaatttttgccattcatcagaagtgtagtgtgccatttctcttcccagttgaatgcatgtggttctagtttatgttgctgtcgctgttgtgattttttttctttactcaaatgttgttactttgtccctgtgagctaaaaaagccgttccttttcgttgtcatttagttcaacctgaatttcatttgatcgattcaatgaaatttgaacctgggacgttgaaatcctcagatttttccattttacgtaatgcataatgctagattattctgggttgtgtccaaaattgaaccttgagctttcatgaggcgtaatagcacaggcatttcaatagtacattgcaaaaatgtttctacttgcttcttacaatgttatataataccctttgccacctacgtaattgaacattgggatattagggatgagattgaagtgaatatgggagttaaggtcaatatttgggatttgtggaaggagttttatttatttgattgatttgttgttttatttatgaaccttgaaaatcacatgttgacaagtgattttttcttttcttgttggtgttgtttgttggtcaacagtagtcagcttttttcttgttcaaag

SEQ ID NO: 27704 - DNA, 369 bp, Glycine max
  Intron number 1 from transcript Glyma20g21060.1 (locus Gly ma20g21060) derived from phytozome v7.0 (chr-ID Gm20; pos 29991428 to 29991796 reverse strand)
ttttacctggataatttgggtaatataggttcgtaataaatgtcaacacaccgattagattagtgaagtaaaactctaattctgatcacagaataatacttttagtgtatttaaattttgtccatattccaatatattttctatttttttccaaattaaaaaattgttttgtgctattatcatgtttttttttttttggtatactcatttaccttgcttttactataagaaaaatagactaattcaaattattagtttctttccttcttcatatgagctaatacaatgatactgtagacttttttgtatgtgtgtatgttttttcttcttcttttaggttgctttagcattgattattgatggaagaac

SEQ ID NO: 27705 - DNA, 657 bp, Glycine max
  Intron number 2 from transcript Glyma19g42910.1 (locus Gly ma19g42910) derived from phytozome v7.0 (chr-ID Gm19; pos 48718169 to 48718825)
tggtatgtctttctgttcaactctaaagacactgtgttgcaatactcgaaaatttgttattagaattgtactattaaacaattgttgttgttgttcttcttagtagaattggttttcagaaggagcaaaatccaatcataaattgtcatatatgataagtttgttgacttttactataattgccttagaaatcactccaaccatgatttctgattggttgggagtgtaaaatattttatactgacattatatagatattaaggggcatcttctactgctcctagtttagaatagatttggctattgtaatcttaccctttggttcattttttatttatttatcataaacagatattagtcttttaaagcataataatccgttatcacctctctctttgttttttttttttatttaaaattattagctttatgatgaaaatttctgcatgcgctgttttataggttctttaaaaaggaagattttagaacctcacgtatcggccgccaccaacctatcctaattactattaggatttactgcatttttagaaaatacttttaccatttttaaaatatgctgctatttgtcactgtctgattagttatccttaagctctgtatactaacacttttgaattgtttgttcattgaagatac

SEQ ID NO: 27706 - DNA, 910 bp, Glycine max
  Intron number 1 from transcript Glyma20g23010.1 (locus Gly ma20g23010) derived from phytozome v7.0 (chr-ID Gm20; pos 32939392 to 32940301)
ttcccacatatcccagacccgaagattatctcactgttagtttcggattctactctttggttactgttattagttgctgaattctttcagctgttattagttgctgaatgggccgagcaaattgtgatttgtggcaaaatttaataattctgatgcaagtgaaaatgtgtgatgatatggatatcgatatagcataagttaattttaacttatgggaaaagcttaattcactttaccttcttatttatcgtacaagttcatggaaaagtttgaccaaacatggccatagtttactctttgtatttgttttaatctgtgaagtatagcaaaaactgttagtttatcactgtcttaagtctgaactcgacagttctttcaggcttccgtgatagggattagggattttatttgctgagccaaatatagtgtttttccttcagctactatgttggcatctttgggggttttctgctcctggttgctttgttatgagctatttggaaatgttggcccttattggattggagggtgatatttttgttaaccagaaggaaggtttggagagcatttgaattcaatgttcgtgtgtagactgccagaaggttttcctgtccttgctatactacatcatgtctaggctattattcccagttgtgtttgggggtgcatgtgattcccacaccccatcgtggaaataaaactaggactgtttcgtacagttttcctagtatttgttatttagatgttttttgtaaaacaaaagaattggagcttgtgaatgaagtctcttttctacattgctttattttcagttttcttgataactcatacatcatattctggatgtttattttttcttcttacctttgtaacaggttttggcactaccattgatacatagaccactttt

SEQ ID NO: 27707 - DNA, 826 bp, Glycine max
  Intron number 1 from transcript Glyma20g24600.1 (locus Gly ma20g24600) derived from phytozome v7.0 (chr-ID Gm20; pos 34227222 to 34228047 reverse strand)
aagaagggcacgccttggactgaagaggaacacaggtttgttaacgcgtcaacgatttcgcttcaattagattttttttttctgtgtttggggttttttctctttaagagagctgtttaggtgtggtgaaattttccaagcgactttgagtttctgtttgatgttgttttgacctggattttttttcttctgaattttatttcttgatgaccgttcggttttataatccgaggacttggttgtgtatttttgtctctgagaacatgttatgtccgaagatttgaattttcagctttacgtacttggctggcgcctctttatgaaaaccttgttttaatttctttttaaagtttggcctgtataatttcactctctttaatttaataattctctcaccaagtgtgctgtgaaatatgatgaattgtgagtcctctgttttgtctttgtttgaattattgtgagagttttatcatcttcgctgacacgaatgcattttttgttgcttattttccaacgcctgacttaaaccttggattttaggaaaactgaattagaattaaaaaaaaaaaagagaggcaaatatcaaatgtctgcattgcaatatttttttgtttgtcaatttgaagatggtgtaaaccctcatttgctgtttcttgcacgttggttcagttaaactcgcacacacaacatctttattccactatctgtaggtttgagtccttattgcaagtgccatgaaggtgaagggcaatgctaatttcatggttgctgatctaccttttttgtgacaggctgtttctcattgggctcagtaaatttgggaaag

SEQ ID NO: 27708 - DNA, 877 bp, Glycine max
  Intron number 3 from transcript Glyma18g52640.1 (locus Gly ma18g52640) derived from phytozome v7.0 (chr-ID Gm18; pos 61196508 to 61197384)
aaagatacacaatatatagatttaaaacgaggtaagaacttgtatgtttaaatctgtcttaaatcttgaccccaaaaacatcgatatcttgaattgttatttcactaaatgaaggcaaagctcatatcttgttctagcatctaggttgactcttgcaccaattctgaacagttgtccgtgtacaagttcaccatgtgagatatcaaattgttacagaacatatacacacactcatgatgggagggagaatgagtataatcactgttttgtttccttctgtgaagcttttgattttacaaattttaagctgataaagttttggtgaattggcaatacttggttttgagtcttatgacactcaagtaatggttactgtgaagagattagaatataaaaccctgtaaaagggtctaatatgtcgcattggatgattggccatgatcttgttctctgtgcatctgctaacagggcttttacagaagtcatttatttagaaagtcttcctgagttaatcttgagaaaatttttctcatcctgtgttcggtagagtatgatgaggaccatcgttaaactacaaaagaagttagaaaatcttatttctgggagttgggtttttaaggggaagggaagagggggaaatattttatttttaaattaagtgaattatatatgtttataaatataaacaaaaaattaatacagtaaattgtcattaatctgtcttttttttctcttattttaaaaaatatcaaattctaaaatattcatttgaaataaaaattcgtcctcccctccaaaacctaacttccaaacatacccctaaatctctgttgcatctaatctaagagtttaatgcatagatcttgcacatttgttg

SEQ ID NO: 27709 - DNA, 418 bp, Glycine max
  Intron number 1 from transcript Glyma17g20110.1 (locus Gly ma17g20110) derived from phytozome v7.0 (chr-ID Gm17; pos 18648409 to 18648826)
ccacctaccataggtgctttccaaatataggataaatttattaagtctttatggactaccatacgtcgatcgtctcaacttatatttatataacatatatttaatttttatatgttacaaaaacaaattaataacactcaattagttgtcattcacaaattaaaatgaactataatagtttacgaccacttaataattttcctacgaaagagacaaagaagtcaaagacttgaccatagaaaaagctagaaacctaagttcaactcttcttctttcattatattatgataataaaaatagtcaaagcaagcaattctctttggttgcaaaggtttttttaaccttgaatacacatacacacagataacactttcatactaatagttaaacttctcatcataattttctttcttaggcg

SEQ ID NO: 27710 - DNA, 877 bp, Glycine max
  Intron number 4 from transcript Glyma20g28110.1 (locus Gly ma20g28110) derived from phytozome v7.0 (chr-ID Gm20; pos 37076893 to 37077769)
gtttccatatcgagaaggtaggcctttgcattctaggataatttctaactgttatatggagtaatcagtagatatggaaggatttgatatatatggtttgtgcagggattggttgagttctttaatttgagtgacacatagcattcaagctggttgtaatttgtgattgcagattacatattaaacctgtaggatatttctattttcaaccaatcaattataagactacaaatgttctatgacagtgaattgttggcaatgaatcactaacaagcaaaaataagtgcagtagagacaagaatgctgagctaaatgagaatacttacaaggaaaagataaatttaggaatgaatttatttgggagataggtgtattagcatgcctaataaggagagtatgaaaggagttcatctaaggtggtttctcatgtgagaagtaaggctctggtgagaaagttcacttagaaagggtagaagaaaaatttaggagaaaccattaagaaggaccttactctaactgcaaatttggtctttgatggagttcaatggtgacaaataatccattattctatctcacttggtgggatgatgcttggttatcggtgttgttggctctctctaatgggtatgtagattgttggtgatgtttattgtattggtgccttctgaatactttaaaaggacattttgtcctctttattcgaactttttttttgctgttcacgcacaaaaaaaaaatgttaaagctgaaacatttttatcattggcattgctattacatgtttgttattctgctccattgttactatggccaggttttgatatattgcaataacttcataggtgtcacagtaaaagaaagagactcaaactctggg

SEQ ID NO: 27711 - DNA, 249 bp, Glycine max
  Intron number 2 from transcript Glyma18g49420.1 (locus Gly ma18g49420) derived from phytozome v7.0 (chr-ID Gm18; pos 58844864 to 58845112)
acaaacaaacaccagttctctaatgtaagtgttttaccaatttctcatatttggatgtttaatttgtttcaaatatctggaatttagctcctctaaaatgactaagtgcatgcactaatcgaataaggtagagcttatgtttgatttgaattagtgtggttaatttaatcttgtttcagtaaagagtggatgtatttcttagtttttgtctctaatgaattttatttttcttttctaggtcctacttct

SEQ ID NO: 27712 - DNA, 448 bp, Glycine max
  Intron number 2 from transcript Glyma17g33560.1 (locus Gly ma17g33560) derived from phytozome v7.0 (chr-ID Gm17; pos 37476639 to 37477086 reverse strand)
cctcctttcttcgaccttagtgcatcgatgtttatgactaatgctttatgattaatgtttaagcacggtgaaatgtgcctaattttatgaattagggttttgagtgcgattaggctagtgatcctctcataaactcttcattttgttcttgtttctgcccactattttgcactgtttgtgattaatttgtgcttgctgtttattgtagtacgagccaaggacttaacgcgggagttacaatgaatggggtaagcagccagccagtttcccaagtgaattagggttttgaattgaattgatttgatttcgacatcaaagggaacagggatgaggtatagaagaacccatagaatagcagtggaagggtgtttgtgtttgtgtcgctcatggcattcatcatcgaaatggcggaggaggaatacagtgaacagcgagacattgtcgagat

SEQ ID NO: 27713 - DNA, 446 bp, Glycine max
  Intron number 1 from transcript Glyma18g06050.1 (locus Gly ma18g06050) derived from phytozome v7.0 (chr-ID Gm18; pos 4651170 to 4651615)
gtggcttacggtcatcaattgcagagatctattaaggtgctaacttttgatggattttgcattctttgcttgcttcactgattttcattttcattttttttttgcatgctggattggaaattccttaatttgtgctttgcttgggttgaaatttgttgacttaattctctgtttctccttccatttgattttactgtcactgtgctttatttatactttaagttaattgttgattagtgtgattgattgtttattttattgtaaatccggaatgttgtgattgtggtaagtacaagagtttaatgggagatataaggttggttgggtgattaagaaagaaggaaatgagagaaaggtcgcgggttcgatgcctcaaagagtttaattttgaaaatttccctgttaaattccaccctcgcctttttttttttttttcagattctgga

SEQ ID NO: 27714 - DNA, 1046 bp, Glycine max
  Intron number 3 from transcript Glyma18g06050.1 (locus Gly ma18g06050) derived from phytozome v7.0 (chr-ID Gm18; pos 4652196 to 4653241)
atacatttgatcttcattgctttcaatcactgacaggtattattttaaaacattagtctttaaatcatgagcatgttagctttataatttacttggtgaataaaatgaataatttatgcctaactaacatcatttacattttactcatagttaatttataatatctagtactgagcctgccggcttttgttttccatgcacacgtgtttaaggcctgcatcttgcaggtagcagtagaatgactaggtttcaattaaatatggtttgagtatatcataagctccagataattattgggaacataagtattgcttatataaggtgattgttcaaacttctaaatatatacatgattgctttgggattatcttgattccatctaaaagctctcgataggctaaacagctaaaccccattataaggtgaagcccagctaatactttagcagagttgtatgtattgcaaattttaaaataacttgttttcatggtcgcctgattttgagtaaaaaaacaaaaaaacagaagcattaagttggaaggcaggctgtgttattgttgcaatcaatacaactagctggtgacatgacccagtatattgtttgtatttggttatcattattatttttgttattacatacttctttcttacagtgtcatttttctagtaatgatcacccattgtttgctccattttcttgcaatctactcatttgactttttatgcacgatataaaatttcttgtttctctgggtcacgcgtgcaccttgtgatttggatcaatgagcttgaatttgagagttgacattgttctagatgtttggctgctgctgtttaagtgcttacatgtgttgctttactatttatgtttgacacttgttagtttagtggcgctatcttctcctgtttagcagttctatattcagttaaatgtctctagcaaaatgagcatgcaagattcctcttttttcccctattattggtattatcaaattggtcttctcccatacagggacaaaattttttgtggtctctgagcctggagc

SEQ ID NO: 27715 - DNA, 696 bp, Glycine max
  Intron number 1 from transcript Glyma20g04870.1 (locus Gly ma20g04870) derived from phytozome v7.0 (chr-ID Gm20; pos 5283002 to 5283697)
tggagacaccctgctcctgcagcggtagtcttaaggtacattcccattattataaattaaaaatgaaaaataaataataactttgatgaagcggggaattaatacaaaatttataaatttataaagttatttttatgcattttttgttctccattgcaaaattaagtcattttgtcaacggatcgggactcttttttgcttttgcattcattttgcttttatcatttggatttgcattggaacacgtgaaataacattttcaactacaaactaaacatgtattaacattgttgggaagctatgtggatcaaattggatccttttaggctatgtttaatgtttgaaaaaaacttttgtgaatttcaatgtacaattccgaattcctatgcacaaatgaagaaggaaaaaaaattgttgttttgggagtaaaaggatttctgacctctttgagctttaatccaaacatgcacttaattgttgagaaatgagagtggttttcttggtgataatatgaattatgaatctgtttgatgtgctattggtgatgagaatgagaaagaataaggagggggggggggggggacattttgtttatgagacatctttgttttttttttttttcctttaatatgcttgcttgcatttctattttgtgttaataatgatttgtggttttttggaaattttacgtacagt

SEQ ID NO: 27716 - DNA, 790 bp, Glycine max
  Intron number 2 from transcript Glyma19g40710.1 (locus Gly ma19g40710) derived from phytozome v7.0 (chr-ID Gm19; pos 47046204 to 47046993)
ctaaaaaggtttgcacgaagttttctatacttttcaatggctttgggtttgattgtcattctaggaaaattaatgctgtttgtaaaatcaacttaacataataacatgtctgtcttaagattaagattgcgtttggatagaaaattttaactaaggaaaatttgaatttttgtaatttaaaattcattatttgaatgttttttatgaagaatttaaaattttggaattttaaaacagaattttaaacaacttaaaatctgaaatttcaatttccttctaaaagataaactcttaaaatatcgatcaggtataagcatagaaaggaacacgtataactagtacacaaaatcatattttctctttttttttcattctcataattttaattttttttatctaaacacaaaattttaaaaataaaagaatttgaattgaagtatttgaaattcttaaaatttaaaatttctcaaaactttaaatttttccatcgaaacacactatacattactttcatttattcaatgaaataaaatcaaatgtacaattgaattaaggcttttcaagttatatttgacattaataactgccgagcaagcccgtgaaagttgaaacttggaacttccaagcaaccaattactccaagataaagcggccgaaatgcaggctcaaattttgtacttgcgtcagtgttaagctctgatgtagattgtgagtatatagagtctcacttattttcttgttaatagtaatattttctctttctgtgatactggtatccctcagcttggtg

SEQ ID NO: 27717 - DNA, 543 bp, Glycine max
  Intron number 3 from transcript Glyma18g05160.1 (locus Gly ma18g05160) derived from phytozome v7.0 (chr-ID Gm18; pos 3896029 to 3896571 reverse strand)
acttctctctttcaacaacttcccatcaagtaagtttctcaatttctctcaccaagtttgtttcttctttaatttcttccttttctttgtttttccataaactctcaaattagtccatacttaccaatatgtagttggtttgaataataattgctcgagtttcttaaataactgtttaaatgttcaaattctcaaatgagtaataaaacaactcttttttttcggcgaacccatgacctctttctttctccttctttctctttatttcttcgaccaccaagtaaatcttgtaactttgagtcattagacaacttaactttaggtgttttcggatcttggaaaaaattagcaacttatgaacacgtttcttgtaatcatatattcatatgcatataaaaaaaaaatagtccaaagttacaaccataagtcacttttttttataaaaaaaaagggtgtttttgtttgtttatgaatttgctaaagtttgtgtcttgtggaaatggtgtaggagggggctatcaaaattctaccagggaaagtcac

SEQ ID NO: 27718 - DNA, 911 bp, Glycine max
  Intron number 2 from transcript Glyma19g36860.1 (locus Gly ma19g36860) derived from phytozome v7.0 (chr-ID Gm19; pos 44135190 to 44136100 reverse strand)
ttgttcagagagctttggctttgtattcgtaagttgttctttatctcctatgaaccgggacatacaatttgtggggttgttgtcttaaacctttctatgaggtgagtttggagttcatgtgtgaggaattagattcatttgccccttttctgttggttaatgtaaatcagaagacgagaagggtgttacgtgctgttgactcgatttttattgttgctttgactggaaagatgaataggtgctcaatgaggatttattgttgatttatgttggatctattttatgagtttatggggtgtattgaatttccttccttgattgtttttgtctcaggggcaagcattttttgaaaaatgtttgagtctgttatcttgaaaatattgctggaaatgcgttatctgaaatgagtgacggtctgtgacgactgacgatcttccatttggtctaagttagttgagaatttcgatggtgttatctgaaaactagaaatagcttttattttgatatatgtaattgtatataagtttatgaagcaaggacgatatgcgttccatctgttgattttttaaccgggtacccattctaaacaacttaacaactcttacagctacatatgaagactattttgcatcggatgatggctgaattggggatttgaaatttgattgttttagggacaagtgcatatggatcatagagtgatgtccccatactttttggtgtctttttgctacttcatttgctataagtcatacctgttttaaattatgaatggagaaaaaactatgatcttttataaatattttatcttctcaatgctgattgtccttgttaatgtaagttgtcttattatatctgcatgtattaatgtatttcttcctacagtattgaggaggttgccttcagtttca

SEQ ID NO: 27719 - DNA, 845 bp, Glycine max
  Intron number 1 from transcript Glyma20g33330.1 (locus Gly ma20g33330) derived from phytozome v7.0 (chr-ID Gm20; pos 41927873 to 41928717)
cgctgcatcgcctcctccgaaaccgccttcgctaggtatatctgatccgatccgatctgttttctctctccttcgtttcgcttaaactcgctctctccttcgcacagtaatgtaggttaggggactgtatgtcggtgacgctattccgcggtcaacgcctttcattcccaaccctaattcttaacactggagcttcaatgctgtttctcgctagatttagattcattttcttttcctgttatgaaaataataaagtaggagtgttattctgtcctgtttcgtgtgtggatgtgatttttcgtggtttacgctgtttatttgaagttctgctgtaattgaatgattgcaatttattatgatttcggagtgaagtaattgtgccggctttattcttttcttcggttttttaatttttgtagataccaagcaacgcagagggaatacttttttaagactgttactttcctgcttagtaaaatatgtatgaaatatgtgtatactctgcatctgttctgttttgtaggtacaaaagtatattcactgaaaaattacctttgcctataaaaaaatgtatattcacagaaaaaatataatggtttgacttttaaaatgcttatgtgaatttatgtaattaaaattgttccaacaagtgaaacttcaatgctagactgatttttgtttttttactctcattttctaatatttgaattttaaactttttcctaattgcgtctattatactttgatttgtaattatataaaagttttaacttaattctttgttattaattttgtgtttgcttctatcagattctgaggagaagccaacatatattaggtttcta

SEQ ID NO: 27720 - DNA, 867 bp, Glycine max
  Intron number 2 from transcript Glyma20g17960.1 (locus Gly ma20g17960) derived from phytozome v7.0 (chr-ID Gm20; pos 25072892 to 25073758 reverse strand)
aattggagcaaaagaaagcggaacgcaaggagagggtaattgttgttcattccttttgttatactcatcattccatgcttttttaatcccctcacataatatattttagtttttgatctttcatgataagataaacagcaagattttaaatatcagttgatgaaactctttgcggttgttgatgtcacggacaaatgcggctgatgtggtcccaattgcggtcgcggacagttaaaaaaccttgatgttgtgacccaaagcaggggtcataggtcaatttttaaaatcttgataaacagagaagttaatgaaaaataatagtgaaaaattgagagtgatggaccttgttctcatatgatgggaagagtgagatagagattaatgatagatgttaatggggcgttcggttatcgtatataaacgtgtctgtatgtccacttcaaaatggggtggaaagataagagagttaggaggaaaagagagaaggtagagggagagtgatatatgtggtaattaatgtgatggaaaaagaagagagttagagagtaaatgaggtggaagggaaagtgtgtggatgtttggtatattttttcttatattatatgaactgtttgtgttttctcataagtcaagacttgtcagttgtattgttggtgcagacgtatttttattaattttctagaaatatgagatttaagtctgtaggcaaattgatggggtggatatgtgtacaaaaaggctgacatgaactcaacaatgcttctgtgttatgcttcagttatgatttctgtttgtcttgtagttagaaacttcactatgttcaatgcttgtttcaggctcggaaaaggaaattgggcttgctagagg

SEQ ID NO: 27721 - DNA, 777 bp, Glycine max
  Intron number 1 from transcript Glyma20g04840.1 (locus Gly ma20g04840) derived from phytozome v7.0 (chr-ID Gm20; pos 5218161 to 5218937 reverse strand)
aacgatagaagccagtttggcaaggtaacttataatgctagaggaaaatccttactttacatattgttcaaagtgaataagctaattttatttaaatttgaatatgtttttgatttctaatattttatttttatattttattttctaatatatttttattttgtattgagtttatgataaaaataataattttatttttggtccttaatattttattttaatctttgataaatttatatttgttctcagataaattaacgtattttgttttagttccgattaattattaatgaaatttttttataaaaaaaaatataaaatttactaatttctcaaagactaaaataaaatgtcaatgatcaaaaataaaattgttattttattaaagactcaacctaaaataaaaatttattagcaaataaacacaaataaaatatttattaagaataaaaaatatatttaaatctttatttattgtcctaattaagtcaaaacacccgataaaaaagtaaaaggatattttttttgagatgccaaaaaattcattttccaatgattttaaactacacttccacatgattttttggtaaaatcatttctcttttaattcctcagtatttttaagacattgttccaccggtgagcaagacccttttatttacctttacatggagtaataagctagattcccctcacttcttcaatttttgtagaaataatgacaattgtttgtcaattgcaggttttgattgtttgctttgtagcaagcactattat

SEQ ID NO: 27722 - DNA, 614 bp, Glycine max
  Intron number 2 from transcript Glyma18g43410.1 (locus Gly ma18g43410) derived from phytozome v7.0 (chr-ID Gm18; pos 52925106 to 52925719)
aagaagatccttatcttggcggtaccagacttcttgatgtgatcttactagaagtgaatcgcttgatacatgtcacaaagtttggatgacgccacttccagagagggaagataagtcagggtagacgtcacaaggattatcttgataagtccgagattggttcaacaaggaacccagagagctttcacaaaatattcgcaaaatgtcaaaagttcctctattgaaaacgagttcaatacatatagtgtatctgaggtgtagctggaaaggcaccgattttatttaatttaaaattaaaacgaaaaatagaaagaaaataaaattaaaacgaaaaatagaaagaaaaaaaggcatgggcctttaaattagtttgggccaaaatgacaacgaaagaatagaaatagaaaaaaaaacatatttgacatgggtcttcaaattagtttaggccttcagcaacaattaaggctcttggtagtacttttgggccttcatcattcttcacttgggccttgttaagtatgtttgataccatttgttggagggtattctctgactgtttggtcctactcctagtcataggtccctgtatttgggccgtttttggattctcatca

SEQ ID NO: 27723 - DNA, 545 bp, Glycine max
  Intron number 2 from transcript Glyma19g01570.1 (locus Gly ma19g01570) derived from phytozome v7.0 (chr-ID Gm19; pos 1185652 to 1186196)
ccttcagtgacatccgaccttcccttgcatcttttgtatgtcttctttcaaccttgttgtgttctttcatagtgtaaagtttttctctttggtcttttctgcatttgggtagtgatactttctgatgttgaacttctaagcctctgcgtgcttcattaaacttgaaaaattatttctttaccactaaatatgtattgaaaatgttgaaggtacaccccatttttgggatgtatgagtgaaaggaagagagtgatagagagaaaaaatcaaccgagaaaaagttattgataaatcataaatgatatgatgtgtaatgaagagaaatagaaagaaaaaaatgaggtgaaaatgtgatggaagagaaagtggatgtaggacaatggtaactcatgcaataaaattttggggttggtttttgatttattcaaaccatcattctttccttgttgttttggttgcaatagaagttgggggtattgttagttgagggagtttgcatgttccatgcaggtatctagtgaccctgtaagtatttacaaagggta

SEQ ID NO: 27724 - DNA, 305 bp, Glycine max
  Intron number 5 from transcript Glyma18g29450.1 (locus Gly ma18g29450) derived from phytozome v7.0 (chr-ID Gm18; pos 33875860 to 33876164 reverse strand)
ggagtagtggttattaaaggggtcaatacccattaacgtgaaataagctccccttcctgacaaaaaagagttctatctaacccctagtcatcacgaacatggagagacagaaagaatagtcaaggaagtgaaatcttgtttcttttctctttcaaggaaatcaaagtacatcagagaagctccactatagagaaaggtatgcactatttatctattatttgttatttgtgagaattataggtttcaagattctattggtttcctataatgttaatttagggaatccttaaaacactacaagaaaa

SEQ ID NO: 27725 - DNA, 513 bp, Glycine max
  Intron number 1 from transcript Glyma18g01860.2 (locus Gly ma18g01860) derived from phytozome v7.0 (chr-ID Gm18; pos 1091323 to 1091835)
gtgcgtttcggaagcagagaccgaaatacttcgaggttagtgatctttttttccgcttttggaaaaaattcgaatattagattctgcttcttgttcgttctgtagaagaattgcttggcgttttcgtttccttaaggttcaaaacttgtcttaagtttctttctttgattgctttgatatagggtttgtaacatgattaaatcgatttttacttccattatcttccatttcgcagtattagtttattttattaagttatttgccgtgtactatgattaaaatctatatccctctgttggatgttttgaaatagggttttatagagtttcagggcctttatttggccatttaatcgattagtgtatacatgatgcgttcttcaagtgtgagataaaaattaagtttataagtattttgattttgattcccaaattatcattatttgaattctcctatagttttttttttttttgttaaaaagttttctgaagttgttgttggttgttgattaag

SEQ ID NO: 27726 - DNA, 385 bp, Glycine max
  Intron number 2 from transcript Glyma20g04430.1 (locus Gly ma20g04430) derived from phytozome v7.0 (chr-ID Gm20; pos 4590979 to 4591363)
aggcctcgacatagaagacttggtaactctatctggtatatttattattttgacaagatatatatacaactttctaaattgctgttagtacaattttctaatcaaaattagtgttccacatctttataaaaaaaattagtggcccgccttaatgaattattgaaataaaactaatttttaattgaaaaataacacaaacaaaaccccaattctaattgatgaataacacaaacaatacctataaaaactctaattttgtccttataatttgttcaaagttcaatcaaatgttaatattttgggactctgacaaaggaagaagagattaagcatgtagagttcctgcttgacaaaatacaggtagccatactataggaagagcaag

SEQ ID NO: 27727 - DNA, 835 bp, Glycine max
  Intron number 1 from transcript Glyma18g04510.1 (locus Gly ma18g04510) derived from phytozome v7.0 (chr-ID Gm18; pos 3300125 to 3300959)
aagcttccgtcaccacacccaacaggctcggcgactgtaatatcttttattctctcacctttttacgcttcttttttttgtttcttcggtgaaaattagaatcactattacattaagggattaatgatgtgcatgtgaaagaactaataaaatggaggaacacaaattaggatgtatctagacttgaaatatctccacgtgcatttgtcactttttttcccagagactataaggggctgtttggattgtgaaaatgttttctgttgtatttttttttttagcaaaaataacttaagtgtcacctggccatgtttggataaaatttctcaataagcacttataggagaagaaaacaaggaggtaaaatgaattaagttttcatataatgcagaagttaaagtcatcttttttcagaagctaaatgagatagtttctataaattagcttgggcataagttaattttaacttttgagagaagcttgatttattttacttttgtattttcttctcttacaagtgtttattgagaaatcagtgaatgcgattgtagtagaagagattcggtgatttctcatgtttcgggagtagggttgacttttttcgtattttgttgtttcaatttcatgatgtaggtattaggcaatgccaaaagagtctttagcctggcattatagagagctaattatgcatgtactttgtgtttaagaaaacaaattatgatttttgttgatttatttgagctttaaactcggattagtacctatgattagttagtgtgactctttgaattgtctttttaggccctttttgccaaagggtgctgctgacactgga

SEQ ID NO: 27728 - DNA, 590 bp, Glycine max
  Intron number 3 from transcript Glyma18g51110.1 (locus Gly ma18g51110) derived from phytozome v7.0 (chr-ID Gm18; pos 60073643 to 60074232 reverse strand)
ttccaaacaaggggagaaagaatttcaaacagaggtatatgctaagaactttttactttgttttttgggttacagaaaagatcttcacaaaggattactttaatacaaggtttgtgggatgcggaacttttcttttcttttggaacttcacttgtgatttatataccatatacattaaatagtctgatgttcatagtttaacccaactttagtcatttcccggaaggtatggtatggtgtgctggttgatttgaagttttgaactctgttttgaaacatacattcctaaaaatggcctgaaaatttatttgagtttatatttgcattgggcatatggtcatcatcattggcacataaaatcttactgaggcaataagttcctttatttgccagatgatataattaattaaaatgatggggataccacttatttctactgggtttcacttaacgtaatgatattggttcttattggagccactccaagtattactccatgaatttaacattaatcaccacttatttccactgtttttaatgagatgttgatccaggtgcttctgcttggaagactgcatcatcggaatctt

SEQ ID NO: 27729 - DNA, 911 bp, Glycine max; identical to SEQ ID NO: 26632
  Intron number 1 from transcript Glyma18g13610.1 (locus Gly ma18g13610) derived from phytozome v7.0 (chr-ID Gm18; pos 13113748 to 13114658 reverse strand)

SEQ ID NO: 27730 - DNA, 523 bp, Glycine max
  Intron number 6 from transcript Glyma19g43330.1 (locus Gly ma19g43330) derived from phytozome v7.0 (chr-ID Gm19; pos 49014192 to 49014714 reverse strand)
cacggcagggaccaacatctagggctgcatttcaagtatgtctgtaggtttggttggcagtgtctcttcttgcggatggtctggctgttgctaggcaggttagatattactttgtccaatcaatgtcttgctatgttactacatgatggtttcatagcaaaacagtggataaaatagcaatgatatccacttgaataatgttttcttgtattgaaaaaattgaaaaggttttggataacatgagtgattctttgaattcattttcatttttcaatgcacactttcctgtgaaaaatgggaaactgattaagttgtaaaaaaacttggttaggaatgaaatgagctatagaaagccataattttctcatgttttcaatggccagttgaatcatcaatgtggaataattacgcatttatgttatccaattgattataatgtcatttgccatcatgaaacaagtaaaaggcaatgtttttttccctagtcatttttcttcaattagtttatagcttccaaaataac

SEQ ID NO: 27731 - DNA, 716 bp, Glycine max
  Intron number 1 from transcript Glyma17g35420.1 (locus Gly ma17g35420) derived from phytozome v7.0 (chr-ID Gm17; pos 39387448 to 39388163)
agaatcaaaagaaaaaggctcgtgtttcaaaagatgtaagttttgtctctaatttctcgaagagtaatgcattatactttaatttctatgcacttcaaccaactaaaatcatcattttatgtgattttttaaggcaaatgctaattagtggacattgattaaaaaacttaaaagtaaaaagaattctattgagatatttaaaattacgttgtgcataattttatttgtgcttataaattttataataaatattttctttttaattttttaacccgtgtatgttaacaagattcatttttaaagtaattattctataaaaaatcaacaaacttaagtgacgatttataattaaatgaaaatataaaaactcttcacttaaactaattgcttagtacgctaaattagtttctaaaattgaaagcacaaatcagtttttatccttaaaattcataaacatatcattttaatccttgaaattatcaaatgacatgtttttctaatccttaatcttacaatatgaagtttatttttagtccttggaattgcaacaacaaagattaaaattacacattaacaattagtaatatcaagattgaaatgatattaatatacttttaggatcaaattgatcaagacttaaaatttgggactaagttattctacaccgaaggtggaaatttgtaacagtttgttgtgttccatgatcagggccaagg

SEQ ID NO: 27732 - DNA, 626 bp, Glycine max
  Intron number 1 from transcript Glyma20g38290.1 (locus Gly ma20g38290) derived from phytozome v7.0 (chr-ID Gm20; pos 45928179 to 45928804 reverse strand)
caggcgctaccaatccgctcttcaatctcgatcaggttcgccttctttacttttccccaattcaattcatttttcacctcttcttcgttttctccttctcctattcaggatgaggtctctgtgaccaaaaaattacaacttgcgagggtgcgggggttggattttatgtttcgatgtcttaaaagggggtaaaataagggacataacgtgaaattttttattttccggaaaattgttcagctgatggttattattattgtttctgttgttgttgatgatgatttttatggttatttgatgtgtttggattatttataccgggcatggaaatgggaattttatgaaatcagaagcataattataatgatattccctaaaaagcgtagctcaaactgctttttggtgcctcgttttctatggcacgggtttattaattaatattgtgatagcaatcataattgggatttttgatgtgaagatcttgattagctatgtacctgggtttagaatttatcattgtgattttaaattgtgtggatttgctgaagagggaccaaaagggattgttctggttctgatgtttgtttatttccgattatctaatattcatttttgtgaatgtagac

SEQ ID NO: 27733 - DNA, 615 bp, Glycine max
  Intron number 2 from transcript Glyma20g34210.1 (locus Gly ma20g34210) derived from phytozome v7.0 (chr-ID Gm20; pos 42638318 to 42638932 reverse strand)
cctctctctatatctgaaaccatctccttctccaggttatttctaattttcacccatctgtttttttttttgttttgtttgtttgttctaatttacaaccaaactgttatgaagagcttgaatttttttgtaagagttggtccttggcattaacttttgatgtgatcgtgtgcatgttttacgttccctaatgttttcaaatcgccacagcaacttgacaattttaaataaattttgctcagattctcctgtttttgttctggctctctgtattgaaactttggcctttacttaacctctggaaaattaagtccattggctttgcaggaaaattatgtgaagcagtagttggggtagtaatcacatggatcagtgatgctactataatttccttttctattgttagttttaattagttcttcactttcactatagttttggcctattttggagaatgagagcgtggtttgtattccataaatgcaatattgacatagtatgtaagacattcgcattcttctgattgcgtgcacaatctggttagcaatagtaaagattttgggggttattattactgaacatagaattgaatcgatattatttgattttacagtg

SEQ ID NO: 27734 - DNA, 514 bp, Glycine max
  Intron number 1 from transcript Glyma20g12230.1 (locus Gly ma20g12230) derived from phytozome v7.0 (chr-ID Gm20; pos 17209753 to 17210266)
gaatcagacaggctcttgttctttactttttcttcttcttttgtttttctctctaattctagcccttttacacgcactacatgaatgttcagaattacaatgagtctattacagtggaccacgagttcatcactaatacagataaattagagtaaatttattcatcggtaaattacatacgacttttccatcaataataccaacaaattagactcactcgcactttttatgactttgtatatgagcatgcatgtttgagtcagtttatccaaaaataattctcaaataaaaaaataagaaaaaaatattttttttcttattttcttataataaaagtttttctggaaaaggttatccacaagccctatatatttacttatatatacgtaggaataggagtgtttctgtggttttactatgcccagtgctaagctaaaattaaataccatattaattaattaatagtttttgttaatttatgttttcactttgcaggttggaactccttgggcag

SEQ ID NO: 27735 - DNA, 447 bp, Glycine max
  Intron number 1 from transcript Glyma17g06430.1 (locus Gly ma17g06430) derived from phytozome v7.0 (chr-ID Gm17; pos 4578398 to 4578844)
ctccaatactgcccccaacctcaacaatcaatcaggtaaaccaacatgtcaacgacactagaattatagaaacgcttcatgctaaaatattattatgagttatgcatatgaaatcaaatattttcaagtaagaagaaagaacgtgtgtttgccctttttatggtttcctcgttattgcttaggttgctagtacaagtgcataatcatttgatcaattctgaaaacaagtcaactagtcaagcatagaagtcaacctgaatttgcatccttggtattagtatcagcattagcaagagttcatcatgaaaaatgcttgatcctgttcctgataattcagatttaaaactttagcatcttagcatcatttgttactttacaagacagagtttgttttcttgttacgatgtctcagggaatattcaattttctgctggtctaagcaacaca

SEQ ID NO: 27736 - DNA, 685 bp, Glycine max
  Intron number 1 from transcript Glyma19g36700.1 (locus Gly ma19g36700) derived from phytozome v7.0 (chr-ID Gm19; pos 43962121 to 43962805)
tcttattagatcaaaagttttcttttgcaccagaggtgagtttcaatctcaaaatctcctttttcttttcatttagatgaagggtgcaacgatcccatatgattctgaacacgtttcaaacgttactgggcttctcctcttttagattgcagtatggatggtcaatttggatactctctattcttaatcttatttccccaaaagcaaaactttgtttctattagcattttttttaaactttttgtagtttaaaaaatttgacttatctattatggatggtttctattagtatggaggtttagtatttcccaaacacaaaacttagtttctattggtattaatagggaaggccaatttgggctcttccttgatcagaattggttgttgacttgtttagctttggttgggggcaaaatatataggaaaaacatttcattgattgaaaacattttgtttgggttatctgaaaattggagatcttgatgacaggtagaatttggctgataaggctgctttggaaggttttttgatgatatggttatttgatgctagtgggtgcttttttctttgaattcaatttgaggactcttcatcatgtatgattttagatgcagtattgctttttcaatgactctcaacgttccttttcccttctgaaaatggaaatgcagtcaagtcagaagga

SEQ ID NO: 27737 - DNA, 420 bp, Glycine max
  Intron number 2 from transcript Glyma19g36700.1 (locus Gly ma19g36700) derived from phytozome v7.0 (chr-ID Gm19; pos 43963193 to 43963612)
caggtaagagtttggcttctgtttttatcttagtgaaggtattgccatgcactagtgtgtagttattttgctctatgatatacatttttatgtgttgtaatatcataattcaattataatgtatatatattataaaacttgaatactttgaattgtcacattagttgcctcatgtagacatggttcggcgtttaaataatataactctgttcccatatgttaaattttactggggagaaaagctttcaaattgttacattttgattttgttaaccttacttgaggctagaagatttctgatgtcaagtaagatgctctggtagctacacaagatatgagttatgtgttattcttttctgtataatttttcctccactttaaatttgtttctctactttttgacttgtagggccataggga

SEQ ID NO: 27738 - DNA, 706 bp, Glycine max
  Intron number 1 from transcript Glyma18g01540.1 (locus Gly ma18g01540) derived from phytozome v7.0 (chr-ID Gm18; pos 832184 to 832889)
gagaccgttctcaaggtattgctctctgaagctccgaactcttcgatttgatttggttttcttgatgtgtggaattgaaattgtaatttgaattatcaactcgcttgacggagcttgtgattctgtgtttggagagaatgtaattagaatcatagaatggaaaagtaagaataagattgtagctctctacactacagtttgcacttatttttagtggtaggtaggatagcgttccagtgcggatggttagtggtatttgctgttgtagctgagaaatgcgaaatatcattatttccactttgattctagcgatttaatttcccgtactaggtctagttgccactgaaaggactttaaagttatgatgataattttgcatggctaagaaagtaatttattccggtctaatttcaccttgtataagttttactgtttgaactactgctttgaagactgctaacttgacaaacttaatcaaaggaagttgcagtttattgttatcagttatgtgtgaattattgtatagagtattaggatgattaacaggaggatatatcattacttttgatttattgttatgtgtgaattagatagctattttggttcaaaattgtacttttataagtacacatgggtatacttttgcgattatatgctgtccagtaattctgaggggaagtaatttatgtttttcaggtactcaagg

SEQ ID NO: 27739 - DNA, 809 bp, Glycine max
  Intron number 1 from transcript Glyma20g30530.1 (locus Gly ma20g30530) derived from phytozome v7.0 (chr-ID Gm20; pos 39177625 to 39178433)
gtgagtgaattaatgtatggagattattttgttatgggggtgctggaattaggatgagattttgattaggaatttcatcttcttgttgtgaattggggtttgtgatccttttgaagaggttaaatggggtttgtttggttgattattgagttattgctttatcaactgccttggaatggggtgacttgaagggggaagatagggcatgcttgtctgtgtttgaatggaatggactgatgggacttgaagtatggtggctgacttagtttaaattgctagcactactaagaggtaatttttaataggatagatgtttcaatgataagatttccattcagcaccttgtgaaaatgtcttggattgtttggtatggaatatcgaagcttgcatcaatgttgttgtagtggctgtagtaactagatggaagatggctaaattatcgttcatctagtgaaatttagcatacgattaatgttgattgcttggacaataatgattgtgttcccaaaattatccgtggcctgtacaatattttaaaccatcaatctgggtcaaaatattaataaggaagagagagatgcttctcaaagaagctgaatgttgtaaaacaatgcttgattttatatgaaacttttgcaatatttgtactacaagatggcttagatcgttgctatttcttatttctccactcctggtatttcttatcatctcatgtaaataattgcttgtctgtataatctttcttgtggtttaccttgttactttttcattcagcaggcattgattgctttgaaaaagggtgctcaact

SEQ ID NO: 27740 - DNA, 873 bp, Glycine max
  Intron number 2 from transcript Glyma18g46830.1 (locus Gly ma18g46830) derived from phytozome v7.0 (chr-ID Gm18; pos 56531529 to 56532401)
cacacagtaaaataaaatatatttgacttgacttagcttttgcttttatgaatttcatgcaactatactttggttttgctatgttggtggttttataatttgattaactagtggaatcatgacagaaaggggggcaagaaataggcttgaatttgcatgtagtttgactttatagtttagttaatgtatttttgggggcatttggtttgaattaagcgtcaaatatctgtcaagttttgattaagtaataaggcaatttggagccatggaaatatacaatgtgctttggtgattgaatgtagatgtgaagtagaattttttctttccttgtactttggagtcttgtttggataaaacttgtcaataaacagtaagaaaagaaaataagaaggtaaaataaattaagcttcttcataagtttaaaataatttaaacagaagttaaaatcagtttttggagaagctaattgagataacttctataaatttgcttatgtattagctaattttaacttatagaataaacttaattcattttaccttcttatttttcttctcttattggtacttattgtgaaattcatctaaacaagacctagaaagagaacgagagggagtaacttcttgcatacttctttttattggctattgtttcttacactctggtcttgagagcaatagattatatctgcttgattgcttcaattatagatttccattgtagatctttaaactatttggtgccatgtaatttttgcaagtgttttaaatgtaaaaactattgtcatatggaaccatgttggactagttttcgttttaaagatgaacttccatagtttttcgtgtcaggtgcgaccagtagtggaaactggat

SEQ ID NO: 27741 - DNA, 602 bp, Glycine max
  Intron number 2 from transcript Glyma20g33440.1 (locus Gly ma20g33440) derived from phytozome v7.0 (chr-ID Gm20; pos 42047623 to 42048224)
atctcacattaaaggtatatatgatcttattacatttctggtgctctagttgcttccttgtactctgctttagcaatattccatttgttatattgtgtgtataataaaagcttgatcatttctcctcattttcatataaatttaaaagtttacattcagcagcttctagtgtccttaagattttgaactttaagtttatgtttcgaaaatttattttacaaatttaacccaaatgataatagtatcaaattatagatcaccaaagcaagagctgaaatttaaagcatcaacctccattttcataaaaccctactattcattaatctattgaaataataatcttattttttatatatttgtgtctggttgggtaagttagtaattattacttgcagagcacagagtaatatgtcttttcacggttataattttagtagaaataaagttcttaatcagtgttatttagtactatgatttagagtattaaagtgaaatgtataacattgtgttgcctcactatcactcttttccattctccaatttttaacaacttgtcacctgctaaattctttgttcttccatttgacatttacagatattag

SEQ ID NO: 27742 - DNA, 741 bp, Glycine max
  Intron number 2 from transcript Glyma19g30980.1 (locus Gly ma19g30980) derived from phytozome v7.0 (chr-ID Gm19; pos 38687787 to 38688527 reverse strand)
aaggccgtttcagcactctggggttgtcgtatcaggtacccctttttgtcttttctttttaattttccgttcctttttattttatgtaataattggtgatcaggcacaatgtgttgttttaagaacgttgaactgggttttgtgtgtgatattcatgtgtgtttaggacttaaggagtgaattgtcatttgtttttgagattttgattttgatccttaattagtttgaatccctttttttaggtaatgatttggatttatttaaaattgcctggcatgatatgtcaatttggtatgataaggctttataggattgatccatgtggtaaaacctacattgatttaaaattgagctgcagattcatttcgttatttctcttgcaattgtagttagggataatgccattaatgaacaaatctggtgggagaataaatattacttattcattatttgcccttctggaatatttaaacactagaaacactggaactgtgttatttattgcgcagatgtgaacttattgtgcattagctatgtagtctttttttcttaatccgcaaatgttagttgttaatttgttagtttttgttagcgggaggattcgaatccatggcctatccctccgtcccttctctctttactgccaaaccaacctgatatctccattagctatgtagtctaacccattcttttctctttttggcaggatatttttggaaagcttcgcctttggaagttgat

SEQ ID NO: 27743 - DNA, 324 bp, Glycine max
  Intron number 2 from transcript Glyma17g16150.1 (locus Gly ma17g16150) derived from phytozome v7.0 (chr-ID Gm17; pos 12855707 to 12856030)
tgaaattaagccagtgggtcccactgtatctgaaggtgataaactggattatttttttgtttcttcctttagaaaatgaactagtgtgtttggattagatttgtggtgagcaataatcaattatttttaatggtgaatgcaaaacaacaaaatagttgcttttactttttcatgctaccaccatgattttgatttgaagagttgaattgattcttggtgttatccaaacacactagaagtctggtttgctaatattaatttttattcttccgtttccttgtatgtgcaggagctgattcaacaaatcagaactcaaaagttcaa

SEQ ID NO: 27744 - DNA, 981 bp, Glycine max
  Intron number 1 from transcript Glyma20g35190.1 (locus Gly ma20g35190) derived from phytozome v7.0 (chr-ID Gm20; pos 43470984 to 43471964)
gctttcagagtaggaggagcgggaggggtaagcttttcttttgccttttcgctttcctgctgcatctttttttcttcttccatattttccccccttttccctttttctttttgcgctgtctcgttcggattttgctgattttagtcgctagtacaaattcttggttctcaattgttgtcccgctttgtggttggttcctcgtattttgagtgttctggtttttttcttgttttgagtgcaatatcattgtttaatcacgagtttttagcttgtcacactcacttgacattaaatcgatgtttatctcttggtatacatacagctatgaagatattgccgatgatttttttttttaaaaaaataatttcgttcgtattagtgtcttttgtttgtgttctggatgctactattttgatgcatttgagtttggcctggtatatgttatgttttcagtgtatgtttgttttgctatgagtacgccttagaaattgaaaatgagaaggtcttcgttctttttcccttgcattaaatttcaatgaatcaagctagctagatcatatgctatcaagtgaaagtttattgaatactttattccttcctcatgcatgaagttgctttgagttgcaattaactttagggttgcctctatcagaattttcttctaatcaagggtaatggatgcatgataagcaagcgaatttgccagttttgagatttttttacacacatactccatatgtatcttgtgacctgaagtgaagtaagggaacttacatgagttaggagtgtgcgattgtatctcttattggattgttgtattttgtttttgtgcagtgaaagaaaataacattttgtttttcctgattgattagattcattttactggaagaacattatcattattattggaaatatggttaaagtattgaatttgaaaaggactagtgtttagaatttgatgtgtggcttcaatgtagggaa

SEQ ID NO: 27745 - DNA, 716 bp, Glycine max; identical to SEQ ID NO: 16736
  Intron number 4 from transcript Glyma01g03650.3 (locus Gly ma01g03650) derived from phytozome v7.0 (chr-ID Gm01; pos 3133794 to 3134509)

SEQ ID NO: 27746 - DNA, 366 bp, Medicago truncatula
  Intron number 3 from transcript AC235488_13.1 (locus AC235 488_13) derived from phytozome v7.0 (chr-ID AC235488; pos 56500 to 56865 reverse strand)
gggaaataaggtatgtgagtcttgggggtcgtattgttcttctcaatgcgatgattaatgtgattctcgttttttacttatccttttttaaagatgccaaacaaggtttggagaaagattgtcaaaattcaacgcgatttcttgcgggaagtgtcgatagggggaggaagctttgttgggtaaagtggagggtagtttgtaaacaaaggatgaagggaggtttaagggcgagggatgttagattggtaaatttgagtttgttggtaaagtggagatgaagattgttacaatgcgatgatggtttgtggaaataggtgcttattgagaagtacgatactcgggtgtttaatttgtaggtggaaggtg

SEQ ID NO: 27747 - DNA, 656 bp, Medicago truncatula
  Intron number 1 from transcript AC235567_10.1 (locus AC235 567_10) derived from phytozome v7.0 (chr-ID AC235567; pos 41388 to 42043)
atgtaatctatggaatgaatgaatataattttatttttgtaaaaaaaaaaaaaaaaaaactaatatcagacctaaacccataaatataggtatttatatgtccattgtagatatttttggtgggtgccaatgtggttgtcatccccaatttggaaggatgcccttttccatgtggttcccacaataagtcaacatatttgatatttcaaagctgctctccttcctggaattctttttctgcgctatcaaacatatagggtaaacgtggaaaaggcaaggatctgaaaggctgcaaaattttgatgactctttcaaaaagatgcatgaagaccaacttttgagatacaatacaataaagagatgtaataataatagtgcctatgacttaaatttttgaataaatatatatatattttttgttatatgtatcatttcttatatcttattgtatttttattttatttaaacccttcgattttcaaatgaaataactattcataatctaaagatcaataaaaaaataagtaaccatttgatgaactcggactctctatttgttctatcttaattgtaaccatttgattgatttcaattaatttgcttacctgaacattattcatttagaggtgaaggcaagtgacatagttaacaatatt

SEQ ID NO: 27748 - DNA, 520 bp, Medicago truncatula
  Intron number 1 from transcript AC233680_17.1 (locus AC233 680_17) derived from phytozome v7.0 (chr-ID AC233680; pos 77276 to 77795)
ttttgtgtggagtctgctacacttttagtatagtctatatcatgttagccaaattcactgattcacacagctatggaagtggaaccattaatataaattcagacaattatggagtcattagtttaagacagtttactaacctaaagtcaaaatgtaggtcatcttatcataacaagatgatgtgcctgaattaaatttgtgattcactaaatatagaaactttaagatttcaatggagatttcaaataggggaaagaaaaacacaaacattcaaatataaatattagtattttaatattcatgtatttctcatccctattttgatatgttccataagtggagataatccatctggatttttttggatctaataactaggctactaaactcacccattataagtgtggaaaagtggagatcttcgaactctgacccctgcacttcaatgttcataaaactactaattgaactacatacatttacagaactaccccggagacacaaggagggttgaggacct

SEQ ID NO: 27749 - DNA, 1033 bp, Medicago truncatula
  Intron number 1 from transcript AC233683_7.2 (locus AC2336 83_7) derived from phytozome v7.0 (chr-ID AC233683; pos 45 530 to 46562 reverse strand)
tctctccacaaaccctaattgttgtaacttgtaaggtaatgtgaaattgaatgtaatttccttcaattctgattctgatttgatgattacatgttctttagtaatgtgaaattgaatttttttagttttcgattgctactgattaccacagaagacatgaatgttctgcttattattatggtttagaacatgaactctgattgctactgaactgtgttacttgtgtttaaataattgtattgagtgtgagagacgaattccagttgaaagcctcggttttaaataattgtcttaaacaatagtagaatatgaaagcctgataactagtcaaattgttttagagttactatatgtaattaagaaaagttaacttacttcctttgccaatgactttgagaggaggacgtaatcaataatcctaaatagtagaggtggaaaagatggaaaatgtaagcttatttgattcaaaaaaatgtaagcatatcttcaacttctagcatgcctagatgagctaatcttcctctatttttgatagtgtttggtttttctgtatatgactagcatgttctagcaacttgtcatgaaaagtagcaacattcatggcattttccatcagaaagatctatcaaacctggctcaacttttgaattcagctatcatcgtcttctgtttatgaaaatcaagtgaaattggttcattttgaaatcatttatgttatttcaatgaaattgaaaccggctattgttatgaaatttgaatgttattagaattgatgtaacattgaaaccatgtattgttagttgattttggaactgtttcaacaggaaaagttaagatgaaaagtcgggatgcgtaaagcatcactttgaatatgatgatcggtttttagtattattttgttgaaattttttatgaacgacaccaaaatgggtcgtattgtatattatatgatttatatattttagtttatttttaaagctgccaccccaaacttttaggtctggctccgccactgccctgaccctcgaacaac

SEQ ID NO: 27750 - DNA, 564 bp, Medicago truncatula
  Intron number 7 from transcript AC234701_20.1 (locus AC234 701_20) derived from phytozome v7.0 (chr-ID AC234701; pos 64427 to 64990 reverse strand)
tattcggtgcgaggtatagaagccacaatgattcctcttatcttgtggtgtttcttataaagcttcttctgagcaggagtatgtattcttctgtctatagcagctccttcttcatccaaatccagatcatcaactccatcttccagtatgtcccataactcttcatccaatcccatgataaagctgtacatattagttttccaccatgaaaactgttctggatctccattaaactttggagcttttccagagtctgttttcttgtcagcagtatcatagtcatgcttgacacttgtgtattttgtagtaactgattcctcatctccagacatgtttttctaatagatcttgaactgtaacacggttaagtgctgtgataacagagcaagctctgataccaattgaaggtgaaaaacacaagaagggggggttgaattgtgttttctttttctcttaaaaatacttcttctgataaaacttcagaagcagtttgattgcttctgatgaaatgatcagagtcagattgcagcggaaaagaacagagcagagaaaagaaagacaaag

SEQ ID NO: 27751 - DNA, 493 bp, Medicago truncatula
  Intron number 2 from transcript AC235094_11.1 (locus AC235 094_11) derived from phytozome v7.0 (chr-ID AC235094; pos 55339 to 55831)
attcagtgataagtacactgacatagcctccttaggtattttattttccttcaatttctatgtattttattttccttcaatttctatgtatttcgtcatgccattctattgttaaacctgttactcttgattagaatctggaagattgatatatttgatgattcttcagttgtggcattgttttatggtgacttaatgacatgagtttatgggcttcaactatgatttgattataaactgatactctaactcatggatctatttgactatgaactggtctgtagatgctcaaaaagaattcacaagttatgtgttgattgtagtagttatatctgtaaacaatgtatccccgtgtcccatgtaattctgtcagcatttgcggtcttctaagcatatagtcttgcgtgctgatgatcttatacttgaagaatatttttttttttttcctgtctgtgtaggaactctggcaaagtacactgctggtcaagtgtat

SEQ ID NO: 27752 - DNA, 668 bp, Medicago truncatula
  Intron number 1 from transcript AC232874_21.1 (locus AC232 874_21) derived from phytozome v7.0 (chr-ID AC232874; pos 64830 to 65497 reverse strand)
tatcgagttggatctcactggtggaggagttcgaggtgcaaagaaaagaatacgacattgatatgtgataatcaaggtctttttttgaaaggaaggtcgttaatatttttttttaaggaaggaaggtcgttaatattgtgtttggcatatgcgattgaaacaaacaggtctataactatattgatgtaaatagtctataatttagattaaattagttattcaatgaataaaaaatttgttttttgtttatgataatgatcaaaaggcgtatataattattttttttgaattagcattggggaaaatcgaacatgagaccttaaggaggagcacactcccagatcccaagcaaataccttgaggagtatataattatctagtttgttgttttttccttattaatgactagagggagtatataattttttttttttaataaactagagggagtatataattatctagtttgttgatgaatagtcaaataaattaaacaatacacactttttttttttgttacaaactatacgcaatttgagttcaccctttgtatctcatatttaatatttaattcatgaacaagttatgttgatgaattgtcaaataaattaaactatacacaatttttggtagaagccagtttcgaaccaagagcttcaaggttgaaa

SEQ ID NO: 27753 - DNA, 508 bp, Medicago truncatula
  Intron number 2 from transcript AC235022_5.2 (locus AC2350 22_5) derived from phytozome v7.0 (chr-ID AC235022; pos 23 563 to 24070 reverse strand)
cttttaagggtgaagagtcttggcaggttgctactctttttgttttcttgtgttttgcattccttcgcatttaattattgctaattaattgatattatattaagggcatgtttggattgacttatttgagcttatcttctggtataagtgtatttgtgagactgttcgcaataccgtatgaaaacaattttgacatgtatataagttgttgttttatgcttatttccattagctcttcgtggtagctcatagctaatacatacacacttatatgattagcgcttatgctataagtctttaattaagttgtttatctaaatagggtctatgtgtttgttagaaccatttttagtttcatttttcaactcttgctgattggcttaggaaactgaaacatagttgtatacaattcaggtgtgtttggatctttagtttcaattagcaactactgagattttgctttgtgctttcagcctttgactgaatttacagctagaaagtgcaagcg

SEQ ID NO: 27754 - DNA, 826 bp, Medicago truncatula
  Intron number 1 from transcript AC225517_33.1 (locus AC225 517_33) derived from phytozome v7.0 (chr-ID AC225517; pos 140030 to 140855 reverse strand)
tgaacatttttcaatacggtaagcgttgacgcctcatacatattcttaaaaacctactatacttcagtttggatgaggaggaggggagcatattaagttatatagtttacgccttccttagtgcacaccccctctggtcacatttgtgagcaaatattcctttttcagattcattgaataattgatctaccctaactataataaagtttagatacatcaattatttaatgaatctgaaaaagtaaaagttgcttataaacgtgaccagatgagtatttttaacagctaaatgttagtggttagtttattcgggtgggaggtaatattagtagaagggatcgaacaccgaacctcctagatgtaactcttttggtgtcccaactcataccattgtgccacacctttagagactattcctaaactaatatcttgtaatatatctgcagttgattacaccgtcttaattagaggagtttctgttatttttattgactataggacacatactgcaattaatgtgtatgtttacaataatatttgaagttggaagttggaaccctttcaatttttaatgcatgggaataaggactttatcgagaggcatatgattggtgttgcctaaatatagaaagttttgaatattgtagaattattttgagaagtgttcggttttgtaattaatttgggaggggctgatatcaaactttctcttcagaattaaaaaaaaaaaaactctaaattatattttcttatgtgtaatcaaactgtcttttgataccccttcagattctttaacaccatcttaattattgttagtgcagtgaat

SEQ ID NO: 27755 - DNA, 578 bp, Medicago truncatula
  Intron number 2 from transcript AC233659_28.1 (locus AC233 659_28) derived from phytozome v7.0 (chr-ID AC233659; pos 119860 to 120437 reverse strand)
gttcaattgggagtttttgttgaagctcttgacaggtacttgagatcaattctctcttcaaaattttcattttttgtctcttgtgaatataaaaagtagacaatttatgcctctgaaatggttcaaactgattcattttgtttcaattgacaattggccaaatgctagcctaagctatggagttttgacacatattctgcaccttgtattgtgttgaagaacctttctgtgataaaaacttgttttatttgttgcatgtggtagttcaatgaaattatctgtattcctgatttttgctaaaactcttcactttcttctctgtttctcttagaacacttatctgtggtagatttatcaatcactttatagcatgacacagtccgttcttgaattttcttaaatttatgtggaataggatttgatgtcacaatttggttcatttgttccttttgattatgtatattattctccagacctttgtgtgtctttgttcaagctttgaaagatcatagtactgaaacatcgccattatccttcttgcagtaagaacggaaaaacttacaaagttaatccaacat

SEQ ID NO: 27756 - DNA, 731 bp, Medicago truncatula
  Intron number 1 from transcript AC231342_14.1 (locus AC231 342_14) derived from phytozome v7.0 (chr-ID AC231342; pos 65643 to 66373 reverse strand)
ttcttgcttgtaatttttcataggttctttctgttgctaaaagacttctattcgcagcaatttgttataagtgtaataaaaagcatataaaatacaattgaagtcaaaattgttgtatcttttatagatttgtttagtaacagttattgctactatttgcatcatctgcaataattttcagttatgtttggatgttctataaagaatggaatagaaaaatagaaatagagtgatatagaattttcattgtattgatgttttatacagtaatatcacttttccaattgataattcaagaataaaaaaaactaaagtgataacattttttatctcatccacaactagtatctaaacctcttagaatattttccctcaattcatcctcaactagtactgttttaagaactttgtttttgaagaaggaaagtttcgtttcatgtaaactgaattggcaatactagtatttggtagactattacactctgttgttaatagcggccgctatcgcggcgcggagcggcaaaaaacagactaccgcgttggagcgctatcgagtcgcgtgttagggaaaagcgggtcaatagtgggctttgcggccgctatccgatggagcggggcggaccaatagctggtcaaagtgccgctttttcgggtcatagcacaaaaccactgcgttttggtttttggtgattatttctggttaggttttcggttagatctgtagcagagag

SEQ ID NO: 27757 - DNA, 462 bp, Medicago truncatula
  Intron number 1 from transcript AC225507_6.1 (locus AC2255 07_6) derived from phytozome v7.0 (chr-ID AC225507; pos 24 976 to 25437 reverse strand)
atctcgttcgtgctcctgaagatcctatcctcggtgtatgttttcttctctttctcttcgatcatcagatcactattcatttacctttttttatttgatccaatttcgtgatcatattaagatcgtctgtgatcttaactgcacaatttcaatttattaattcatttcagttatttttatttatttgatagattattatgcaattttgattgtaatttacgcatgaatgaatttcaaagcgatacggttctgatgctgatgtcaattgttttcttgtgttgtgacttgtgaagcttacgcaactttgatagtgacataaatttaatttcattccaaaattttgttattgatgattgctctgttatcttacctctgtttttattttttatttttttgtctatttcttgtgtctgtgtttgaaaaataggtaactgtcgcttacaacaaggatccaagcccaat

SEQ ID NO: 27758 - DNA, 528 bp, Medicago truncatula
  Intron number 4 from transcript AC174330_1.1 (locus AC1743 30_1) derived from phytozome v7.0 (chr-ID AC174330; pos 14 548 to 15075)
ggatccggtgcattagtgctggtatgatcgcacctgagaataaagcgttgtaattgtatatatgcatttctaagtttatttttcaaaaaagacgtcaaactaagctaattaacgaatagagttttaggttgcgtaaattaacggaagaaatgaaatacaatcgaagtttattttttaaaaacgatgtaaaattacgctaattaacaaaaagaacaagaaattttggcaaaaagaggtgcaacacaaggttaactttcaatacggtgccataattttataaatatattaatatatgaatcaaccaatatttgactaagagaatgaaaaaaaatcattctaaaattgaatgagccataaaagaaaatgagaaattttccctaagaaagtcatcatggaatcaacaccatttaagcattaaaatcatatttttggtgattttgtttttttttttttttgaacaaatcaaaatggaatatattgctcaaaagaaaaggtgattcaccccgcacaaggtgtgctaaagtgaga

SEQ ID NO: 27759 - DNA, 637 bp, Medicago truncatula
  Intron number 2 from transcript AC233656_17.1 (locus AC233 656_17) derived from phytozome v7.0 (chr-ID AC233656; pos 56521 to 57157)
cctgaaaacaccagagaggtataaactatgaattattatctcatatcttgattaactttgtactactgatgtcaaacatcctgtgccctttatgtgattgacaatgcaaatgaacagcatgaaatttgatgttgcctcaaccttaaatattgtagcttgttagataatcctttcttgacttgaccaatggtctcagactcgattattagtttagatattttcagattcttaatagcatagatttgagtcttttgccactctcatacatagtcacagataaaaagaacttggaatagtttacatgcctcaagatattttcgatcagaaattttcacaacagtgctagtttcagtatcaataccactttgtatcatctcaataatttgggaactgagactgtctttttggtttttttttgttgctttgaatttgaggtcctattttgtttcattgttatgcagtcttctataaacagtgaggtggatgaaattttgtctgtttattgtttgtgggatatatttgattcttttagtgtctgccaatccatgtcttattttaatgaatgcgctcacttgttatggagttgcttaactcactttctgtcgtttattgggtaacagatcccttttttttggtg

SEQ ID NO: 27760 - DNA, 459 bp, Medicago truncatula
  Intron number 1 from transcript AC234702_3.1 (locus AC2347 02_3) derived from phytozome v7.0 (chr-ID AC234702; pos 22 077 to 22535 reverse strand)
aagtcaacctcagtgaatctagggtaatatatcatcttccatcttagaaagttttgtttttttttttgtttaaagtttgcatttttatgtttttgttttgttgtttgctttgtgggttttgataaagttctaaactttaacatatgtaattggagttttgttcttctttttgtggtttttgttaagatcatgtaatattttttgtgggttggttagttggtttaatttggtttttgttttctactttctagtttcttctttttcttttaatgtattgggtttcttgttatggtaaattggaaagatttgattttcattatgtgtcacaataattggaaatttttgtcttttacccaagatttgtttcattttctttcttctacaatgattcaacacaaaaaagaaccaatctaaagtttttgttttttgttttgcagagtgttgttccattgaatactt

SEQ ID NO: 27761 - DNA, 1000 bp, Medicago truncatula
  Intron number 1 from transcript AC145023_2.1 (locus AC1450 23_2) derived from phytozome v7.0 (chr-ID AC145023; pos 50 10 to 6009 reverse strand)
cctttgtactatagtgtgtttttcttctttgtttgatttttgttccaatgttgaaaataaacaaatttgctggtagtttgaagtttatattggttgaaaattgaaacaaaatgtgttgactcatttggtgggagagactttgaatagtttgatttcttatatttatgcttaccatctcaatttgaagatccttttattttatttttttaattttacttatattataaagagtttctttcaaatatttacatgtataactgtgtgttgaatcatttagaatatggggtagccttagatagcatacattgcaactttggttttcttattgatagtataacatgaaatacttataatgatatttgagcagatctaactcaattatattattttctgaaaggattcttcataaaaactttaggcatgaaccaaaaatgtacgacacatttggatcttaaaacaacctataactcaaaaagctatttagcatgatattttatgttgagaatgtgtcttggtagatggtgttatgtatctcattttcaaattgctatatagtgttggtagtcgatgtgtttttagatcgtagttgaattaagaagacttaagcttatatgtccaagacttaagcttatatgttcggacatgagggagctttttcttcgtggctgtcagtgtgtgttatactgcattatgtgttttgtttatgtaagttttttttctccgctgctacttcaaattcaggtatgccttcaatgtttctgttttgccattttgtgcgataggctttgttcattcaattttactctttgcctaatctgtgttgcatgcatgaatccatgtctctcttctttaggacttctcatgtataaatagggaccatatattttattcatattttcttaaaattgtttatatcatttctttttaacactctctataacacttcttaaatgtggatcataaagattcaatatccaagcttcaagcaataaagacaaga

SEQ ID NO: 27762 - DNA, 592 bp, Medicago truncatula
  Intron number 3 from transcript AC235487_14.1 (locus AC235 487_14) derived from phytozome v7.0 (chr-ID AC235487; pos 80842 to 81433 reverse strand)
ttgtgttgtcgcacttttgactacgtctcagattggtaagtttgttttttggattgttgaatcatatgccttatacttatgcttatgttatatatagcccctgtttgaataaccagcttaatttgcagcttatagcataagagttatgatatataagaccttattataagctatttccataacaaaagataaaataaagtcaaattgtttttgtagctgagatgaggatgtttcactagatgtggtgtaagactagacaagataagattagaaatgacaacattagagagagaggttgggttagcacttatagtagaaaaaatggtggaaactagagttaggtggtttgtgcatgtagagagaagacttttagatgcatgctatgtcaatagatagttagatcactggaggtagagatagacctagaaaaactataagaaagatctagagattaaaagtctcacaagtgcttatgtcaatagataagctcaaataaggcaatccaaacaggccaatagttgaggaatacgtgttctgattaaactgttattgcttctttctttttaggcttgcaccctgcactgaagctttc

SEQ ID NO: 27763 - DNA, 300 bp, Medicago truncatula
  Intron number 1 from transcript AC233685_63.3 (locus AC233 685_63) derived from phytozome v7.0 (chr-ID AC233685; pos 268641 to 268940 reverse strand)
caggtgagaaaaataataggcctactattttagtttattattagcataatggaaacaatttatgacatgcccgtaaactgttttcttcttatattttcataagctcttcaggatagtaggatagtttatgaaaacagcttatagattatgtgaaaaaagtttgactttcttttgtcaattgttatagaaataacttattcataagcacttatagatttgttggcaaaagtacacaagtttgttgacccttttttttcaattttaggtgtggcctcctattggcaagaagaagtttgagac

SEQ ID NO: 27764 - DNA, 539 bp, Medicago truncatula
  Intron number 1 from transcript AC235567_86.1 (locus AC235 567_86) derived from phytozome v7.0 (chr-ID AC235567; pos 320751 to 321289 reverse strand)
gtatcaatctgcggtcacgtctttcacgaactctggtaaatctacaactaccctcttcaattttctcacattaatcgaatcttaaaccctaaaagtttcgttttttaccactttgtcttgttgggttagttcgattttgtgtctgtatcacctacacttctggtgaaaggtatgtttggtgtaatggtgttcgacatgtgttctgtgagctgaaagtctcgttctttatcaatttctctatttgcatcggtttgattttgtgtttttttttcccggataaaaaaatgtgggtttgtttcatcgtgttttttatttttattttttttggataaaagattgtgggttgatttaattgtgttttttgaggataaacaaatgagggtttggttgattttgtgttttttgaggataaaaaatgtgggtttgcttgattttgtgtttttttgtttgattttgtgttttttgaggataaaaatgtgggtttgcttgattttgtgtttttttgtttgattttgtgttgtcttgtgtagtttacagca

SEQ ID NO: 27765 - DNA, 921 bp, Medicago truncatula
  Intron number 3 from transcript AC233661_12.3 (locus AC233 661_12) derived from phytozome v7.0 (chr-ID AC233661; pos 66503 to 67423 reverse strand)
gagagtaagaaaggagactcactatcaatcaacgagtatgcaaaactttccctataatatattttcattattctctagagacaaaaatagttgttttatttgctgatgatggtgatgtttgcatatttgtgcatttactttggcctgcctcttaacatatgatggaagttaatgaagaataattggtttttgactatcctaacagagataccctaaatttaaaaactaattactttttcagtcttgttcataacatggaaatgatttttctttcattatcttgactggaacagagacgagtcacgggactaatcatttgatacctttttatttttcatattacctctttcactgtgtcatcatgaacaaaaatagtagagttgatatgctctttactgtattgcatgaatacaaaccatgaaggctgaatgtgtattttaattacgtatcagcatgacaggatacgatacggctccttggatcattacttgtgattgtaaaaatagttataggtttctgcctacagcataatatattcgcactctgtatgtcatgatgtcaacaaaaccatccttgtaggatttacaacaaggactgtaaaaaaatggagtccaaggagtgtcgagtagtttctcagagtatcataaaaaaaactaaaaattaaggaaaaaaactgaagactttcgagacaggtatcaggaagttttttaggagtattggtggcaaatacgttatacttttcctaatttggagaatttacgcttcatagatagttgatctcgttgtcaactcaaaatcattattattctaaatattctaaataattaatattctaaaaaagatggaaattaagtttcttgcatccactttggctgatatatttgtaataaaaaaattatagcctgctttgatttgtttaac

SEQ ID NO: 27766 - DNA, 632 bp, Medicago truncatula
  Intron number 1 from transcript AC146793_17.1 (locus AC146 793_17) derived from phytozome v7.0 (chr-ID AC146793; pos 95986 to 96617)
tcctttgttaagttgcaccttaagcgaacagttaggtcactgtctataagggcataaggcacctttgtatttagtttctgttgctacctgtgcgtcttgtgcaggtttaacgtcaataatatttgctgattaagttttggtgataatgtattgaagttttccttttgttttctattcaatattctctagtttaagaattatggtttgtattttgagtaacattgttacttacttggttgatcgactatagtgtatatcatgagtaataatattaactggttgattatttacaataactgagttttgaatgatcaatttgggataattattgaactctttgtgggatgatggattgactttttattttattttatagaatgaccttgttatatggtagttcaaatttggagttccagagttttggcatagttggtttaagttataatcaaatttcttcctactatacttttttttttttgtgtgtgtgtgtgtgtgtgttaagccttcgatttctaggtgtgaacagatcttaaattcagagttgggttaggaggtaagtcaagtgaaaaattatttcatctaataattgaatttagttctcccgaatgaactggaaggactggagttgttgg

SEQ ID NO: 27767 - DNA, 822 bp, Medicago truncatula
  Intron number 2 from transcript AC233661_22.1 (locus AC233 661_22) derived from phytozome v7.0 (chr-ID AC233661; pos 117461 to 118282)
aactaggagaaggtggatttggtcctgtatacaaggtatgtttttcttttggaaattatttagttgtttgttagtaatactttttagacaaaattagccgtggtcctctaatgtttgtcaatactacttttatatactatgtaacatttttttttggatggtagtcagggttgaccttggatatattatgcgttgtccctatcaatagagctaagcttatgaggacatactatataacattttatttccacggttaagttatatttcgtgaaagaactaatatgagaaaatgatcaaactaaaaggattatctacatataatttagcccttttcctactttattgatagccaaatatagattgcttgcagtgcaagctagggtttctctatgaatttagggttgacaaattgagagaaggagaagatatattaaaaattgttgtaaactgtgaatttcattaagtattgaaaactagttacgacatgcttatatagagcttattcacatgactagcttagtaagcaatcacaaacaaacttaactaatttgctaactagtagctaagtcatctaactaacttgtaacaaactttctaaccatgttttactcttaactaacttgagttaaaaccatctaacttgaattaaaactaacatttattagaatttgaatccgtcatttaactccttcataaagtaagattaaattgttggatgttaacaatgaagatgtattttttttcctttgactctatttaagttgccatatttgttttgttattttctttgcgttcgacatttatttcagggtaatttagttg

SEQ ID NO: 27768 - DNA, 988 bp, Medicago truncatula
  Intron number 1 from transcript AC145328_6.1 (locus AC1453 28_6) derived from phytozome v7.0 (chr-ID AC145328; pos 26 069 to 27056 reverse strand)
ttcagtttatagtataggatttgatcttatttctatcagttatttatattctttataagattttgtttgtggactatatattcttaggtttgagtatttcaatataataattcttgcatgtatggataaattaaataaataattcattaattttagttaaatttcatggatttcatatttttattcttttttaattatgtatgagagtaggatgaaatattttattagaggataaatctcttcatctattttttatactaatttttaaatgcaatatcttgtttgtttcttttgtagtttattattcttagctctggtcatgtgtgatgtattcaatgttgaatgtattttaaaatctatatttgaagcatgaacacacttcataggaatacgtaattataaaagtttacgaggaacgacggaaaaacaaaccctagtagactcatgggttttcaaaattcacataaaattataaactcaaaatggacaaattttttattaattgaatatattaatggagtataattttttttatgcgaagtttttattttgttttcttaatgtagttttcatgttgcacccttttgaaaaaaaaaaactcatattttggtacgatattagaaaaatatcattagtatttttaatttatatttctatttagaatttttttaggatttgctctttatttattttcatttgagggaagatctatattttattcaaatatatgatttagaaatatgttatgtataaaaaaaaatgagggatgatttgttttttgtttaaaaaaaaaatgttttatatgaaaattataatatcttaataagatattattaaaatatcattagtattttgattttatatttctatttagaatattttaggattttttatttatttacttttatttgaattttctatgttatttcaatatatgatttagaactatgttatgtatgaaaatttaattattttagcgaatatttga

SEQ ID NO: 27769 - DNA, 349 bp, Medicago truncatula
  Intron number 1 from transcript AC233576_2.1 (locus AC2335 76_2) derived from phytozome v7.0 (chr-ID AC233576; pos 56 61 to 6009 reverse strand)
tctttggtgtctgctactcgggaaaatcaacacgggtatgtaaaagtttactagttatatgtacatctttgaattttgtctgaagagttgcaatattgtgtggattactataatttattgttgccaatatcatgtacttactcaaattaaacctgtcatggtacggtaaacataactttctttgatttattggttgaacagatgttggccgttgggtgaaaatatagctttgtcatttagggtgggcatgtatatagctttgttctttttggtgtttaggcttatgcccctctgtttgttgcacttatttttctgcattttcccttactgctgctgcgttaatgacagt

SEQ ID NO: 27770 - DNA, 977 bp, Medicago truncatula
  Intron number 1 from transcript AC225518_16.2 (locus AC225 518_16) derived from phytozome v7.0 (chr-ID AC225518; pos 52269 to 53245 reverse strand)
gagctcatcaaatacggtttcatcgaagacatctggtaaaccctaattccatttcctatttgccaatttcatgaatttcttctttgttttcagaaattgtatgcatcgtgaaggaatacactttatgaccttaatctgatttatgattttgagattaacaattattgccaaatcgttttgtttcagtgtgtttagaaattaggatattgggattggactaattactttggtgatgtttttgttgctcatggttaggttaaaattaagaattgtgattcaataattctgcggttatttcaataataccatgctctgtttggcactgccagattttgagcttataacctcatatttttgtcaataaaaacagttagtttgacaacatttttgtttctctcacgagttaatagcttattttgattagctaattcaattagcttatatcttataagtttttctctcaattttttccacgtcatcttatttgaaaaaaatttaatatatctttttatttataagctagttcagccgctaattttaccaatcactacaaattaaatcaactagcctatgtactataagctagcttataagctattcactacaagctcatccgttataagctagcgtatcagctatctgctattgtatgccaaacataactatatttatgccaaacataactatgtttatgtgtatcacaaagaatgagtttttaacccctgcaatatgaaatttcagtctactatttattcttttctcttccagtatagatctcgaggggcatgctctttctggatgataaaagtccctgatgcaaaatttccaaatctctcactgtttaaaattgcgtttaaatgatattcttatttggttttatgctttcgtatgtagattatcattgctataattacttttatgttagttttctttttcagacatttaattaatgattgaatctgtcttttgtaggttcc

SEQ ID NO: 27771 - DNA, 1009 bp, Medicago truncatula
  Intron number 1 from transcript AC233656_2.1 (locus AC2336 56_2) derived from phytozome v7.0 (chr-ID AC233656; pos 74 20 to 8428 reverse strand)
tgacgaggttaattgtcttttttcttattatgattcgtatttgtgaattttgtgatcttatcttcttaaacacgatttactgttgatgttgttgttacatttgtgtaccatgtttgtgatcgtgtcctaatcttcaaagcaatgtatgaggctacttaccttttctgattatgatttatatttgtaaattttgtgatcttatcttcttagatagaatttgtaattgatgttgttgttacgtttgtgtaccgtatttgtgaattttgtgatcttgtcttcttaaacacgacttgttgttgttgtgcaaagaaagaataatattaagcaatattttgcaattagctagctatatttgataaacctttatcagcctcttgtaaataaataatagacgtcttagatgtgattctatttgatagtctttttatcttaaaatagatgttccgtttgaattttacacgaccattaaaaaaatggttaaaaatatttatttttaatggcaaaatatatttcatttaccccgacaccctctaaggaaaaaagttaaactctactcacaatgtagtatacttgattagttggatgtgtcgaaaatgtaaaacctcttacacttcaaagtcaaaaaaattaatgcattatattttaattctaaaatctcagtcatatttcaaatcagatccctatatgaaagttatttgtcattacaatccattatagatcaaacaaccaactgactcaataaatggaattttatatttttgtcaagtattgggaaacttaggtcattaaccatcgttacctaattctttaaaataaaataaaaaaacaatcgttacctaatgacttgaaattccattgcacatacccaaaccttttttttaacaaacataccgaaacctataccaataaaaatatgataaattttttcttcaaaccgtaactaatttaattaatttacctttgaatttgaaaagtcaaattaaatacgtatatacacatctcttaatac

SEQ ID NO: 27772 - DNA, 294 bp, Medicago truncatula
  Intron number 1 from transcript AC233658_5.1 (locus AC2336 58_5) derived from phytozome v7.0 (chr-ID AC233658; pos 35 710 to 36003 reverse strand)
ggttctcacgtatgtcatatgttgcctcaacagttctatcataataaataaaagggttgttgcatcctgtaatttcttctcttgagtgcagctttgattatacttagcagcatttgaaagaatatggcacaattctaatcaacatataacgtcttcttttatcaacaagtatagctttgaaacaaaaaaataaatgatcttccaggataattaaactaggtagaaacaacaagaaccgacctagatgttttttctgcagagcatttgaaagagtacagcgcaactctagtccaa

SEQ ID NO: 27773 - DNA, 829 bp, Medicago truncatula
  Intron number 1 from transcript AC233571_2.1 (locus AC2335 71_2) derived from phytozome v7.0 (chr-ID AC233571; pos 13 389 to 14217)
ggtatgtatgtattcaacatcatctatgcaattttctgctcaaattttattgtggttcatcaattttgtttaattttgttgcttaggattattttttctactcaccaactttatcatgttcctcttcttgttttgtttatgtgtatgctgtgatgagcatgcgtaattaagatcccttcaaacttcaccccctctccataaatgttagatctcaatttcatttttttccatggtaattatatttaatacacttctcattttgtcatccatcatcaaatcttatatttggattctatgcttgaatgagaaacataaggacacacaattacgatacaaaattttagtagttgagagaagatcagacaatttatatttttatttcatcggatctagtttaaaatataactttaaatgagttgtcttttcatcatcaaacgatcgagatctgagattatttgtttgtgttgacattaaatttaatttcattcttgcttgatctgacttaattatcgatattttttttcaaacttaaagacataacatcataaccctcatatgtgggtacctacccaaacacaccctgaaattgacggagaaatccttttttgattaggttcgagttgagttttttttcctcccaaaattcaaagtcagtgtaaggcaagcatgggtgttgatacctgctccagacccgtcccactagtgtacacacacttattcacattttttttaaatggggaaggggaattttttattaaccaaagtaacgttttataaccacgagccacatgcagggaaacttgcacgtgtggttctggccggggacccc

SEQ ID NO: 27774 - DNA, 145 bp, Medicago truncatula
  Intron number 1 from transcript AC233685_33.1 (locus AC233 685_33) derived from phytozome v7.0 (chr-ID AC233685; pos 139685 to 139829 reverse strand)
tttgcaggtttgagccttgggaattaccatgtatgtaaaaaaacaaacctcgtctttattttctttgcaaacctagtaattattttcttataattttctttttgatataatccttctttgtcagctcgttcgataataaaatcac

SEQ ID NO: 27775 - DNA, 1022 bp, Medicago truncatula
  Intron number 1 from transcript AC234703_16.1 (locus AC234 703_16) derived from phytozome v7.0 (chr-ID AC234703; pos 99461 to 100482)
acagttgaatttgagatcaccaagtttcgaatgtgtgtaattcacttctccctctttgttttgaaaaatacaatttttgattttatgtgcattgtgttagagtttaatttattgattttttatgctataatcatacgttccataatttattgagttttctccacaatgaatattattaagaaccgaacgtgaaatcgcaagagaacaattatgaattatatatatatatatatatatatatatatatatatatatatatatatatattttaaataattatgatatatttatgttttcaaaattaaagtagtgtgtgcacgcgcatgcgtgtctgtgtctatatggatggatgcatgtgtgcgtgtattgccctcacaactcaagacttatgggtccgtccctcgatccagtatacatgaaaacagaaatgtaatatgtctattaagcttaaagaatcttttttatttatgtgaaaggcttaaagaatcattgtctactattaaacttaaaaaattgaaaattgaaaatgaataagatgaagatatttgttgttcatatgaggcgtaaggtgaaaatcagttgtagatgacggtcaatccaagaagatgaaaaggtaaaacaggtttatatgaaatgatagactagagagaggcacatgtgagtctttgaaccatttgtttttgatccaagggttgagaagtattctcaccattctcatatatataactaatccattctcactgatatgtcctcatatatatatatatatatatatatgccacaatatcactttctatgtttaaaaagatagttaaccttaattaacaatgacattgctattttgctgtattttttctaaagaactggtgcatataattacgaggaaaacttcacataatttttgggttagtcttgattaccatgcatacttaaagctgaatgatgaaagatatcaactatgaattaactactctgctgattgcttcttatgttgttgaatttgtaggaacaaacactatccc

SEQ ID NO: 27776 - DNA, 457 bp, Medicago truncatula
  Intron number 1 from transcript AC235567_48.1 (locus AC235 567_48) derived from phytozome v7.0 (chr-ID AC235567; pos 166803 to 167259 reverse strand)
cctaaaggaattaggtgggacatgctttcgtaattcaaagcttttaatttagctatggttgcgaagctaggctggaattttaatgccaaccggatgtgctagtgcctagtagcaagaatcttcaaagcaaggtatttccctcctgcttcttttttggatgctaaacttgtttacaatcctagattttcattttcctgacgtagcatttggaactctcgttaagtgagactttgctaagtttaactccttgattatagtcgagagaaattgtgtttatgcacctgatagcatagcagcatacccttcgagaagaacagtttggtaaaaaccagtggtgggatggcataagtgcaacattgatgttttgtttcatgcttccagcatgaggacatcatttagctgatgtattcgcaactctgatgacaattttgcgtaggtttaaagcaagtggaatcag

SEQ ID NO: 27777 - DNA, 851 bp, Medicago truncatula
  Intron number 1 from transcript AC235022_16.1 (locus AC235 022_16) derived from phytozome v7.0 (chr-ID AC235022; pos 100897 to 101747 reverse strand)
cgtttccagattcagattcagttgacttatatctggtagatctcaaataccaactttctgatttgttaacttttttcagaattttcttcatatgaattcttgaaactgtgtctaagtaattcttcatattttttattgagggaaaataattcttcaattttaactttcacgtttgtgttggtagagttaatctttgaaactagtaagatcaatcgcttgcatttatttctttttcaattttagtgtgaactctgggtgtttgtgatctatataatctgctactttacatggacttgatctattttactgttgggtttttcgttcttattgaactgggcctatccgacaaaacttaggcccaattatcatctgggttcatggtgaatcgtgtattaatgacgacttgaatttgaaatctcaaggctacatttgcgaatagtaaaccaaaatatacacatggatactataaataacggattttgggtattactaccactactattgtgtctctgggccttgttatttttctttgacaatcaaatatgcaagttcagtgccatatgtgcatggtttattcttatgttattatttagtattagtatacactgatgcgtaaatcacatgctttatttgaatctatagattggggatgttctgtattatttattcattatttatttccaaatgtgttatatgtttaattgtttatgctaatttaaatcctgtgtattttttttcttcatgtgaggatttatagcttgattcctcaattgattgtaactgtaaatgatcattacttaatattttttttatttttttctgggtaaagcaggagggcatatactgacagg

SEQ ID NO: 27778 - DNA, 302 bp, Medicago truncatula
  Intron number 3 from transcript AC202568_3.1 (locus AC2025 68_3) derived from phytozome v7.0 (chr-ID AC202568; pos 21 808 to 22109)
atttggatccatctatatatgtttgaggtaaactcttcaatgtaccttacaaatatataatccatacttgtttcattagtattgtttttattttgattcatcatttcatccaaccaagagaatgtatggtaaattggtaataatttgtgtttctttgtctttgataacaagtcgaaaaatctttgttctatcaccacgtagtttggtaatttcccttcttcataatgcttcttgaatgttaacccgtattcatgaaatttatctatgtatgtcagcttcccaagactcctaaaagtgattaa

SEQ ID NO: 27779 - DNA, 807 bp, Medicago truncatula
  Intron number 1 from transcript AC235488_15.1 (locus AC235 488_15) derived from phytozome v7.0 (chr-ID AC235488; pos 63534 to 64340 reverse strand)
gagaaattagaaggaagtgttctgttgttaattaattaaatgatggtttaattaacaattgtttatctcacttttctggttttttaatgtagtttcaatttctattcttttgtcgtcaattgtattgagttgtgatgttgtatgtcaataagttgcatgtgcactttgtgagattcttataagtgttcaaatttcaagtaataaataaagctcttgttttatgatgcaaatttccactattacctcattcatttagcaccactttgtgtgtatacttctgcaagtttcagcatgcatgaagtttttctgtatcagactaaactcttattacttgatctatgttttcggtttcctaactaacttccacctcttcacaagtccatggtttaaatccactaaaaaaaatctacgagtagggacgttacaaaaatatgttccatatttatatttaggacaaattaattattgatgtagatatatttatcaatgatggtttaaaaaatgtatgatgttgtttaaattttaaaaataggtgaaaaaaataattagaaatcgaattaagtaaaaatgaaacaaaaaacaacacaacttttacaaatgattaatcacattcaattgtaagtttgtttttgtgttaccataaaatcattatcaatcattaaaagaaaattgaaattatattcaatttgtattttctttgaatatagtttggaataagggttctctactgcttcaaggttgtggattcaagacatgcgatgccaaaatttgtttgatatcgtgttaagattccactgttttctattg

SEQ ID NO: 27780 - DNA, 841 bp, Medicago truncatula
  Intron number 1 from transcript AC233653_4.1 (locus AC2336 53_4) derived from phytozome v7.0 (chr-ID AC233653; pos 20 999 to 21839 reverse strand)
gatttgctcttgctacctctgctctcgttgtctctgtatgttgctttgtctctctattctttttcttcatgctaagttgatattatcaaacattaggtgttacatgaatactgcataatttattgtcattcattttatagttaattatacttttattgttgttgttgttgttgttattggattagttgtgatgaatggtctactggtttaaagtagttacaaatcattttgattaaggaggtcagttagagaataacaagttgcaatggaatatcatagacacccaaataatttaattttatcttgtgaaatagtaggttaaatatgtttctagtccctttaatatcatggtctttcaagtttagtttctacaaaagttttattcaattttagtcccctagagactaagaaatagcaaatataaagcaaaacaaggactaaacttgaaagatcgtcattttataaagactaaaatcatatttaaccatcacattacataaccaatacaagggttttatgatgttcattcccaagtaccaacctcagtctcacttaaccaaatataaacctaacttgaattcaccttggatcctttcatgtttcagcagtcacaggtcagctgttggatttcataggttgagatccatcagccgacctctgattgcaggggcagggaatgatccaatccacttgaatgggatactaattaaattgcaaagtgtttactagttagacttattgttcgattatatctgatttttattctacataacatgactaagaataagaatataaattaatttcagggagcaagtgcagaaggtgcaccaaagaggctgac

SEQ ID NO: 27781 - DNA, 931 bp, Medicago truncatula
  Intron number 1 from transcript AC233662_35.1 (locus AC233 662_35) derived from phytozome v7.0 (chr-ID AC233662; pos 172354 to 173284 reverse strand)
caaattcaaccaaccattctcctaacggcaaaaatgtaaacttttttttgtttatttatttttgtgataaattgttctttgatcatgtttatataccttggttttgttttgttattgattagttatgttgatcatgataaattattgtgtaattggatttttagagctgggtggttttgtgggtatctactaaattgggtttttagttcatagtgagttgaattttgattaaaaatttgatttttgaaagaaggggtaaggtggggtggatatttgattttgtttagtgctcactaactatgaaactatggctttgtttggataaacaacataattaagcgcttatagcataagctctatagcagtgacacttctgatagaagctggtgtacaacgtgtcagtgtctgacacaacacatgtgattatgctgaattatgtcattttcttaaattattatcagtttcaacatgttattgtacgtagcatgtacgatgtaagtgtctgcttcattaagttcttattcatttaagtcaaaccgtttttatgtaaactataagctgttttcataagatatccagcttatgaaagtaaggtgaaaacatcttttgaacatatcgtaagctgttttcgtaaggtatctcaaatggtttttgcaagagtttgtgctaatagataagttcaaataagtcgatctaaacagactctagggctgcgaagagtagaaaaaggatgcatttagtgtcatctgattctatacattatgctattatgtatgtttgatttgtgtggtaaagttttcggggttagagctacttgttttgtgcttaatatttttgagaggggatgttttttcatttcattgaaaatcctaatgatgatttgtttatatgttttaattgcgtaataactggaaatgctccgtccaggctg

SEQ ID NO: 27782 - DNA, 1020 bp, Medicago truncatula
  Intron number 1 from transcript AC233577_42.2 (locus AC233 577_42) derived from phytozome v7.0 (chr-ID AC233577; pos 193037 to 194056 reverse strand)
gtcaacagtaatctctctcttcatattccctttaattgtatgatgggttgttgtttaattaatttttgcgattttgatgaaatttctattgatttttcctttctgtgtattgcgagaataaggacagatttgagttatatattgacataagcactggtgagactgtctggaagaacttataaaaacagcttattcatatgctgttttcagcttacactaatactgtttaacttcatttatttttcgtaatggaaataacttataataagtgctgcaaattaagttgtttgtccaacctggggtgaagtgatcatgtagtaatgtttcttgttaattgagtactagcaattttttttattgtttgattcaagtagcctagtggtttaaatttcacccttaaggtgaataagtggggaatggatttgagccttggcccctgcatatttcaatgcattgtctctaccaactgagctatgctcacggacactgagtactggcattttattatttggcaatagtaaaaatggatatttggagtggagcaagaaatgttcagtttttgggtggtagttgctatgttatggtttaattttagactctatttctgatgtaactgtcaacttgatgagcagctgggtgttacaccttgcaaagctaagtttaagtacaagatattttgttgcatagtcggaagcaccgtaaagtgtgttgtagagatctagaatttgattcaactgttggatcagtgaactttgcattctactaacatatttctatcagtgtctttccttcgatacatcatacatgtctgtcctttatgttcgattgtaacattgcctttctattgttgaaaacttggaatgagtatttattttatgttctagttcttaaaaggtctcatgaacaaaaatatttgtactctgatcaagttataatttatatttgagtaccataacattttttttgaagtaactttgctttgtttcagcccattgtttgttacttggaagaaagtggtaa

SEQ ID NO: 27783 - DNA, 634 bp, Medicago truncatula
  Intron number 2 from transcript AC233662_10.1 (locus AC233 662_10) derived from phytozome v7.0 (chr-ID AC233662; pos 40355 to 40988)
cccaggagattttggttttgatcctcttggactttgtaagtttaattattacacaaatttttttgtcactgaatcggattgaaagcaatagtaaaataaaatctaccatgcagttgttccacttacatagtctgacttgtccgatcttgattagacgagttttattctgagacgagaaaacgggattcaaaatttaacctcagaatgtaagttgtctgatttggattagatggttcatgttgcgcaacactgtgtcaactttggccttttactaccgtagaaaatccaagttcgaatatttgatcaagtagtacacattactaacttcatccctaaatataaaatcctcttgagttttttcattgctcctttttataagattattttcaaaatagtaagatggaaacataaaccaattttctcttctaaagagtaaacttgtaaatcaataacaaacaactattaataagtttaatattactacgaactttcttaatttttcttgatttcgtcaacatggtcatgtatttagagacaacggtggtcttattatccttgctgggaatacaaacgaccataatattaatcaaagttttggttgtgattcaacagcctctgatccagagagtctgaa

SEQ ID NO: 27784 - DNA, 759 bp, Medicago truncatula
  Intron number 3 from transcript AC135504_1.1 (locus AC1355 04_1) derived from phytozome v7.0 (chr-ID AC135504; pos 29 22 to 3680)
gggactttgttgcatgctttctattccttacgtattgcttatgaatttacatgactaagtttttaattggatttttatgagatgttttgatgaggtcttcgtgtcaagactattttatcatgtttgaataaattccgctgcgaagtattaaatattatgttattgcattttgaaggataattagttaattattccatttatgattttaagaaaaaaagtgtgacattccgtttatgtgaattactctgattaattaaagggttaatagtgtttttcacccttgtaatatatgtcatttccggttttcgcccctataaaattttcagtttgatttgtaccctcgtaaaaattttattttccggaaaacaaccttaataggccattcaaaaaccaaaatttcttgaaaaaaaaaatctgaaaatggcctattaggggtgttttccggaaaataaaaattttacgagggtgcaaatcaaaccgagaattttataggggcgaaaaccggaaatgacatatattacaggggtgaaaaacactattaacccttaattaaatgaaatttttatgctgggaaaacggggtgttacacctttcggtgttactaatgcgcctggtgtgtttatggaatacatgaatagaattttccatgcttatctggataaatttgtggttgtgtttattgatgatattgtaatttattctaagagtgaagaagagcatgcagagcatctgaaaattgtgttgcaagtgttgaaagaa

SEQ ID NO: 27785 - DNA, 1027 bp, Medicago truncatula
  Intron number 3 from transcript AC229689_1.1 (locus AC2296 89_1) derived from phytozome v7.0 (chr-ID AC229689; pos 59 46 to 6972)
ggtatgttttcctttttggcattattttgtttaccttggaaactataggattttggtctcatgaagatgcatcatgcatgtgtaaatggtgttttatcgagcatgttaaatgcaaatcattagggaactacggcatcactcgagtctaactctagtagactattcttgtatactgaagtttggtgcttttagcattcctttcattatgtgctgatgtaactaattattctttgattgcatataaatatatagtagttaaatagttaattagtactccatctgtttctaattataagcaaaaaagggttaaagaaatttgatccaaattggaccaaatacatcaactttctttgacccatttttgcctataatttggaacggagggaatagttattctcccacacacacttgtgtgtttgactttgtaaactgggaaatgacgagcaacaaagagtaaggtgaaagaaaagcagaattgttgtggctaaataggcagtattgtgaagtggagtgaagtatacacaactagaatgattcaaatttttctgagtggtgtgtacctttgacatcaagaagcatactgctagtatatttttatggaatttaaaatgtttatgtaatatgtactcattgtactgttagattgtcttgcatattacactatggtatgttagggctgtcttcttttatgtcatctctgcatccacatctgaaatgtattttgattttcataaattaaattacatagatacctcttgcaaagatatggtggtcaaaagtcaatttgggctgtttctgtttgttgtttatccaggaaatgtttcctgtacttaagttgcggtcattgagctttttaagttaatacaccttgtcttttaccgcgttacatcattatgtatgtaggtttgtgcgtgtgccgtgtgtgtgtaagtttatgcggttttcaacagacaaactagttattgaaattgtgttttttcatgtttgtgcagaggatcaaggcttggacatctcccacaagaaccaa

SEQ ID NO: 27786 - DNA, 531 bp, Medicago truncatula
  Intron number 3 from transcript AC146630_4.2 (locus AC1466 30_4) derived from phytozome v7.0 (chr-ID AC146630; pos 13 202 to 13732 reverse strand)
aacttcgtttctggtgtcaatactggtataatcatcattcaccttcttcttcttcttcttcttcttcttctacatcttcattgaaaatacagttctgaaattgtctgtttgtgtgattgttttgatataattagtgcactaaacaaatttacatgataaaattgcactgaaattgttgtggatggtgacaaacatgattacagagaatgtttaaagtagaaagaaataggtaaagagctttactaatgatttagtataagtcttttgagtttgttccaagaaacggatctgctttttaaatggctatatcgaggtcaataacttaaaaagcggttcaatcattgaacagaaccatgtgcacctttatcagaagcatgtttggtagtagtatacataattatatgctatgataatgttgtctggcatgtgcaaatggagttaataatcatggtttgatttgatttatgtgtttgttcatcattaatttaatttgcaggatcattgtagcttttttcacagtactggaaaagt

SEQ ID NO: 27787 - DNA, 143 bp, Medicago truncatula
  Intron number 2 from transcript AC146630_4.2 (locus AC1466 30_4) derived from phytozome v7.0 (chr-ID AC146630; pos 13 793 to 13935 reverse strand)
tcttatgtaagtatataactactttttccatttcttcttgtttccattttcttattcttctctacataatgttgttgttaattaatgtataattataatctaacacttttgtttcattttgaatttcagattgcttctcggat

SEQ ID NO: 27788 - DNA, 871 bp, Medicago truncatula
  Intron number 1 from transcript AC202489_33.1 (locus AC202 489_33) derived from phytozome v7.0 (chr-ID AC202489; pos 140631 to 141501)
tgtaagttttttttagtcttttttttatttgcatacattctgaaactttaggtgatcattgatgatttttttgtttgttacccttttctttgaatttttggtctttggaattctatgtagtttaatattgtcctctgtttttggttgctctgtttttcctctgtttttttatatatgtgattgtgatccaaaaaatattttgatctgaatttgaagtgttacacttcaagcattatagaagaggacaaatcttttcctttcttctattattctgatgtgaagtttcatcaacaatgtctatagtaataattttaatgattgtataatgtaaaaaagttttacactcaaatgtgataaaatttggatgacaaatttgtttagattttacagttaaattttggccaaatgcattgtatggtatgtaagtttaacgtttctaccacgttgatcctttaatattatattctttttaaaccttcgattttcagagaaatagaacctccataatctagggttcgatcgaaaattaagtaaagtttaattattaattgttattctgaacgatttatcattcagcgtagctcaataacaattttagttcgatcaatggtatttttagactttataactttaaaaagaatataacctttcttgtgaataatactatgtccaggctggctttccaataaacatacaatcaatccacccatgtgagtttgctagctaactagtacaaatgtacaacacaaccaattgttattataaataaatataataaaatattataataataaatgtcaaattttgtttttgcatgacctaatgttgtttttcctttgtctatgatttataatcttcaggtgctacaata

SEQ ID NO: 27789 - DNA, 924 bp, Medicago truncatula
  Intron number 2 from transcript AC146568_4.1 (locus AC1465 68_4) derived from phytozome v7.0 (chr-ID AC146568; pos 27 064 to 27987 reverse strand)
tttcggcgttgtcccgtctcttaacggcgccagaggtaaaagccgaaaacacatttgtataattacacatgaatagaagataagcgggcaacaggctgggccactaggcttttttggagggcaaaaccaatcctcgtaaacacaacttcgtgtaaaaggagcatacaaaaaaggggtgtgaagtgaaaaacctgcatctttaaaaaaactgtttttgtgagtgagaaagtgagaacaatactatgggtctgcttggattgacatatttgagcttatgtattgatataaacttttgggagaacttgtgaaaacagcttattatgaggtagcttatttttataagcgtccaagatagcttatgaaacaacttatagctcttataccagaacaatttaaggcccatttggtttggtttattttttagtttatgcaaataattaagcttttatatattattcataagcttgtcaacgtaatttatgaaaaaatagcttatgaagatataattttcgttagtaagaacttatgaattaacataaaatcttatttatttgcataagctagttttcataagctcaaaaataagtcattccaaacgggccttcaatttagtgttatagaaatagcttagacataagtgcttttatgctataagttgcaaattaagttgtctatccaaataggacctgtatgtactttgtctaagtttagtgctttagttatttggttgagtagagaaggataaaattgtggacaatagtttaaataaagagtaaaattagaaggaaaaaaaaaaaaaaacgatataccaaaatatggtatcactttttttatgggtatggattatttattgttttggagttgatgatgatggggtgtgttgtttcaggaggtttctgaggctgctgctgaagctcttgtgaa

SEQ ID NO: 27790 - DNA, 545 bp, Medicago truncatula
  Intron number 3 from transcript AC233661_3.1 (locus AC2336 61_3) derived from phytozome v7.0 (chr-ID AC233661; pos 24 741 to 25285)
ttgcttatatttactaccaggtgtgttctatatcttgcccttacttttaggaagtgaccattttttaaggaattgacactaagactgcgtttggcttgcctcgttctttttttgtttttttgatacgggagtgtttggcctaacttattttgacattaaaagctattttaaaattaaagctaaaaataagatatttagagataaagttaaagttgtttgataattattgttaccttttagcttcaaagatacttttcgatagaatgatagaatttgagttaaataataaaaatagataaaattattatctcctacttgatttgaaaatcttctctcaattaccttttgagaagttccttatatctactttttataaatataagttgaactccttctttaattaagatctttttaaaaatcctaacttcttttaagaagaaaacaagtcaagcaaaaacgactctaagtaatcatggttgaaggaattaactaatctttcctattaatgtcatgcctaatagagcacatctcgagaagtgaagcgc

SEQ ID NO: 27791 - DNA, 1015 bp, Medicago truncatula
  Intron number 2 from transcript AC225518_38.1 (locus AC225 518_38) derived from phytozome v7.0 (chr-ID AC225518; pos 141737 to 142751 reverse strand)
cagctgtttggctgttttctgcggctgtcagctgggttagcagctactgtccaccgtttttctgctatttttttgggtgctttgctgcactagggggctggttgttgcacatgttgcgtttagggacaactcacatgtttggttgttggttttaatgaaacctacaacccatttttagttaagttttgatgaaaaatctaatgcctcttcatttcttttttagtctgctgaatatgtgcattttcttgacagaattatgctgtaacaacaataaacaaataaatatttggaggggtaatttgtggtttatcacctaagaaagtcagagttgaatatgatactaaatgtgcctctactgttatggttgttgaaggaaaatgagtttctcgaaaatgcaacataaaccgcaatgcaatgatagttttggttttcatgtggcgattgtaatacttgagtttcctaacaatgctcaatgatttctttctgctgctactgtctaggaccagaaagaacttttactcatatatatccaattgtaccgaacaacactgcagcattattttgtccatatgaaattgagtttttatgtatccaattgtactgaacaatggtgttttcttcataaaggtaaagaatacgtcataggacctgcatcagtatcttaatcaaaggtgtatgagctcaatagttttttagtcccctatagttgttaaattgataaatgatgttttcttaactttttatagtgaaaaaatatcatgtttgagatgaggagagcagttaatgtgccatttgtctcatttagtactcatggctctcaaaatgttatttatatttctcttaactagggatgaatgtcatgtgttctttggctgccaatatgccgatgaagtatgatgaatggctggtgcaaaagatgcagaatttgatcatgaggcgctgttttttttatttattttaagttttctttcctattatgcagggactgtgcaggatcggaaaacctttgcagtga

SEQ ID NO: 27792 - DNA, 674 bp, Medicago truncatula
  Intron number 1 from transcript AC225518_38.1 (locus AC225 518_38) derived from phytozome v7.0 (chr-ID AC225518; pos 142850 to 143523 reverse strand)
tcaagaatcaagatagtgtttcacagtttgccctgcagcccctgaaactagatagtggttacttaacaactgatccaataactgatattttttagcagaaactgtcatagagaagctggctattgagtatctgcatttgagtttattgaataaatgttatttttgaaagttcaaatctaatgtaatctaagaattgcaattgagtaatataaatttcacactttgtataatttattctcttcttcattccaaattcaattttttttttctttcaatccgatgttttgaaacattgttaccgttctgaaccatttctgttttattgtgatgcaggcggtgatagtttttacatcaattcttaactcgagcatctccaagctaaatatattgaaacttgccattctgatatgaacagattgtgggtttctcttctttttttgtttattcgaattatttacccccaaattttcattgatttttttaaaaaaatattttccccttattttgaagtggattgtcggtgaacattcaagtgatatctatgaatcacatattggatacaaccttttacttgctagattgacatgtagtttatttggcgcgggtcccgctgtcattttgggatcttttctggtggttgttgtgcaggtttttggtggtttcgggctgctatc

SEQ ID NO: 27793 - DNA, 906 bp, Medicago truncatula
  Intron number 1 from transcript AC146565_2.1 (locus AC1465 65_2) derived from phytozome v7.0 (chr-ID AC146565; pos 24 433 to 25338 reverse strand)
ccattaactagtagatataagttgaagcaagtggaccagctttcggtttatttgtgccataaactagtaaatacgttttttttgtcgtccataatcttagggggtgtgtccttggtgtttctttcataattgtacttggtttttctttcacagtattatttgataatcatgatttatatttagacaattggacaaactttcactaaatttatgccataaactactaaatacgtgttttttctgtcaaaatgttatgtggtttttcgttctgggtattacttaataatttatatttaagcaattgaacaaacctttgttaaatttatgtcataaactactaaatacgttttatttttcttccataatcttagtttgttttttcgtttttcttttttcaaaattttattttgtttttctttcacgttattatttaataatatatatttaagcaattaaacaaacctttgttatatttatgccataaactactaaatacgttttttttcttccataatcttagtttttttttttttttccttccataatcttagtttgtttttttcttttttttttctttcataatcttattttgtttttcgttagatggaaatcatagtttgttttctattttctctatttttttggtagtgttattttctctatttatttggcaatataaccaccgatccccatatgttttttttatggggtcattttgctgaacaaatgaatagctatatgagcacaaatggaaatacttttccaattgtagttgttatgcatctatgtcgacttaatgtttttggtggtaattatattatctttttaaaagtaattatttttaatttctttgtattgttaatgatatatatcacttaatacctttggtgtatcgttttaataggt

SEQ ID NO: 27794 - DNA, 582 bp, Medicago truncatula
  Intron number 3 from transcript AC146565_1.1 (locus AC1465 65_1) derived from phytozome v7.0 (chr-ID AC146565; pos 10 144 to 10725)
gagtttataccaactactggattcccaaagaagtgacgcttcctggagtttaatagatgtttttgatttgtaatatttaggcttatttgaattatgccccatagttgggtttctttttgcttaaattgtcgtttaagacttatgacttgttaatgcctcatagttgggttgcttttgcatatgtaatttctcagacttatgacttataacctatgacttatgtctatgtaatatttcagtttcaatttgtgtgttctgccttttttagtttattttgtacacatatgtttcaaggatcaatttgatatctgattaaacaattcagggacttatttgatggttttttatataacgtagggatctatttgatagatagataaataattcagggactaatttgatggcaatattattatagaaagattacatttctcaatcatcttcaacctcttttgattagttaaaccaacctttggcatagggcaagcatagaatgaccttcctgggttttttgaagtattggattttctaacaacacaaattgtaggacaccaacattcaagcactctcacaacaccatta

SEQ ID NO: 27795 - DNA, 627 bp, Medicago truncatula
  Intron number 1 from transcript AC225518_4.1 (locus AC2255 18_4) derived from phytozome v7.0 (chr-ID AC225518; pos 22 654 to 23280 reverse strand)
aacaacaaatctctgaagctgactgattctacaatgtaagccgcttaaaagttaaaattcctcatcaattttgaagaagatttaacaacaaccaagttaattggaacactgccttgacaatgcagtaaagcttgcaagaatacaagctatgtcataatttaaatccagctagttctgtggaagagtgaaaactcgaaacatgatggatcttttgattgttagattaaaattcaatcatgttgcaagattatatccatatgaagaagattggcaacagcttcgaagtatatttcatggttggttgaatttcaagcaataatagcaaccagttgtcacatccccaaggacaaaatacttgttatgtttggagattgtctgaaacaggtctgtttcacaagcctaatcctaagtgaaaacctccaagacagtgccatgtgatcattaatgagccatgtctccaactaaacccattgaacaactcattcaccatacaattggttttcgaagtctatatatacacatcattgggtttagaaacaacacataccattcctacttcaaagcatcataatttattatttctactacttctttgagatcattcagtcgtcaagaaacaaaacaaga

SEQ ID NO: 27796 - DNA, 1031 bp, Medicago truncatula
  Intron number 2 from transcript AC234842_12.1 (locus AC234 842_12) derived from phytozome v7.0 (chr-ID AC234842; pos 46973 to 48003 reverse strand)
ttcttgctcttgctgctgaaatttcctctgttctggtatgttccatatcttctttgttccatttccattttttctagttctagtttgcaaaaacaacaacactgtaataaaaaagcagtcaaagatgagttgagaatccttgccataaaaaaaagttatgttggaagaactattttcttctttgtttttaacatgaaagtgacataaaaaaaggaaaaaaaaaagtattaaagtgtcatactacaaacacaaaattatttgtcggtttttcctcacggaaaattatttgtacaatttaattgttattctttcgatctcataatgagtttcttagattttttattgtttattttcaaacacctaggaacaaacttcttaatccatttcataatgagatgttttaaaaaaaataaaaaattgttttaaaataataccactttacatttttgatataattttttttccaactttaccattaataaatacttcaatttttctctttctcactatttccaatgtaactttaagtttgtctttttcgcataaagttaggataatttagtaaaagtgttatgtctattgattattttattcaatttcttaatttgtgcgtcaaaaccttaaatgacactcgttgtaaaactgagtgagtatataaaagaaaatgaataaaattatactaaattatgttagtaagcattggtgcaaattttttcttacaaggttgacattttttttttcattaaatattttctttgtgaagaatttttaacatgtgtcttaagggcacatggacttaacatgacccttatcataaatgcaaataaaaaataatactaataatttataagcaatacataattagagggtataattaaaaaataataataatttaatttacaataagaattaaaaataacattcattttaggttagttgtttacaaatgtaaactttattttatctttcctttcttttactctttatttagctcaatcctcatttattctagtaacataatttgcaggcta

SEQ ID NO: 27797 - DNA, 731 bp, Medicago truncatula
  Intron number 1 from transcript AC233676_12.3 (locus AC233 676_12) derived from phytozome v7.0 (chr-ID AC233676; pos 46970 to 47700)
aagggtcaaaaaactcaggcatgtttctttgctcttttttttaattctttgagctataattttggtttggtttgtggaataattaaatagttgaacaagttactaaattttatgattttttttgaagttgttttatttagtgtgtataaaatttgtaactagttttgttgatttgagtttgaaatcctcacaacacagatgcttatatagatgtcaaaaaggtgaaatttaacatataaaattgaaaatttatccttgaatttttttcttcttgtccatattgaagcgtgtaatagtgtgccaaattgattattatagggtgtagtagagtatatgatttttttttttaatcctcgggtttctctgcaaaggagacctggaaaattggagtttggtccgaaggtaaataaagtatggtcaaggattgttccagccagattcgacattagctactcctgatcaattcggcgttaactgaagctcgttaagcacttgagctcaacggggggttgagtagcttgattggtttgagccaagggttaagtagtagggggagtcgggttcaaaccccggtgaatgagaaaaatgttaatctaacaactaattattaacattgcttgtttaaaagaaaaaaaatcttgagctcaatcacttgattaatttgattatgaacatgaagttattttagcttatgttaatgattcctttgtggctatgtgtaggtttttcaa

SEQ ID NO: 27798 - DNA, 456 bp, Medicago truncatula
  Intron number 1 from transcript AC233659_3.1 (locus AC2336 59_3) derived from phytozome v7.0 (chr-ID AC233659; pos 11 364 to 11819)
caggtactgcttttcgtcccaaggctttacagttttcagaaatgggttaagcaacttcattttatttattctttcccattagtattctgaaaatttacataaaatgtactctgtagaagatatttcaggaatcaagtaatattatctgtttcatgaaagtatcagtgcatgattgataggattatatgtgaacaatgattgtgttatttgatttatagactttattagagaaggagttagttaggcttagaactagttaggctagctggcacttgacagctgttgctagctttcaagtgacagacaagtgtcagtcatctataggttgacctgctactgctggtaactgtcagctttctatgtaaagttaattgtaacagaatttaatcaatcaaggaaaaacagaattttagaccaaagttagttttatgatttctctctgaatttacagactcc

SEQ ID NO: 27799 - DNA, 441 bp, Medicago truncatula
  Intron number 1 from transcript AC233100_76.1 (locus AC233 100_76) derived from phytozome v7.0 (chr-ID AC233100; pos 333847 to 334287 reverse strand)
gacactttttcgttcagaactagttaacaaggaccaaaatatttgtcgcaaaacccaaatctcttcaacatgtagtttaagaaacaccaactaacaaaatcattctttttctcaaagtcgaccttaaaaatccagcacccccttctttgatctattggttaagtaatttatgttttcctttttttttaatagtagatttatgtttttttttcctaaaactctaaaaattaaatgcaatctatctactatcaacatgcaagggctgaagatcaggctgccttttattattgaaaaaaagggatcaaatatccattgaagttaaatatttttatttgatagtacgagattaaaaatatatctaatactaatttttatagaatttaaaaaccgtttgatacttttgaaggttttcctagacttaaaaagttggagacattagac

SEQ ID NO: 27800 - DNA, 575 bp, Medicago truncatula
  Intron number 2 from transcript AC233676_12.1 (locus AC233 676_12) derived from phytozome v7.0 (chr-ID AC233676; pos 47796 to 48370)
atatcttctggtttcatacaggtttgttaatatcctttctctaaatttctgttttttgttgaaaaattgtgaagttaggacaacattcagttaatcaggatttcaaagtcattaaatttaagcgattaaaacagattcacttttagagggtcgttggactcgagcgtgagcagataggtattttaattttcagttcaatctgcttacggtatctatcaattatacaagtctttttaggatatgattcatatgaaattgcttttcagatccgaacataattttaggatgttttgctacatatcatgtctacatttgatctcacatttaataagtataatctgacatctttttccacttccttccattgtttgttcttactatttagaactctttcaaacacgatggacaagttggcattcatttttctgtgaatcagtatcctgtacaacacaatgtgaattttatgaatcgtcatcatgatgtgaagatgtttccaatttccaatcaagcaaattcactttctgcggtacatccgctcctaaaaaatcatcttgcaacttttggtcagaatataa

SEQ ID NO: 27801 - DNA, 202 bp, Medicago truncatula
  Intron number 4 from transcript AC233661_14.1 (locus AC233 661_14) derived from phytozome v7.0 (chr-ID AC233661; pos 79646 to 79847 reverse strand)
cttttaagagcattaaacaacagcttagggaaaaggtgcttattcataattttttcttgatattttggcttctctttaaattgttagatcattagttggtttcttcaagatgaccttagtaatgctgttctctcaaattttatttgatttggtttatattttgttaggttttggtttggaggcatctataaggtgaggcccc

SEQ ID NO: 27802 - DNA, 701 bp, Medicago truncatula
  Intron number 2 from transcript AC233669_18.1 (locus AC233 669_18) derived from phytozome v7.0 (chr-ID AC233669; pos 77689 to 78389 reverse strand)
gagtatgtccttttctctaatcttctctttatttatttaatgatcttaattaataaagttaagctatttaatttaattgccattttgagaatcaaatttctgtttttttttttttttaataatgcagtatgatagtgtgagtaaataatcatgatcatactatatatgtattacatttaaagagtgaagacccaatttggcccttcaaaattttctaacggaccaatttagttcctaaaattcaaattagtccctagcattttacatatcaagacaaattagtctatgttgtaatgagtaaggggaaatgtgaggggctactttgtgtttcatttttataggggactaaattggcctctaaaaaaattgtgaatgaccaaattgggtcttcactatacattaattgtataaatgatatagtaatttgtgaagattgaaaaaaaaaaaaaaaaaaaaacaagaagaaggatgaaacagcaattatatattaccacttaatttcatttcctaactatatgattggaatttatttattagagtaatttttttgtgacatgttgaagattgaagggtgtgtagtcagtagtatatagagtaagatggtgtagttgaatgtggataatgtgaaattgacttgatgttggtttggtatatgcagcatgatgtggatgctggggtgttgaagaaagttgttttggctg

SEQ ID NO: 27803 - DNA, 717 bp, Medicago truncatula
  Intron number 2 from transcript AC232874_18.1 (locus AC232 874_18) derived from phytozome v7.0 (chr-ID AC232874; pos 59620 to 60336)
gggtttcggaggtccgtttcagtcttcaatttcatttctaaattcttttagcccacaattcagaagtcattttttcatttcattctattctaaagttgtcactttagaccgtatgtttgtttatataactgattgtatattggtatttagtagaggatcgaaagttttagtttcattcgttgctttttctcggcagaggatggaaaatgggtggactagaagaactttcttagattattagagagttaatcaataagagcttataattggaacacatgatttagtattttaaaccatactcctgctttctagattccttatattcatccggctttgagtttttaatctgatatgaaaaagtctaatggcgtcacaaattactgtgaagtgattgcttggcaagcttctgttgatttgatcaatttttatttgttttattttctttttactgcagttgtcagatgatttgttatgtgttgttgttcttccctgtgttatttcctttctgagtatcaaaatcctagaaaataatgcaatgcactatatatctattgttcagtttttgttactgtattaactcgatgagtatttttgtttgtaaaaatgctctagtcaataccaagttagctcctccccacccccatccgtctctcgtcacttttcttattactttagagataacttgtctgatcttttatctttatctggtgcacaggt

SEQ ID NO: 27804 - DNA, 851 bp, Medicago truncatula
  Intron number 1 from transcript AC235092_11.1 (locus AC235 092_11) derived from phytozome v7.0 (chr-ID AC235092; pos 66933 to 67783 reverse strand)
gactcagatttgctactggtggtggtgaccacaaggtatcaattttttttcttctgaatttatttgaatttttggttttttgaagcattgtgattgtttaaatttttcttgacttaatgtatactttgtgattaaacattgatttgcagggtaatgtgagttaatgttttatataaactcttaaagttattgcttcttaatgagtttgttagttattaatctagatgcataatttaacttaagaaatcaagtttacatggtgtcttctggttaatcatttatcgtattgtgtattaagatgtataaaagagtcaaaaagattaaattatatggcaattgtgattgattggcagtgtaaaatatctttacactgacaatgtatatgaattatatacaaatacacaatgtggatactgccaacttagtgtatggtttgttgattctcttttgtttctttgatttcataaccttatgtgtttgtacctttgctaatggttttccaacgtgtatggcaaaactgacttcagatcttcagtttaggattttggatcatgattatttagttcaaattttacttttttgattttttcaaagaacttggatcagtgttgtcaaccttagatcattaaaaataatagtttgttcaaaattcaaattaaatgctatagcgccgtatagcgccaatatagtgtttagccgttatccggcaacaatttgtactaaatagtgtattgtggaacgatatccatttttttaaattccactatgctatagtgctgttatttgacaatactgacttggattagttcccacgtaatcacattctcatctctgtttttgcaggttcgcat

SEQ ID NO: 27805 - DNA, 595 bp, Medicago truncatula
  Intron number 1 from transcript AC233673_6.1 (locus AC2336 73_6) derived from phytozome v7.0 (chr-ID AC233673; pos 13 011 to 13605 reverse strand)
acctcaggaccctgtatactctggttggtatacacattctttctttaattaagtgtatataacaatctttctctaattttcttaaacaaagaaatgaagaattaccatatataaatggatccccaaagagataagaaagctaccccttaagagaaaattagggttaacacaccagttatagaataagccattccttctttgtccaagccaaaaactatttgatcaactatatattaaatttcttaccccccaaattttaaaaataaattttctagctgcccaaatcgccaaaatgatacagtttgtaaaattagttaatttttttttttgggaaagaagattgtaaaattaaccacctccaaacccttagaaataaaaaccaaacagttaggaaaattcacatctaataaacaaatttaattctgtttcctgaacaatgggtttcatttacatcactaataaccttaccttacctccatacaaattaaacttagttgggatcattcttaataacaattgccacgtaaaatctttaattgattatttaagctattttttctagggtttttgagtttgtggcactaattttcaggtg

SEQ ID NO: 27806 - DNA, 750 bp, Medicago truncatula
  Intron number 1 from transcript AC233660_43.1 (locus AC233 660_43) derived from phytozome v7.0 (chr-ID AC233660; pos 159396 to 160145)
gaaaccttttgcctgtgatcttccaaggtaattatatatttatttagacaaaaaacttgttataacctagacttttaatatactgtcctagttgttttcttctttacttcgacacccgttggattggtgtccgacacttatgtgatgcgtgtcccacatcttagacaaatatttggatttttttctctgcttccacgcagagtagattcaagagttaaagatgtatgagaaatattgattaacgaggggttatagacattaaagttgaatgcagcgcatttaaatttttcgatagtagatgaaaaataaaggccaaatactattgtatcttgttatagaactttatttaatgaaataaattgttcaagttagatgcatatgtatgtattttgattattagtttagatattttatgggtcttgttaaccgtaaatagaatttctgtcttggaaatataaactgtcattttttatcgagtaataattacattactttttaataaaaacttacttcttttggtacttaaccaatgccccgggggcactggttaacattctccatattttataaataaattaatatatagatagcggtggcgatgtcctatgttttttacattagcagtatcgacgtgtccggattagtatcgtgtcaggtgttagtgtcagagtctgtgcttcataaatcaaaatacatggacaaattttctattttcgttttacaagtgatgttggttaattaacaggtttg

SEQ ID NO: 27807 - DNA, 898 bp, Medicago truncatula
  Intron number 2 from transcript AC146630_1.1 (locus AC1466 30_1) derived from phytozome v7.0 (chr-ID AC146630; pos 12 0 to 1017 reverse strand)
atagtcctgcgaatttctaaggtactatattacgcacggctctatttggtttttgttttattttttttaggttcatatatctgcatatttgtaatgtatttactatgtgcttgtaatgtttgttacactttatttgttctcataattctcattatcatcactttttttttttttttttgtttaaacttttgtttcacttttctttctttatttatgaatattaactgggaaaatgttacctgaacatcctttattcctacactccattgtacacctcatgtattagggatattttggtaagttcatctcacaaccacattttatcttctatttgtgtggggtccaagttgccacgtgtcagaattttgtgtgggtgtaaatggtgtattgccacataggatagtacatgtatcattactctattaactgtggtcctgtatgcatttgagggtgtgcaaatacacatctagctttagtccatgatcatcaaaaaagaaatctaactttggtcaattaagttggttttaaagtttcattttagttctgcacatttctaatgttcgcctataggcattagatattttttttacaagatgagaatgtctgaatgacgcgttcaaatgttaatgtggccaagtttggttagagacgtgactacagaaattatgcttttaaaatttgcaaaaacggcacaacatggattcaattcagaaacacagggacaatgaaaacaactttgccgataggccaatacatctattcgatatatatattattctattgtaatttttcattgaggttatttgttatgcactgacatggtaaatcaaatttaaaatgcaaacttgaaaagcgagttgtctgatgttttcagaaattgttctacttagcagttagg

SEQ ID NO: 27808 - DNA, 890 bp, Medicago truncatula
  Intron number 2 from transcript AC235488_21.1 (locus AC235 488_21) derived from phytozome v7.0 (chr-ID AC235488; pos 86608 to 87497)
acaaattttgcacccgtcgtccacaggtgcgcgcgtgtgtgtgtgatggcaattagtaaatttgattgatttatattttctgggtcgccattagtagggtgaggtttttcaatatatatgctgtttcgcctatgttttcaattataaaggaaaataatggattttttgaagtccgccatgcaatagtgctctagcgccaccagagctatttggcaacattttgtattgaacagcgtataacgaaacaacaatggtttgtcctaattccaccatgatataacggtatatagatgctatttaacaacattgtgcttcgtcgatacgaaattgtgatattgcagcccaaattgtagtctcaaaccttcattcaaaacatgtgaaattttagcatttatgactgatgattaattagcaaaagacttttattagaataagaatatagatagatcaatataagttatattttggttagatgtggaggagttaatggaaggacatcgatcctataatgaacggagtaatggacaagacacatgaaaaaagcaaagaaagaaaaataagacatttgtagcacaataattgtataatgtaaatgaatttcgattgcagagattcgtcaactctgtgtgtgtagtttttcttgttggacacaaacttaatttatagcagatcttgtgcgtcgatcttatgcttcgttttattcaaacaaaatattttcatcaatcagacagtccttggtcaacagagttcacatttccttataaaatattagttgttttgaatgaaattagttgtttttgatatttgacaagattggatttattgagttccctttctcccccctctgtttggtagactcaaggtaaagacctcttggttgctttatcgga

SEQ ID NO: 27809 - DNA, 552 bp, Medicago truncatula
  Intron number 1 from transcript AC235487_38.1 (locus AC235 487_38) derived from phytozome v7.0 (chr-ID AC235487; pos 152834 to 153385)
aacccaccaaaatttaaggataaaaataataaagggtgagtaggataggattagaaatatatttaaattatcctttcctattggtgcaccaaacagcagattgaatcaagatatgatagttttatcatatcctgtcttcctatcatgtgcacgaaacgaacgcttaagatttggattgaagattgtccttcatctattattactcatattgtataattcaatatatgctttttaaaaaaggaattttttttaacacattaacaaaaacaagtctcgtgttaaaaaggtcggccctagttttctctctttaggttttctcttccattttcttaattgaggggtgattttgggtctattcttgacctgaaatcaccccctcttcgtctttttctctctatttcaatctaaataagggattttcacatagatctacgttttttctttgtgatttcatcatctaagtgtggtggtttgttgttcgtcgtcttgtgcggtgttgtttgattcatattgaaagatcgattattcaatcaaagatttgatcgtcaacgt

SEQ ID NO: 27810 - DNA, 805 bp, Medicago truncatula
  Intron number 2 from transcript AC202568_10.1 (locus AC202 568_10) derived from phytozome v7.0 (chr-ID AC202568; pos 54714 to 55518)
ttattttcttggacctgataaacaagtaataagaggtacagtacaatttactgtattttttattttattttattatttatagctagttttacataacagtcacaacacacatgattaaattagtcacattaagttgtaccaaaaaaaaaaaaaaattaagtcacattattcaatattataaaaccattttctcttaaaaaagcatttgagtgagtttgcctaaatttttatttgatgtttcatttgtgagagagaaacctttttaaaaatctgggtttgtctttcttctttttttatgtgttatagttggctatgtttgggtttataagatttgtttgtggttgatcgtataattatttgggtggctattgtttttatgtttggaacagtaggatttgttgtgtaaagatacaagttaaaatcttatacatttaaactctttttcatttgttgagataattacataaaaatcttaaaaattattaatgatagtgaggcttatttttcaatttaaactattaagtaattgacttggtagcattagcaagtaagtgttgttcattgtcggtgtgtgtggcttatgttttagagttaattttttttttggtcaggtagcctagtggctagaaattcacttttaaagtgaataagtggggtgtccggggttcgaaccccggcccctgcatataataatgcattgtccctgccaactgagctatgctcacggggactgttttagagttaattctataagttgaaaaactaaagctgattgtttttgcttgtttttgctttgaagtagaag

SEQ ID NO: 27811 - DNA, 873 bp, Medicago truncatula
  Intron number 1 from transcript AC233783_2.2 (locus AC2337 83_2) derived from phytozome v7.0 (chr-ID AC233783; pos 16 714 to 17586 reverse strand)
aagaagaagtctcagatatctggttcagctgcaaagtactttcattttcttttgctttactatttttcttttctttgttgttgtttgagagaaatgaaaattgtgtgttaaacttttaggctttgtttggatatagtataagcaattatcatataagtccttatgtagaagttatttcaataccaaagataaaagaaaataaatatgcttttatataagttacacgttatgttcacaagctattctggaaagcatatgtaaataagctccataagcggttatcaataagatgaaaatatcacatgaatctgttataagttgttttttttataaattcttccaaacagtcttacaaatgtctgtaaataagtttaaataagtcgatcaaaatgcgctcttagtagttttttgttattaatattatatcatgttttacttgtctaaatattttaccactatattgttgatttactgtccctagatttttctaatatttgtgtgtgctaataaagtgttgaaaagcaagaagaaaatgagatgattgagagcaagattagatgatttttttactttttatcttgttaattttgatcttatgttagcctatagtgttattgatcctcttgtttgtgtactagaatttgcttttcagcttattccataagctctcaaccataataacctacgaaaacaatttatagcttatataaaaatattttaactttgttaagcttttgttgtataaataaattatacatatgcacttctgctataagtggttaattaaactgtttatccaaataaattgaattcataatcaaatcctataatttaattttgtcttcatttctgatctagggaacaagttgtagg

SEQ ID NO: 27812 - DNA, 822 bp, Medicago truncatula; identical to SEQ ID NO: 27767
  Intron number 2 from transcript AC233658_11.1 (locus AC233 658_11) derived from phytozome v7.0 (chr-ID AC233658; pos 66696 to 67517)

SEQ ID NO: 27813 - DNA, 526 bp, Medicago truncatula
  Intron number 1 from transcript AC233685_43.1 (locus AC233 685_43) derived from phytozome v7.0 (chr-ID AC233685; pos 181909 to 182434 reverse strand)
ggttggcggtggaggaagagaagcccaccacataggttggtagagactccgacttaactatcttggggcattctaggtcactatgttcatcaaagtcatatttgactgtgaaaggaacaatggtgctctagtggataaaaatggttctccttattgagaccatcatcgtcattgtcgtaaaataatgtcaattgttaactcaatcaaatttaacatgctagttttgttaagtaaaatacaacctagttcgattcgatttgactctatgaatcctacataatctgagttaatttttaaattttaaataacctcactataaaatttcctttagacttttaaatgtattgggttgacacatgtttaaaggaagagactagtttatcaaaatatgacgaactaagattcaaatcccggatatgagacattgttttcttcttcttttcaaacaaacaatagggggatggtgataaagttcatgcaaaaactatttgaggtttgtaaatctattgaggtaaggggggaacag

SEQ ID NO: 27814 - DNA, 455 bp, Medicago truncatula
  Intron number 3 from transcript AC229699_1.1 (locus AC2296 99_1) derived from phytozome v7.0 (chr-ID AC229699; pos 28 43 to 3297)
ttcaggttctggtctagagtcgaccttctatcaaggtgttctactgaattttttttcttctagtattttgaattgcagttgtagaagttttagaatcccttacgttgtggccgtaaccgttgttgcaaaccacagttacaaaatataaagccaatgctatgaaacttgaaagaatgtgtttataggtgttgaaaactaaagtgtggaggacaagcccctattaagttaggaatggcctagacatagatgataaaaaattaaaccatataaaggtctatagtcattgaattgtactttatgaaatttctatgcattagttcagggctccaggcattaaaatctaacaccagtttattgcaattgtctttctattgtattatattcacggtgattaattatatcaatttgctatgctaatccacatcattgttaactctttgtgaaggttttcatca

SEQ ID NO: 27815 - DNA, 568 bp, Medicago truncatula
  Intron number 1 from transcript AC225517_27.1 (locus AC225 517_27) derived from phytozome v7.0 (chr-ID AC225517; pos 117297 to 117864)
aggtatggtgcctttggttttgaggtttttaactaaaagaacattttttgttatattctacttcatctaatacagatcaccttatgttttaaaaaaattagtctcccatctgaggtatataaacatgcattactcgaaatacttatttctttttatgaatatgtgctcaactcgacagcttgagttgggttttatcataaataaatcaatgtcattataaagaatgaaattaagtttttagtcttgaggtgattttttttcttcgagtaagaggtgatttgattggcagtgtaatatttactaatcttaatatccaagttttgttatgctcccaaatcagcgtgcctttactttttccgaagtcgtttgaattgtatatgtagttatattacaatataacaaatgatcataaataatacgacaattaaagattttcaacgcacttaaactttaaatattataatgactctctctttcattgagtctttggtcatttctttgcttccttcctttctaaattattactcttttttgtttcatctaggttgttcatactcaagcaaaagtt

SEQ ID NO: 27816 - DNA, 466 bp, Medicago truncatula
  Intron number 7 from transcript AC225519_17.2 (locus AC225 519_17) derived from phytozome v7.0 (chr-ID AC225519; pos 71367 to 71832 reverse strand)
ctcatattatttgtctagactagctggattttttggtatgaatgttgtatcttagatctctatgaatttgattaattataattgggttacttgataagaagattactcaattttccaatcttttcatcgtttttggcgactgatgtctcctgcatacttttggtggttgctgattatgtcagtcaattagcatcttccaatttacaaacacacacacacacacccatgtgcacacacagaatatacctgggggtggaaggggattggctgagattcttgattttttcatgattgtttactttctcttgcatggttggattatgtatatcaaaatcaaatacttccatggaatacttttgattatgatacaaattttcagcatttgcaaacgtctaataagataagcacaataacatccccgtctcctcttttttctttccttttggaaaacaaattgcaggagaat

SEQ ID NO: 27817 - DNA, 682 bp, Medicago truncatula
  Intron number 3 from transcript AC225519_17.2 (locus AC225 519_17) derived from phytozome v7.0 (chr-ID AC225519; pos 73574 to 74255 reverse strand)
ttaaattgattgtcctaaaggtaatttccatttaccgagcactttccatttaattttttgcattttgctattgttctatggaagagagagaataacaattggaataagaatgaataaactgttgtattagttgaaaaaaatgtaattggtgtctgaaagtaatcaaatgttctttgaccctcttttatagataaaacacacacatgtgtgtgcgcgcgctattagattaaaatgtgacatccctgagggactgatttacacctgccattaaaaccaattagtagtaacctaacaaatattgagggactcatttgttctctttttgcaaaaaatcatttcatctcagtatgaattctggctacattatgtatctgtatatgatatatgtatatgtacttttttctctctatctaaactttcagatggaaggcaattgcaaagtttgtatcattataaagcgttcataccgtaaaattagaccgatgtacattctatgttaagaaaagggtaattctgagcaaaataaaatagatatgtcatatgcatgtatgtttctcattagaaattctgaataaattatagactcaaaccaaagtgcacattttcacatcctttgcaacatgccttctcatctttgaagagaatatgtattttcttactttaggttacatttatcagggaa

SEQ ID NO: 27818 - DNA, 462 bp, Medicago truncatula
  Intron number 1 from transcript AC233660_2.1 (locus AC2336 60_2) derived from phytozome v7.0 (chr-ID AC233660; pos 13 389 to 13850)
gctaaatcgcaacaattcaacaacactttcgcgaggtactactttattcttcttctttctgtctcaatttcacactctaccttttcaattaatcttcaactaaactttttcaatttcttgttagtttttcaaatgctttcgatgtgtcatgcgcgtgcgtgcgtctttcagcttcgaacttctactttctcgttcgttgttaaactcttgcattaatcaattgattacttaattaattcaaccacacagaaaattacttgagttaagtaatgcctaattacgccgccaatcaaattattaatcaattcaaatgaacaagttaatgtgtcgatttagtcatgtttactgtttattgtacttctaactttacttttggttggaacttagggttatatttgagattctattgatcatgtgattgatttattcattctttcagaactattgggagaacaaaacaaa

SEQ ID NO: 27819 - DNA, 884 bp, Medicago truncatula
  Intron number 1 from transcript AC233109_11.1 (locus AC233 109_11) derived from phytozome v7.0 (chr-ID AC233109; pos 50628 to 51511)
aaggtgagaaagaggtaatgtaaaggacatgatttgcttgttgtaagggtcgtgtattgtttgttggacatcagtaattattttttattctttttttcctatatatcctatgttaagaactactcttgttaaatttattatttataactggccagaattatgtccctaactgttgaaattgacgagtctttcaatgatttttggacttttggtatcttgctttccacctgaacaaaaaaatggtaatgataatgataatggtcatggatttttaggaaaatgagttaagcaatttgatcagatggtgcacaatatttgatgtaattcctgaaaggtttaatgcatcagattgttgaattttaattaagcacacgaagacgaacaatgcagatcatgtagtttagaagttcttgacctttgtttttgtctggatttgtagatttgacgtttgaaataattgcacaataaatgagttaaaatcagaaaaatgttaatgttatagagggatggaaatgtaatataaatgtctgtatgtcatcctatgtcaagatataatcattggtcctgataggaaaagccttacctgattactctttttaaacccagacctacctggatttttaggctcatactttttatgcgagagtcccaggtttgttcaaatgaactaattaaagataacttgaattgatatatacgaggaaattccttgaattgatgcaacatgcttctattctgatgggaaatcattcatgtttcattgaaatttagaaattctctcatatttttttggcaccattgtaattggtctgcatctgtttttgacacctatttatgccaattcctttattttctatcatttcacatgcagtattttattgtgg

SEQ ID NO: 27820 - DNA, 855 bp, Medicago truncatula
  Intron number 2 from transcript AC146793_5.1 (locus AC1467 93_5) derived from phytozome v7.0 (chr-ID AC146793; pos 17 213 to 18067)
aggagcttgttggagctacagctgcctcagttacagtactcattttgtttcatgacatttatggcactcttgatgtctttcgtttatgtttcttcataaacatttgaagcaactcactgctttataactgttctgttttacaactctactcctgtttgtttagaagcaggtgactgtctccaaatctttttaataatttaagtgcactcttgacttacttttgattttgttattggatttgaaaaaatggaatttgggtgttttgtggtatttgagttttgattttaattttgtgaatgaaaccgtttatgattcttcgaaaacatttgaagcaactcattgctttataattgttctgttttacaactctactcctgtttgtttagaagcaggtgactgtgtccaaatctttttaataatttaagtgcactcttgacttttgattttgttattggatttgaaagaatggaatttgagtattttgtggtatttgagttttgtttttaatttagtgaatgaaatagtttatgtttcttcggaaacatttgaagcaactcactgcttaataattgctctgctttactattctacccgtgcttgtttagaagcaggtgaatgtctccaaatctatttaataatttaagtgcactgtttttcagatcacttgagtatattagtaatattgttgtaggtgctcaagatctagttatttggtttatttgtcacattgtgtctctttttacccatttaaagttcaagtgccaactcccatgtgatcccaaaatgtcattttcacaaaagttccttttagtggaaactgttggtcacaaaaggttttatgactaaagaaaagtt

SEQ ID NO: 27821 - DNA, 768 bp, Medicago truncatula
  Intron number 2 from transcript AC233682_38.1 (locus AC233 682_38) derived from phytozome v7.0 (chr-ID AC233682; pos 147515 to 148282)
cacctcagccaaacactataagagaggaaccaaaggtttgcttaaccttggctcgattttatgtttttatggactggcataatttgacttgtttgaaatgctaaatggctgcctattctgttagatatcttggcacaaatgtttctgttcataagaaattatttttttctgtttataaaattcataagatattgtagtttcattttttgttatttatcaagattttactttctttctgtcttggcaaccacatgctaaataagaatttaagtaaaagcattagtggtaagaaaaaaaaatatacaatattgctctttgttaacttatgtctttggttttggagcatattcttggatgaaaataggcatagaaacagttcaagcaaagcctcgagtcaaatgaaaccaggcctacttaatactggcatgtggggccggggattaggatttaacctgggtatagtgtcaccatattttgttcgggtatagtgtcaccatattttgttcgggtctgcctagaatgacatggtttgaatttatgaaccaaactgagtagaagatgggcagcagggccataagtaaatgaggtttgtttgaggggtttcactggatgaagatagtgagagagggctgggttaagtgctatggatcaacttttattagacatttatggtgtgttttgcccattttaagtgacggaaaagcatcacacgtgtgttttatccaatttaactgctgattttgtttcctctttacaattttgcagagc

SEQ ID NO: 27822 - DNA, 441 bp, Medicago truncatula
  Intron number 3 from transcript AC233577_48.1 (locus AC233 577_48) derived from phytozome v7.0 (chr-ID AC233577; pos 215220 to 215660 reverse strand)
caggttcgaggctgttcatcaacctacattatccggttgttgagaagtttaagacttagtaagtttgcattatgatttcacaatacagtgttagagtaaattattatttcacaatctgatttgattggtttttgaccatgtttcttgaattgttatcgtgaccttaacacttctcaagctcaagagtcaaagcatcagtcagaacttaagtcagagttcggcttcttctcaatatacttcgtattacgattttcccaatctgtctcaggttaggccaattgttgaatttataaacttagtcaaggtctgcttttttttatgcacaaacatgctttgaatttttttacgcacaaattaaaaatacatatttcattattctttatttcatgtgcataatttgtgttaggatacatattgcatcactatttgaaaagcaactaa

SEQ ID NO: 27823 - DNA, 728 bp, Medicago truncatula
  Intron number 3 from transcript AC233100_7.1 (locus AC2331 00_7) derived from phytozome v7.0 (chr-ID AC233100; pos 24 710 to 25437)
gaaagggtgctgtggaggttcttttaaaggttagtggtagatgctatgatcggtttcttctttcaaagttgaattatctaagcataccttcttaatcatagtcatttgaagttttttttaacattgtttaaagtttgaaataaatttgtatcttgctttttattttagtttcacttatttatttatcggttgtgtaactgtttatatttatgcattcatcattactaataaatgaaaaatcatacattatcttaccagacttgttatgataggcttcatattatttgtaagtaattgagtgtagttctctggtttattttgttttttgaagttcaggttttctgcacttaacttattcgtagccgcaagcccgcaacaattttaagtagagttggtgcactttaagagcctgaagttggatatttgggctctaaacaagatgatatctgaaatatttgaacacatttaataataaatgagtcttcctagtttttgagagaaatcatatgtcttttctattttgctacaggccattaatctcaataagaaccttatagtttttctaaccaaagaatattatgctgttatttatacaaaccactaactggggaatcgggattaagtattcatttctcgagggaagggaactgttaaacaagtttgtcatcgagaattcagaaagctcaattcaatctaaatcatgcagatttctgctgaaaagaagcctg

SEQ ID NO: 27824 - DNA, 526 bp, Medicago truncatula
  Intron number 2 from transcript AC146568_4.3 (locus AC1465 68_4) derived from phytozome v7.0 (chr-ID AC146568; pos 26 398 to 26923 reverse strand)
ctggtactgattccttgcttcaggtgtgcttttgttttttatatacatttgaaagtaatttggaccgttccttcaattcaattgggaaatacaaaatgagtgaagttttggaagttatcaaaataactgtttgctgtaattataattacatataatggtcatggtaacatttaaaaaaaaagggattggctcttttgaattgggtaatttgattaggagaatgaaataatatcaatatgaatggacaaatcagcggtttgtatttcaatgtatacttgatttgttttacatgtacgcgtaataccaatagttgatttgttcatcaacaatggatgtaatttactttatcctttgcactgaattgcttgttttagaggagctaagtataaaagttaacaaaactatggaattttatgaagttaaagaatgtagcagggcgatgttatttgctgtgttggaagaaaaaagaagtttgtttgtttttcccttactgtcaattaaccattatcttttggttgtcagattg

SEQ ID NO: 27825 - DNA, 1067 bp, Medicago truncatula
  Intron number 1 from transcript AC235009_40.1 (locus AC235 009_40) derived from phytozome v7.0 (chr-ID AC235009; pos 161834 to 162900 reverse strand)
gcctgcaggactcgttccatcacccaattccgcaggtaaagtttatactttatatgcttgtctaaagttttttgtttataaaaaaaaacttaggtgaagaatcaaaatatggtcactaagatcaaattcaaactaattatattagtagttcaattttttgtttattaaaatttgcatgtaatacgctcactagacagcgtctcataaagccaaggcctccccgtctagtttcatggcctatacaccggcaaaagttacattatttaaaaattaaagattagaaatcatatgttatattgcatatgttttgttctttattttattttatttttttatttatgtttttatatactttaaggaatggtgggtactgggtaggtaacttcaccaccaatcaatgaaaatgaacctttgttaatgggatcaatggtagtttgtagatgccacttgaaaatatatttatgtggctaatatttattggttggatgaattatccaccatttttacataggtataacttaggtctcactctatctttatttatttattttgtcaagttctctgttgaaatttattcgtgtttgaattatacgcctgtttttttagggtaaaatgacagaagttttgtttttgtatgtgttgaaaatcaaaaaggaaaatcacgaatagctatcattgttgctatacccattgtggttgcttctacaatagtcttcgctgtttgcttctattatcgaaggagaaaagcgagaacaagcaggtccaatattctcctccaagaaaactgtaaggcccaaatcctaaggaatctcttaagaaaaataaactcttatttagtccctcagaaatattgagaaataaaaagcatactttgacccttaaaaaaaggtatactttgtaattttttttttttttatttcatagggacgaactaggtttctatttttttctctctcaaactcttacgttaaacttgtaagtttatgatgtttccaaactaattaatttcacaactcatacatactggtcaagttggtcgtgaaagtaccactttagaggggttgcaa

SEQ ID NO: 27826 - DNA, 714 bp, Medicago truncatula
  Intron number 1 from transcript AC235488_9.1 (locus AC2354 88_9) derived from phytozome v7.0 (chr-ID AC235488; pos 31 846 to 32559 reverse strand)
ccaaacgtgccattggcgttgaggttaacaaacaagtaagattcatatctaatctcatttccgaattttagttctgtggttttctttgcaaatgttttgaatcactgtttagagttttagggtttatgattttctatgcggatctatgtgatttttttttacttttgtttgatgatgtttaattacattttggttcaataatgcttattttcgttcatttcattattttaccgttagtttggtattatttttgtattgttttattttcttgttatttgttttaatttgttacttgatttcgggttagatgagtatattgcattatattattttgatttcaaatgaattaagtaagtattttaattttgtaaatgtacatgtggaatttttactgtttcattttcagcaatttagtagttcactgtatattgttttttatgcaaatttgtgtaatctgtacctttgatgttgaagttagagaatccttttgttttgtttaattccatgttacctaggttttctttgttcatcctgtgtatgaagcattgatttggtcaatgtaattataagttgttatttagctggttcatttcatagtgtttgtgagtaagtttagtttatctagctattgctctgcttgtgattttagtatattgaaatatttctctttgtggttcaggtgaggaacaagattctcaggaagagaatccacgt

SEQ ID NO: 27827 - DNA, 261 bp, Medicago truncatula
  Intron number 1 from transcript AC231342_20.1 (locus AC231 342_20) derived from phytozome v7.0 (chr-ID AC231342; pos 97232 to 97492 reverse strand)
agcaaccattcatttcaatttcctatgtgagtctctcatcatatcttcttgcttatatgtgtatgtcattatgctctataatttatattagaggtgtaattataatcattttagtttcatatattttcattttagattttgttcttcaaagcaatacaatgtataatgaatttgattatttttaaacgggtttatatatagggtatgctattaaccattattatttttcttgatttttttttcttcctagattaacagctg

SEQ ID NO: 27828 - DNA, 389 bp, Medicago truncatula
  Intron number 1 from transcript AC233668_22.1 (locus AC233 668_22) derived from phytozome v7.0 (chr-ID AC233668; pos 88214 to 88602)
ttattgttcttaacttggaggttggaattgcttaacttttttcatattaatttcaattgttacataaatgattttaggatacaaagattgatatttttgattttatattagagaagatgttattgacaccgtataaacatacattttgattttttttcattaatactttctcttttcttgggtgacggtaatgataaaatgtactgttttagattgtattttatacggtgtctaacatatggtgtcaatttactgtgttcaaatattagctctgcaatctttattattgttgttgttattagtagtatgttcttatcattttataatatgttttagttcatcttttgtaatcagcatatcaaggcaatcatcactgctaaagaggttag

SEQ ID NO: 27829 - DNA, 1037 bp, Medicago truncatula
  Intron number 3 from transcript AC233668_22.1 (locus AC233 668_22) derived from phytozome v7.0 (chr-ID AC233668; pos 88836 to 89872)
aaggtatgcttgatcataattctaccttttttattgaagaaattttaataattatagccaatatacacttttgattctcttaatttgagctatgacctattagaaactccaactgttttcgtatataaaaaaaaggggccgttgtaaggagtcattcttttatggtcatatatgaccaaaagtgtagtgtttaggtatacatacataaattttgtcaaaaaaaaaaggtacatacataaattaaagagatatttttctaaaaagaaaaaagaaagatcttatattttagagttatgtatctctttatgtgtgtgcctaaacactacattcaagtgttgtgactaggcaagacttgctccattgtaagaatcaagggggaaggggcgatgtaaatgaatattcatggacacggataatatgatatttgtgtctgcctcattgaataaatatgatatatgtactttcatatccatacagatatcctattaagcaggcaatccacaaattttaaaatatctacaagtatatataagtatatacagttatccttgaggcgggcgtagggggctaaactatatggaaaaaagaaataatttgtataaactagtcaaataaaatatttcttctacaatatctttaacattacttcccttcaaaaaaatatatttatcactaatccctaaatttataattagcaagtgaaccataaatattagtttatcctaaaaatttagtttgactcaatccaatgaaaaaaaatataattagtgtctataattttttatttttttttgtataatactaattgatagagcctcattggtaagtgctataagatctcgtacattagaactgagggttatggacccaaatccattagtatggaacattttattttccaagtaaaaacccgagtgcgagccagactgaaaaattactttctttattgcggaataagaagccttcacattaatatgttgatgatctaaatatgaaatgtagagtcgcctttcgaattccgagcactagagatattg

SEQ ID NO: 27830 - DNA, 891 bp, Medicago truncatula
  Intron number 1 from transcript AC146568_1.1 (locus AC1465 68_1) derived from phytozome v7.0 (chr-ID AC146568; pos 13 17 to 2207)
aaattcatcattgttttgtttctcacacaataattaaggttgtctttttttctttttctctttctttcactcttcaaatctcagatccattgcttaaccccatttccatatcatctttaatagatctcatctttcactccatcatctaaattttcaacctttccaatttttttcaatgtttttctgaatttgcttaaattttattatttggtatttctgatccaaggttgagtttttatgcttcattttttaccttaacttgatttttatctaattggctttaatgggttttcattaattactcttaatttggttttttgtaaaattcccatttttatagtttaagctggtttcattcacatatttggttagtttagttcgtgtgttttgtttttttgcttgttttatatctcttttgtgtttttgtgtgaagtacatatatgaatgtttgtgtttttggtttagttttagttcagatgttttgtttttttgtttgttttatttaacttttgtgtttttgtgtgtagtacatatatgaatgtttgtgtttttattgtttgatcaataagagaaacatgttttgtatttatatgtagtttaagcttgttactgttatgtagatctgaagctactgtaacacttttcttttaatagtatgtattatatatacaaatagtatgtattaaatatggaaagtgattctgtgatctatagttggataagttgtttatgtacatcataagctgatttgatgaaagtatgtttgatttgacttgctggagatttttgtgctagatcttgatctgatgttatggatcataatgttcgagctttttagttttttataagtgacgtacttctaaataagattcggtattttttaggttctag

SEQ ID NO: 27831 - DNA, 820 bp, Medicago truncatula
  Intron number 3 from transcript AC233683_11.1 (locus AC233 683_11) derived from phytozome v7.0 (chr-ID AC233683; pos 78358 to 79177 reverse strand)
ctaaatccctatttagttcaactgcttttgttcttgtagcatttcttggaaacttggaaatcttatatcctttcattatttcagaagtgtcaatcctgctgaggatgcatccccttttacttgaggtgtgaggcatgcatctaagtcatatcatgacctttttggtcaaaatggcttttttgtttagttttggcaggaacgagggataggtgacctatagaaagttttaaactctggcatcatttcgcctacatgtttgagattggctgtaccagatagttgccttcttattggtagctgaaatgacacttaaaatccctacttattcgttctttatcctattgagtatggaataagaagcagtagagttgtcgatctggcttatctgcgggaaaatattgacagaagcataaaaaacaaaaaaaaaactttgaacaacgttgaaggacaaacttaggtggcttcacacatctttggtggttattcttttcaccatcagatcaagatgcattctcctttttgtcaccttcaaactgaaggaaacacatacaaacttagctgctcattacaagccaaactgataacagcatactttattcatattgtctctctccctcaataaattttgttgcattacttgcaagagtcatcaatattgtctatctctcttaaaatgacgtagtttttcggactgctgcctcaacatgcctttctcctcattttgatacatattgtaatatattccatgtgaatgacatcttttactcaatttgtttgtttaattgaatgtcagagaaacctcaagggaacactgttgaaa

SEQ ID NO: 27832 - DNA, 611 bp, Medicago truncatula
  Intron number 1 from transcript AC233683_11.1 (locus AC233 683_11) derived from phytozome v7.0 (chr-ID AC233683; pos 79407 to 80017 reverse strand)
tgctgacaatgtaattttattttttgcgttgtagattttttttttaagtttgtcgttttgtcttttgatttattaattatagcattatttaaactgtccaagttattcaattaacatgtaaggtttcatctattggaattttttcttatcagatactgcaaaattaacatctgttttgacacattacagtctaataaaataatttggatggatgatcacgatatggcaatttaatgtaatggataaactgagcgactcagatgaacaaattgaaaatatgaaggacaaaatttaatgcagagaaaagatatagggacaaacttaattaagatataattttatttttgtcatacatgttatttttgggcagtattgtatcaatttttttagtttctatcttttcccttttggtcataaaagcacgggaatagaaaataaaatggaggaagaaagggttaggcagtaaaacacaaatctgagttgttattaataccgtgtttttgcattttctagtaaattatggatctttagtcttcactgcattgggtttttattttgtcactagcttatttttctctattctttgattggtttctttagggggatcaata

SEQ ID NO: 27833 - DNA, 898 bp, Medicago truncatula
  Intron number 2 from transcript AC232874_10.1 (locus AC232 874_10) derived from phytozome v7.0 (chr-ID AC232874; pos 34336 to 35233 reverse strand)
tcctgtctcagcttgaaacatgtaattgctaactcttgtgtgcataaatatcaatgttttattccggtacatgtttaattgctgcactagaattgattgggttgtcttttttagtgtgtactttgatagagctattgataagcataatttcaaatagaattgatttcataaaaggactaaacttaaatacaatgcttatagtactgttgttacgttaatctcacaagactgctattttcttctcaagtgatagttttttagcactctttcaaatttgttgcttacagttttactatctttcagtaaaaaaacagcagtaacagggcttatagcacattacctaagttttatcttttgtgaaatttatgtggttagaatttagtttctaagggaagtcgtttatgtttggatcacttaactttgaaagcgagtttgatataaaagtagtgttaattttctaatccaacatagatgctacttttaatcacttctaagctaaaataaattttgtttgagagaaaccaaacatgtattttcactaacatcacagttgataggaagttaaaccaattctgatacaatccatcgataaaccaaacacacttatttaatgttaaaaggccgggtaattcttaagtcacacactactgtgagctattattttgcaacggtatttggaaatatgcaaaagttgtagctgtttcccagatgctttccaagaatgtaagttttacttatgtgaaaaacatagggaaggttttctgtttgttctttctgtttgtttggttgtaatgcctggtaatttgtaactggaccgtgcttctaaactctttgacgtgggccatttgtttttatattcttttttcagggatattcttcgacacctacggggagtact

SEQ ID NO: 27834 - DNA, 890 bp, Medicago truncatula; identical to SEQ ID NO: 27808
  Intron number 2 from transcript AC235488_14.1 (locus AC235 488_14) derived from phytozome v7.0 (chr-ID AC235488; pos 58687 to 59576)

SEQ ID NO: 27835 - DNA, 772 bp, Medicago truncatula
  Intron number 1 from transcript AC231360_1.1 (locus AC2313 60_1) derived from phytozome v7.0 (chr-ID AC231360; pos 16 487 to 17258)
tttgaaccaaggacccgtcagtctattggttggttcaaccatactggatcgaactacatcaaattgagacgtttgattaacttgtttaacttttcttaaaaaagaattaattttttttaagtgagcagagtggtaccataaagttttgttaagtgcatacccatcatcttattatttaatgacatgtcatatttttgtattaatttatttaatttaaaaattaaatcaaattttgtatgaattttacttacttaatatcagtttccaatcaaacttcaggtacttaaccattttttatacttatttatttatcagtatcaaatttaatatggttcaaccttaaaccataacttgaaggtatcaccggtttgatcttcgatccaatttgtaaaacactgagtcacattgtcatcattgtggacttttttaaggcatggttattgtcttgtaggggaatgaagatgggtagtacaattagttgaatattgagaagcaaaagccattaaagggaatgtgattttattatcttggagttttttttttgggaattttgcttgttggatgattgagctttttgcaatgaaccccacaaaatatttaataggtgaaagccaacttaacgaaaccatgtgtttgatattatgtatctctatttcattggataaaataattgaaactggtccaattcaatgaattattatatatatcaatgatctagcaaacaaccctatgaccagatctttggatcttgaccattcataaggtagattaa

SEQ ID NO: 27836 - DNA, 834 bp, Medicago truncatula
  Intron number 1 from transcript AC146721_18.1 (locus AC146 721_18) derived from phytozome v7.0 (chr-ID AC146721; pos 111120 to 111953 reverse strand)
gggatattgttggtattcttagaaggttagtatagtcttcttctggcattagttttgtggttaattggtgttttctgattgattaattgttcaattgttattatcataattttaagggtaattggtatttcctagttgattaatttttccatttttattatcatggtttaacctcagttagaaggtgataaaaggctgagtgcatgtttagattggcggtaagttagatgaaatcatggtgatatcgtcgtaattttgttgaagcttaaactgtagcttttgacaaaatcagggtgggacaccatgattttgccaaacttatcgtcaatccaaacatacactgaattgaagagaatgtgagcgttttgatgaactatagtaactcatcatatattacatgatttattttttcacacatctcgcatgtttgtttacatgcctacgattttcaatcttatatgttgctttaacttgaacttattaaatcagtgtgttttaaattagattttgcaatgttttagaaattgaaccggacatcaaactgacgagacctatgagtcatagttaatgtctttaaactattcaaatttcaagctgggatgaaatcgcagttgaatcacccaaataaccgaaccggaggcaatctcagttcatggtttaactggttgaactgtccatattttagcacgttcaatttttgaattacaatggttatgactatttaagtaaactcctgtcatggtgtctctgagttttcatttttcattaaccaatgaacattaatttaacttctttgcagcattgaaatctacaagcataacaaagaagaaagaa

SEQ ID NO: 27837 - DNA, 416 bp, Medicago truncatula
  Intron number 2 from transcript AC225479_22.2 (locus AC225 479_22) derived from phytozome v7.0 (chr-ID AC225479; pos 101346 to 101761 reverse strand)
aacaggctggtaaacaatataattttactaattctaaatattttatttcattctttctttctgcaattagtgttgtcgattgcggatcgcggtaaataccgtgttgttcaaattccgcttcgctacagtgttatctttgcattgctgctgtagcatctatcacagaaacccactttagttagtctggtggttggcttgggaccttggagtgtgtttctgccaaggtcttaggttcctctgccaatttcggtgggctagtttagcttcttcaaaaataaaaatcaaaggataatagcgatttgtttgtattccagtacactatagtgccgctataagcattatttgaaaatattagtggcaagaaaatggcatgttggtaatttatctaacgaattcttcttatttttgtttagcta

SEQ ID NO: 27838 - DNA, 709 bp, Medicago truncatula
  Intron number 1 from transcript AC233783_24.1 (locus AC233 783_24) derived from phytozome v7.0 (chr-ID AC233783; pos 107919 to 108627 reverse strand)
cagatcggcggtgcgccgtggaaaagtggaaagtggtggaatcgccaataatttcgatcagaattcgactcgttttcgccctagaatgctagaatctatcattaatttcgttttttgggacttgttgatgtttaattgaatcattaggttaggaaattaggtatttctctgaaattggggatatttctatcttctctgaaattgtaattcttcaatgattaaattccctctcatcctctcatcttttacttcttctttaaaaacaagttgatcactatgtaatttttcaatgaatcattctgttttgttttatgaaagtttttggatgatgtttaagacaatgagaatgatgattattgaaagttcttttattttttattaaaggttatttttcttagttgcttttacaattttttctattatgtgagatctttcgatccttattacgatcctgctatctacgctttttctataccccaacgatctttagtgggattccgattttgacaaccatgtcctctcacttataatatatcccgatttttttatactaagtaatttatgtatgtcagcaatcaaggctttccatatataatatatccttttgtaatctacttgtaagttgttacatttgcaattttaaggcttctctcagtaatatattatgattagaattcaaaaatattttatatacaggaaagtgataatt

SEQ ID NO: 27839 - DNA, 478 bp, Medicago truncatula
  Intron number 1 from transcript AC234703_20.1 (locus AC234 703_20) derived from phytozome v7.0 (chr-ID AC234703; pos 120423 to 120900)
tcaacttcaagaatcaatcacagatctaattcaatgtaatgcttccatttctttgcctaagattgagatttttgcatattaataatcaaattgcttagtttctttatttgcttgcatgatcttttactacttggttgctaaaatttaattagttcctttttgatcaagcaatagattattgatttaaagaatagaaacaatcttgaaacactgattaaactgttctatgattagcaagaaaacaaattttggtgttaagaaggatacccacatggattaacttgctaaagttttaatttttaattaaactgttgtatgaataacaagaaaagaaatttcgatgttatgaagatagcccacatggattaacttgctaaagtttttttttttttttaattacttgaagggttatgattgagaaattaatagttctttgatatcagaaaactgttcaagattgaagcattgcaggactatt

SEQ ID NO: 27840 - DNA, 626 bp, Medicago truncatula
  Intron number 1 from transcript AC148178_4.1 (locus AC1481 78_4) derived from phytozome v7.0 (chr-ID AC148178; pos 40 713 to 41338 reverse strand)
gtgagaagtagtgccaaggagctattaatattggcgtttgaaagactttctttattttctatttatgttgttatttgattggcttgcatgtcaagtaccttctattgtaattttactctcattgctctggtgggtagcgtcgaaggattcttttactatattacatatttgttaattgtcatattcaaacatgacattttaggtggtgtttctgcgtgtttgatggatatcactctttttatttcgaaaaattgaacatttctatttggacaaatggtatgtaatgtatgcatgctctgtcctaagcctatgtgctagtgttttgtgaaactttattaaaagtctattggaaatattgaaactatataattcataacaaacaaagacaatcatcttctcatgttttggcaaagcttagcggcttttatttatttataaaattctatcacttctgacataatttcttagatatattgcttagctattttaatttcttagcttataattaccttccataacttctgagcttataatttctgaaaattcagagcttatgcataattcctgaaattttttttcagttcttttcagtagcacaagaattcttagacatattgcttgggttt

SEQ ID NO: 27841 - DNA, 1034 bp, Medicago truncatula
  Intron number 1 from transcript AC151525_12.1 (locus AC151 525_12) derived from phytozome v7.0 (chr-ID AC151525; pos 55852 to 56885 reverse strand)
tcttcaacaacacaactatcctctctctttctctggtaaccctcaaaaccttattaatcttttcttgttttacgctgttgttgtgagtatttttaaagtaatgttatccagtaacccattgtttcattaaaatctgtaaccctgttttgaaattttgagtgaaatattaaaatgagattttactacttttttgagtgaaatgttgaaatttgatgacccagtaaccctgttttgttgttcttgaagtaataatttatcttttatctatgctgattgtgaagtttaggatttggaagtgtttgtgatttggaagtttaggatttagtttcctatgtataattttgtagtaattttaaaaatcttactgtgaaaatgaatttcagcagagtaactggtttgtatttttcttgttatagatttttttttttttttttactgtttatgtccaggggaattgatgacgtcttctaacattggcctagtactagagtgaacatgtgctgtgaaaaagctttcataatacgtgtgttcttatgctgattctttggtttctttgtgatgaaattctgtatttttcgcatttttgggtttctctaaaccattgccgacaaattgaaaaaggttaatttgttttgtttaggattagttgatctgtgatatggtttgattttgttgctatggtgaatgatttgaaatgtatttttcattgctatatgtatttataattttagtgtgtgaaaaaaaaagatactttaatcctttaattggttgttcaaaatttcatcagttgtaggatgcaactacaatgattgtggctgttgtttatgatttttgacaactgatttcttttttctgaatgtgttgtgtgagcattagtgtggtgagattgttcaaaggaaagtgatttccatgacgcttgttgggtgtgatggcttgttcaactgaattcactcggttattcactgttgcaggagcatttaatgtacttttcttgctcagttattgtctttgagattcttaccaacgagttttga

SEQ ID NO: 27842 - DNA, 449 bp, Medicago truncatula
  Intron number 3 from transcript AC147501_1.1 (locus AC1475 01_1) derived from phytozome v7.0 (chr-ID AC147501; pos 79 1 to 1239)
catcgaaaaaaggaaagaaaaggagaacaataacggttagctctattgtcttatcctttataacattataacattattatcacatctttggacacaagacctcaagcaaatgacagacaaaagttgcagtgcttgggtctctaaacaaatccttttttgatgtgttttccttgattgagtgcactacattctattttccacctaattatttaatggttttcaatggcaaatcttctaaagaaaaacagataacataatagtactagtcttttataaaaaaatgaaatgttaacaaaactttaaatatttcaatgtggcttagtatgctagtgttttagttggaaacccctgacttgtgttttggagtatttttctcttatgaaacattgcatgatatatttttattgttttttctttcatatttgacgtagctggaaacatcagctttc

SEQ ID NO: 27843 - DNA, 1046 bp, Medicago truncatula
  Intron number 1 from transcript AC235006_21.1 (locus AC235 006_21) derived from phytozome v7.0 (chr-ID AC235006; pos 87854 to 88899 reverse strand)
tccacccacaaatcctcgcctttcagctcgaccaggtttaaacttttgattatccctcatttacacttttttaattttacgaccatttctgacataataagacatcaatgtaatcataccatatattactgtcaacccatgattactatatctagcaaaagatatatcttctgtaagaacttgggagaacaagaattgaaatcaccaataatcttttcctgtccctctaatgaaaatataattagttcatcaatattttatcaattaggagagggtgttagcttttcgtgaaaaaagtttctgctagatgttatgtttctactttctgtggtgggcacaagagaaggggatatgtgattttgcttctgtgaacaaatcatgatcggtcaacttgaaaaatcatttgttgtatagtggcctttagcaacactacacattctacacacttcctagatagaaagatatatagaaaaacaaggagaagcagaaaacaagataccttcaatccatcataaagatgtttattaggagaagataggggaatcaggagatatcaatttttaatcaaatacattaataacaataagtactatggagttatatacacaaatcaattgggtaaaacaacatagaatatggcttttcaaatggaattaattagcacatctgaataagcatactatttaaggaaaataagctttacaatccaaagttctctctgactattttgattattattagctttcctgaacatacacaataagctaatccaaagaagatactaaaaacaaaattcttattttctcatttatatgacagggctcagggggtaaattttttatttatttttttatttttttaaaaaaaaagctgttttatttcttttcatcattcaagataaatagctaaaaatataaaatacttatcagtttaagaaatatttgttagttagcagcataatcatttttcttgatagaaactgaataacagaaggtactggtattgatgcaggaaaaggaaaacagaagacactaactatatttgag

SEQ ID NO: 27844 - DNA, 656 bp, Medicago truncatula
  Intron number 1 from transcript AC233659_30.1 (locus AC233 659_30) derived from phytozome v7.0 (chr-ID AC233659; pos 130725 to 131380 reverse strand)
cttctccaagctgatattcaacacgccaatactctgttagttcttcttcttcttcttcttcttcaaaattctattttcattttcccattttcctctctgttttggtaaagtttctatttttgttgccaaatcacaccttcaattttatttttatttttagtgcataataaatatcataatttttattttcaatttttgttttttatttttatttttctcattcaattcaaagctttttctgaagttttgttatgcctttaaagaagaatgctacagtcccaagttctaactagtgtccttttgttgaattataatcatttttaggaattctttaggatgtgtttggattgagggtttatgaggggaaatgatgggagagctcacttttatttttaaaattacgaacatagtaaaatatttttttaaaataaattaaatgtttctgaaatattatatgatgccattaattcaattttttaaaaattattttataatgttcctaatttaaaaaagaaaaataagttctcccttcttaaaccctccatctaaacacactcttagaactctgaagagtgtgtgtgtattcggcatactaatttagttattgcttcgtcgcactatttgtatgtgtagggcgtccgatttccctagggagt

SEQ ID NO: 27845 - DNA, 634 bp, Medicago truncatula; identical to SEQ ID NO: 27783
  Intron number 2 from transcript AC233657_17.1 (locus AC233 657_17) derived from phytozome v7.0 (chr-ID AC233657; pos 88362 to 88995 reverse strand)

SEQ ID NO: 27846 - DNA, 298 bp, Medicago truncatula
  Intron number 1 from transcript AC233683_6.1 (locus AC2336 83_6) derived from phytozome v7.0 (chr-ID AC233683; pos 39 535 to 39832 reverse strand)
tccgacttgtatgtatcggtaccgtacgcgtatcatattgtttgataattgagagagattggcactgctggaaaatcgacatggcttcagaagattcaagatttgttaggcaagtttcttttctggcatcttaagtttgaacttatttcttacaagttctttagaaattagaatattgaatttctatgccaatcaacattaattgcatgctttcaatagcaacaaaaaatttataaccataattataacactttacattttagatttgaaggtgatcatcttgaattagctaaactaa

SEQ ID NO: 27847 - DNA, 969 bp, Medicago truncatula
  Intron number 3 from transcript AC233660_44.1 (locus AC233 660_44) derived from phytozome v7.0 (chr-ID AC233660; pos 165220 to 166188)
cgttacaagctccttggtggtcttgccgtccgcaggtatatatgattactatgttaaatcattcattggattatgtttaatggctaacgagtcttgcaatgctatatatatgtatgttgctgcatagtaataatttgactttgctggttatttttctgcttatattgatattggtgcttaacatatatgctatcaaaatttatattcttattctagaggaaattttattttattacagaaatgtcaatgaatgtattgcctttgataaacaaaattaatgtttgctgtttttttcttcctgtttatatgccctttatttttcctattcgatatcgaatgcacattattatcgaacaattttttttctttttctgttttttatgaatttgtgtcatgtttgataatttggtaatgtttttctatcaatttggaagctggaagagtggttgattttatttcatttattaattgctttaaactagactagttttggatgttgtgctgagtcgaaactttatgttgtctgactactttcatgtttttagaaaggaaaatgctttggttagccatcacagcatagttactgcttcctctgaaacctttgtttcatggttaatgtatgctttatgtctaatattatattcctctgtaaattcccatattgtttggtgactgtaatatactccactatcagaaaattgtattatacgcaagatttattagttacataaacacataattttgtaatgaatctgctccaattgtttaatagttataaagatgatagtttcgttatcatcgtagctgtctatctataactacaatgtttcacattttccatgactagtgtttgtttatccaaggcatgctaatatttaaaactttccgatttatactttctcggatataattctgtctttgcagtgacatcattaaccgtgtcttgaactatttgtcgcagggcctgct

SEQ ID NO: 27848 - DNA, 275 bp, Medicago truncatula
  Intron number 1 from transcript AC229695_12.1 (locus AC229 695_12) derived from phytozome v7.0 (chr-ID AC229695; pos 50098 to 50372)
gaagttttataaacaggtgaattaaccacatcttcagttacttggtttctttagttctacaattttttattttttgaaaaactcaattacgcattttgcattctccaaagatttttgtttggcaatgttgttcatatttaaacatgtttgtggatttattaagttcaaaaaataaattctatttgcatattcttatcattcgattaactttgcttttttaaatatggtcaatacattgaatttttattcagcataacaggattgtgagtgctaca

SEQ ID NO: 27849 - DNA, 594 bp, Medicago truncatula
  Intron number 1 from transcript AC234703_7.1 (locus AC2347 03_7) derived from phytozome v7.0 (chr-ID AC234703; pos 45 097 to 45690)
ttcgactcctttcactcagagattaaaacaaacaggtaatgcgcgttttcactaagtttaccaaaatgtcttttcttctttattattaattgatttgagcttatctactagaccgtttgagagaatttgttaaatcagcttataatatgttcattatctattttcagcttattttcataagctcttcaagatagcttatgaaaacaacttataatttatacgaaaattgggccgttgtcctgtttagagataatcaattatagtacaagtgattggcaaattgaagcttatgtataaactacttctataacaaaatttaatataaagttaaattgttatagtgtaagctataatttgtttttgtaagctaccgtgaagagcttatggaaacaagttgaaaaaagcttatggacatgtcataagttgtttcagtaatctctctcaaacagttttacaagtgtttatgtcagtagataaacttaaataagtcgatccaaataggttcttcgttaatgaagggacggcttgatttatttgattcgtatattgaacttcatttggtatctaattgtgtgtgttttaaactagcagaaa

SEQ ID NO: 27850 - DNA, 619 bp, Medicago truncatula
  Intron number 3 from transcript AC225517_12.1 (locus AC225 517_12) derived from phytozome v7.0 (chr-ID AC225517; pos 62096 to 62714)
attattgggctcatttagcactttggagctggcaggtagtacagtccacaataatactcaataaaaaattaacatgaaataatgaatatatactactgaagaaatcatttataagaaataaataaaaaaattagtattttctatatctcaagctagctttggcttttttatttgtccataaaaatctcaactattataattagtattctatagggattacaaagcttattattactaattaaaataatattgataactgttttataactatcttcgatggactttgaacatcatcccttcgaattaaagtgttatactcttatcaatggactaattaatattttggtggtgttcggggttcgaacctcttacaatttgcagcttttgacttctacaattgattttagccttacatttattgcgaaatccgcttttacataaatactccaaacataaatcattttaaaatcaactcaattttaacgataatcaattttatagaaacaaatttctcaaaatcaattcttgtacagacgctcgacttgatagattaacgaattgcatatttggcgaagtttgtaataatctgatggagattaacgattgtatgtgcagaggt

SEQ ID NO: 27851 - DNA, 799 bp, Medicago truncatula
  Intron number 1 from transcript AC233842_1.1 (locus AC2338 42_1) derived from phytozome v7.0 (chr-ID AC233842; pos 12 98 to 2096 reverse strand)
acttttaaaataagatgtaaaattgaacttctaaacaacttttcggaactactgttcacaggcctgcactaagaacaagatctacaccaggaatcaatctaactataatattacccatggttactttgcaattcacacgtggaaggcacttcagaagttggaggatatatgtgttagcagaattgatttcaaatcatatcaaactaggaaactatgtctgttcatttggactttcagtattaacttcttaaaccacttttcacctataaacctgaatgaagaattaaatgcaattaatggttacattataaacagtaaacgattgaatgaatttttatttttttttagcaacgatggaatgaatatatcttatcttatcttaatcttaatattataaaaggaacaaagttctgcatatttgccctagctattccctttgagaattctaccattttgtgctgggaaaaatctaaggttttaatttttggacagaatttacttatttacccttcacattagtcaagtggtgccaccacaattggccaattagagacaatcccaagcatgcatcctcattttaggcgggaaatttgcatttttttcaatagttttaggggttttagattttaatttcattagatgtgaagtaattattcatttatgcatcctttttagtttattaaaagattaatgaacttttattttgttttattttattaaattaatagatagttgattgggttggattgaattgtgttgtgcagcatattcaatcattgtgacctcgctgaatttttcg

SEQ ID NO: 27852 - DNA, 757 bp, Medicago truncatula
  Intron number 1 from transcript AC233676_15.1 (locus AC233 676_15) derived from phytozome v7.0 (chr-ID AC233676; pos 67553 to 68309 reverse strand)
attctaaagctgccagttggcgcgacacgctccgggttagttaggacaaaatcatttgtttattgctataatgtttcttctatccatttttctattgtgtttaatgttatatctaaattttaaagtgtaaattgtttttttttttataaaatagtgttcctcttgtttaaaatattcataatcgttgctatttgaaattggagaataaacaaatacaacgactaaatcataatttatgaatgcgagtaaaattgcttaaatgttagtgagatatattgaaaatatgttacacttattagtagtatagattaaaaaaatagttggaatagtagtttccaattccatgttaatatcaaccaaaaaataagcaatcaatccaaacatacaacatgtaagaattagtttatgttagttaaatctgtttgttattgttgctttaattacatcttgaaagtttatcactctttcaagttcttaagctcaagatgcctttcttgattttctctatatgcattatgaagcctttgatcatgtgttactcactcacacactaaataggtgcttttgattgattgatttgtgagaatcatcaatttagtttctaaaattgctggtagaaacactttgtctaaaagttgaaatcctcagttggatcaatcaacaggactaatgtgctcgacaaattcatcattttgaacgacaaacggtaggagttgttttattagattaatatttgaatggaattttgcagataaag

SEQ ID NO: 27853 - DNA, 890 bp, Medicago truncatula; identical to SEQ ID NO: 27808
  Intron number 2 from transcript AC235488_30.1 (locus AC235 488_30) derived from phytozome v7.0 (chr-ID AC235488; pos 132539 to 133428)

SEQ ID NO: 27854 - DNA, 778 bp, Medicago truncatula
  Intron number 1 from transcript AC147501_23.2 (locus AC147 501_23) derived from phytozome v7.0 (chr-ID AC147501; pos 86342 to 87119 reverse strand)
ccggtttcacctgcattgtttacttctactgtccggttagttttctcttcttcacttccaatttctagatccgattttgcttttgtttcagcactttcgtcttcatgaatttgtttgcttaaaacctaatttcgatttttgtttcgtttttatcaatttcgaaaattttgctgcttaattcgattattcaatgatatgtcatagttgatagcgttgttgttaatttgctcttagatttcaattctgtatttgctgtgaaaattgagaatttgtttagttgttctaagttacgatgagagtttagagaaagagaatttgaattgttaattgttttttaggattgtgaaggaaaaaaaaagttgatgctaagtgaattttatttttttgatgtattttttgtactggttatgcatgtaaaattattgttgcttagtttttttttttttttgtgatgttgatgatgacgagtgaaaaagtttggtatttatttatagtaagatgaaaacgactatggtcttttttggtggctgtaagagtgtttatagaatgggacaaagaaattttaatttggtacgtaagctttggcattaagcaatgagaattatatactttttggtatgtagcataatatataagccagttagattattagtacttagtttttttgttgtatattgacatgtcatgcttctgactttttcctacaagaaaggttgacattgatgtcattagaaaggcatgtgaaaacaatgttggttatagtttcctaacatattta

SEQ ID NO: 27855 - DNA, 856 bp, Medicago truncatula
  Intron number 1 from transcript AC235567_12.1 (locus AC235 567_12) derived from phytozome v7.0 (chr-ID AC235567; pos 46883 to 47738)
acccgtttcccatttcctcattcttccttaaaaaggtacatttttttttcttttctttctttctttttgataagtaactgtatcactgcataggttagggtttaattctgctctcaatttttatttcaattgggtattccttggtaaagtgttttttagttgtgtcttttgatgaaatttttatctgggtgggtttggtttgtttgatagatgctaatactcttctgctctttttgattatgtggattgtttgttgtatgaaaaatataatcttttgttgaaatttgcatcatgattgcaggactatgtaatttggatgattcatgaatttagattaaatattgacttgggacatatatgaagtacatagacaccggcactaatttgagaaaatggcataattgactgcgtcgatgttgtttcagtgttggacaccggacacaccttcgatcagaagtgtcggtgctgtagagcttagggctgatttaaggaaataaaacttttctattttttttacaactgtatagtgtgtgctctataagactatatgcaatctatgaagcacatacacagacactagacacgacactgctacatagacaccggtaatagtttaagaaaatggaagtaatagaatgtaactacacgtctccatgtcatgactaacatgtgtcggacaacgaacactccttcaattattaaatcataagtgtcagtgcaacatagtaatgcaatttgttgttttatttatcaaattgaaatgcttgttgccttgactgtgtgattaatcatttcactgtgtttgtttgaataatctcaagtccggggacttctgatccacttttggtcctaaata

SEQ ID NO: 27856 - DNA, 334 bp, Medicago truncatula
  Intron number 1 from transcript AC137826_10.1 (locus AC137 826_10) derived from phytozome v7.0 (chr-ID AC137826; pos 34383 to 34716)
gcagtgtgggtaagtcattgtatcatcacattaattcattgttattcttttcgattagagaaactccaatagaattatatttcttaatatatgagtaaagtgagttgttattactatttaaatgttttatataaagtgcaccttcactattgttttattttacatttgagttgagtatccatgagtcaagtaaagcaaaggtaaatgttctattcatattcatttcaagaatatgtcatgttaagttttcccctcgcgtgcttgtacaatcaaggcacttatgaaagttggcccgcatcttattatgatgcaaatacaggtaaccagtatcaac

SEQ ID NO: 27857 - DNA, 468 bp, Medicago truncatula
  Intron number 1 from transcript AC146630_17.1 (locus AC146 630_17) derived from phytozome v7.0 (chr-ID AC146630; pos 120517 to 120984 reverse strand)
tttcttagagcacgcacacttatccgagataggatgtaagttactatttgtttgtttaacttgtcaataggtgtaatatttggagattgatattttcttgaaactaacaaatataaccatttaatcgttttaatttttttactcagattgtgattatatgtagtgtttatagttggtatttttgcgacttgcttgacgacattgagacacatttctttttctgctgctgtatagttattgcttatctttgaacttggcaagccattctatcaaagttattgatttggattactacagtacatatgtcatgaattaagtcgattagattaatctctgtctatgtgtgttccacatgctttggtttttttttacgaagatacgatataatatgtgcataagatatatcacgttattctttttcattcttgtcgattttacttgacagcaataacattttaccttccagct

SEQ ID NO: 27858 - DNA, 789 bp, Medicago truncatula
  Intron number 1 from transcript AC235567_39.1 (locus AC235 567_39) derived from phytozome v7.0 (chr-ID AC235567; pos 141285 to 142073 reverse strand)
tacaagcacctggatatctcaattcttttagggttgtcacataacaatgacttaaagggctgttggcttaaatctcatagtacaaattggtggtgtagaatctataattgatgtttgcttgattatcaatgctttagattattaggtaatcagtgattccagttatttatccgaggttgcaaggcttttcattgatacaagaaattttcgaaggagatttgtgatcagctgtaatgtgttttatcagtttcttttgtctatacaatttgaaccgtaagatttattaaaattaacggttgagatttgatgtaagtcttttaacttatacatgtgtcaacggatcctgtatatatatatacacacaccgaataagagagagtcatccgacgccactgcagattttgcggcggcgcgaacccagccaataatatgatttaaattttttctgtctccctcattcaaaaaaattagtattaaataaacatattatatcagtttactttttttttgggatgaattaggtatctctatatgcaattgtataaactaatccattgaattgaatataacacgtgacaaaatttagttttcaaaataacgaaggaagaaaagaatttcgtcattcttgatttgaagagggtgacgaggttgtctaaagcgtagtaattaaaaagaaaaggttagttaacaaatcttctcgttctactcaaaacgttaatggtgttccgttgtcagttggagcgactgcatcagttagtaataatgattagcaaaatttaacgatcttac

SEQ ID NO: 27859 - DNA, 996 bp, Medicago truncatula
  Intron number 1 from transcript AC235022_2.1 (locus AC2350 22_2) derived from phytozome v7.0 (chr-ID AC235022; pos 29 78 to 3973)
ctggtgtggggaaaaagaagtcgcttctggttaaggtattatttctttctgctataacatggtttctccccactatgcgcttatactctaattctgtaattgttaaattaatattcgttttgtggcaatgctgcttaatttggattggtataggatttttacttttatcacctgtttttcaataaattcaattaaagataacttttttctttagaggtgaatcttctgcacatttttatttgagtttaaggtctttttattgttcttctggagcaagattatctatatattctggatatctaagcaaaaggccattcatgtcgttaaccctggatctccaaaatgcatctcacgttttttgagactagtctaaagaacaaatttgttgtatattttgccatagcttgtataatactatgttattgacaccagttctgtagcataaagttctcttaaaagactgatatttgtccatctagcctatgctttttctggttcaccttcatctgacattattttaaactagtttaaagaacaaaacatgcgtgttttgccataacttttatagtacataattattttgccaagatttatgtgtacttcataagagaaactagtagaatgatttagaaattaataagttggaccgaaatatggcttatgatagaacattatggcgtaatttgatccatctaaccgaccccacttagtggttgttattgttgttattgataccagttctgtagcataaagttctttcaaaagactgatatttttcatattaaatttcttaagacaaggtctttatgaccaacctgttcttctgattcacttctcattttgcctctacatccatattttttaggacagtttctgttgctcttggtttatttataagcctcggtgtcctttggtttctggttccctttttctgtacttttgggaaatatgtcaaactgacacttggccctaacttttgatagggtgctgtcgaaa

SEQ ID NO: 27860 - DNA, 932 bp, Medicago truncatula
  Intron number 4 from transcript AC233661_12.2 (locus AC233 661_12) derived from phytozome v7.0 (chr-ID AC233661; pos 66492 to 67423 reverse strand)
gagagtaagaaaggagactcactatcaatcaacgagtatgcaaaactttccctataatatattttcattattctctagagacaaaaatagttgttttatttgctgatgatggtgatgtttgcatatttgtgcatttactttggcctgcctcttaacatatgatggaagttaatgaagaataattggtttttgactatcctaacagagataccctaaatttaaaaactaattactttttcagtcttgttcataacatggaaatgatttttctttcattatcttgactggaacagagacgagtcacgggactaatcatttgatacctttttatttttcatattacctctttcactgtgtcatcatgaacaaaaatagtagagttgatatgctctttactgtattgcatgaatacaaaccatgaaggctgaatgtgtattttaattacgtatcagcatgacaggatacgatacggctccttggatcattacttgtgattgtaaaaatagttataggtttctgcctacagcataatatattcgcactctgtatgtcatgatgtcaacaaaaccatccttgtaggatttacaacaaggactgtaaaaaaatggagtccaaggagtgtcgagtagtttctcagagtatcataaaaaaaactaaaaattaaggaaaaaaactgaagactttcgagacaggtatcaggaagttttttaggagtattggtggcaaatacgttatacttttcctaatttggagaatttacgcttcatagatagttgatctcgttgtcaactcaaaatcattattattctaaatattctaaataattaatattctaaaaaagatggaaattaagtttcttgcatccactttggctgatatatttgtaataaaaaaattatagcctgctttgatttgtttaacatgtcaggatc

SEQ ID NO: 27861 - DNA, 689 bp, Medicago truncatula
  Intron number 1 from transcript AC235006_29.1 (locus AC235 006_29) derived from phytozome v7.0 (chr-ID AC235006; pos 128443 to 129131 reverse strand)
gcctgcaggactcgttccatcacccaattccgcaggtaaagtttatactttatatgcttgtctaaagttttttgtttataaaaaaaaacttaggtgaagaatcaaaatatggtcactaagatcaaattcaaactaattatattagtagttcaattttttgtttattaaaatttgcatgtaatacgctcactagacagcgtctcataaagccaaggcctccccgtctagtttcatggcctatacaccggcaaaagttacattatttaaaaattaaagattagaaatcatatgttatattgcatatgttttgttctttattttattttatttttttatttatgtttttatatactttaaggaatggtgggtactgggtaggtaacttcaccaccaatcaatgaaaatgaacctttgttaatgggatcaatggtagtttgtagatgccacttgaaaatatatttatgtggctaatatttattggttggatgaattatccaccatttttacataggtataacttaggtctcactctatctttatttatttattttgtcaagttctctgttgaaatttattcgtgtttgaattatacgcctgtttttttagggtaaaatgacagaagttttgtttttgtatgtgttgaaaatcaaaaaggaaaatcacgaatagctatcattgttgctataccc

SEQ ID NO: 27862 - DNA, 238 bp, Medicago truncatula
  Intron number 1 from transcript AC233679_12.1 (locus AC233 679_12) derived from phytozome v7.0 (chr-ID AC233679; pos 61003 to 61240 reverse strand)
tttcatcctctttgttattgtcgtcgccttctctggttctgtttcaacagtctctctttttggatttaatgttttggaagagttgaggttttgattatgaatttttcttgtactaaaatctcaaggtgtcaatggctcattttttagaattgtaaaaaggattaggaggggttttgattatgaattttgggaaaattaatagcttcttgagtttgttccaggaagaacaagctaagct

SEQ ID NO: 27863 - DNA, 775 bp, Medicago truncatula
  Intron number 2 from transcript AC233655_6.1 (locus AC2336 55_6) derived from phytozome v7.0 (chr-ID AC233655; pos 63 055 to 63829)
tcgcacagggattcggaagcggcgtgttctttcaggttagtctttggttttagtgcatgttattgatttcaacaagacaaatacatggttagattacttgcttagtttcagattttgaggtcttttcgggcgcattaaggttcttcggctgctgttttcttaccagccagcagtagtatttcattgattttcctgttgtgctgcgcttttttttggtcacagaattctgttttggcctttggtgttgttgtgtataggtcatgggcagcatccttttggggtacagtgatggttaggtgttttgttgctgccttttaagcagttcagattggttcctttagtgtctagcagccgcttttgtcacctacgggatttttattgcggagttccgcctatatacggcgcccggttgtatttatttttgccagctagtttgttgtgcttcttgcacggactaagccttaataaggtttgctgtttaaaaaaaataaaggctcttgatgatgaatttgcaagatgtagttctaagatgaggcagcttgagtgttgtttcttataggatgaagcttccatttatggagcattgccagttttgcaaacccttttttccctaagataatcccagaaatattgaatggaaacttatttagaatctttttggcggttttatagtatattaatattcttcttggcttgctattcgtcgttggtgtgcttacaggtgaagagagcttgacaacccatagcaggggaggcggctaagaaagctctcgag

SEQ ID NO: 27864 - DNA, 1005 bp, Medicago truncatula
  Intron number 1 from transcript AC147501_30.1 (locus AC147 501_30) derived from phytozome v7.0 (chr-ID AC147501; pos 138677 to 139681)
tgtcttcttcttcttctcctcacggtaattctgaattgaatctgttaacctaatttattattattattcttgttgttgttgttgttacttatgattttgaccctgaaattaatcatgtttttgtatgtaaaaactgataacctttaccaattttattaaattttcagttatacttatgattttgttctaagtttctgtgcatcgctgtgttgaagtctgtcacagttataatggcaacaataaaattagattgattgtgtccttgaatgtttttttccctacatcatagctcagcaaaagtattaattaattgtttgtattctatatgaacaaaataaacaatgcataacaaacaatggtttgtgatggtgtgaggttgaattgaagaagccatgatgacatgagaccgagtcctgacgtggagaggagtggcggcgtgcgaagtaaaccctaggttgactttcaaaatagaaagtgactattttagaagaaaaagagtcaatgcatgataaacctagtctgaaagagcttgtaaaataatattaaaaataactatttgtcatcaaattaaattgcgtctggacgagtaactcgagggttaacccaattcctgtttcagttatgtccctgttgtatcccatattttttgtcaatgttcttcttttgattagggcagaccaaacccattgtgttcgggctatgacgggttgtaatacagggttgggtcacagaataataaaattgaaaaacttaatatgatagtctttttggcatttggattcacaatacatccaaggaaggacaagtgttagaaacttcctttcatgaatatgaacagatctttgactttccttttatacgcttagatctttctgcggaatggatttctgttttttatttttttatttctgaattgaatctgctaacctaatttattattattgattctttgttaccatgttgcttgcaggtaaagaagaaccaattccattgcaggaaggagga

SEQ ID NO: 27865 - DNA, 901 bp, Medicago truncatula
  Intron number 1 from transcript AC235567_65.1 (locus AC235 567_65) derived from phytozome v7.0 (chr-ID AC235567; pos 242090 to 242990)
accaagattgctgttaagaatcttttgaataacaagtatgtttatgttactcttaccttaatttatgttaatgtgttttttttgtgatctattgttgtttcattctgttgtttggtctatctcaatttgtgtagaaatatttggtaatctatctcaatttatgttgcgtagtttccaccgactttgtcgatgactaactatcggggaacttcacttgtcacttttaatgaagtatccactcccaactacgttttttccatctataaggcttgaatttgaaaagctgttgaaggaatctgagtctagttttgctcggacaaatgtaatgtttgtgtttggtaatagtttaatgattgtttagtgttttcttaatgtggttaccaaagagtaaaagattcatggtctctcttatatatgtagaaatttgatcttttgaattggagaaaggattgaggcacatttttttctttttgtattatttttatttgatttgggagaatcacaagtttatagctaagattcatggtctctcttctgttttactcttgctatggttttatactttttaaccattttgtgtgagactgtgagttatccttgtcttgtattgtttggagatgcatgttatgtaaagtgattcacttgtgtgaagaaaagaattgtttttctccttaagtccttgttttcttgcaactgaattaacaatgttgttacttttcaaggatttagtaatatcatacattgttttgattttcattattttattacttactgttactttactagtacctagttaatgaaagttgtttgttcttgtatttgtctttctctaacaagttgacattttgtgtttaactcattttcagaggccaagctgagagagaatttaaagttgaggtag

SEQ ID NO: 27866 - DNA, 548 bp, Medicago truncatula
  Intron number 1 from transcript AC149807_13.1 (locus AC149 807_13) derived from phytozome v7.0 (chr-ID AC149807; pos 102044 to 102591)
catctcaaagacaggttatgaatcagaattagcaacatcagattctttccaaatttttataaacacttcgtcaataaacccacacaactcaacccacccaccccgtatgtttttctcaccttcagtattgcatttaatcatttatgatgtcacgaatttaatcttataaatttgtcaaaagaaatttatcctatgatacttttaatgtacaaataaatattttgtcacctaatttgatgcataatttttaaagcttatttttttagcatacatcaatcttttcatatttttccattgtttatcatcaaaatctcaaataataagaaaatctattggaatttaataaggttgggtgatcaattaagtgagctaaagggtaaatacgacatattgacctttcttagccacatttaacaaatttgatttattaatggtttctttcagcacctaaagggtaaaaactattaacttgaaattaacaaagcgaatattttacttataaagtgttgaaataagtttcaagttgttacttggaaaggaggaaaaat

SEQ ID NO: 27867 - DNA, 850 bp, Medicago truncatula
  Intron number 3 from transcript AC149807_13.1 (locus AC149 807_13) derived from phytozome v7.0 (chr-ID AC149807; pos 102845 to 103694)
caggttagtctatttgaatacttttttagaagttattattgataaagtttttgtattttgagaaaataaattcagttaatcccgaatattaaagaaagcaatagtgttaatagagaataaaaggtaggtagagaattaacacaacaaggtagttgaaacaagatgcagaactcaatcttgatgatatcggggtaagtccatacggagctttgctctagctttaaacggggctcctgcaagtggacggtgggactgatctcttcgggttactcggtccttggaacatataccgagtttttaaaaaaatattcctatgattgatttagcaattcaagtataaattttaattttataacccttccatctatcctcttagaacaccaacacttccattgattagtttcattattttgttgccatcttcgtcattagaagtctgtttcgcttggaatcaacgtgaaaattatgtgtaatccaaagatattattattattattattattattattattattattattaaaaataaataaattagagtatgaactcatatgtgtagctattagcagtgaccacattaatgacttgatgatgaacatgaatgagtagatatattactttaattaacaataagtttttgactccttaaccacaattgatattatgtatatgttttaaactatagtgaatcatttaaatttgcaatatttttatttagttatcatatttgaatatataaataccttgtaaattatttaccgactgctaatataaattaacatgatttgattactcaccttcgtgatttgtgttaggagtttgtcacattagcaaccttaaacaactttca

SEQ ID NO: 27868 - DNA, 458 bp, Medicago truncatula
  Intron number 1 from transcript AC233656_21.1 (locus AC233 656_21) derived from phytozome v7.0 (chr-ID AC233656; pos 80726 to 81183)
acagattcagcttgttagtgaactcatagaccctggtttgtttcttccaaatattatactatttattttctctattcttctataattcagttcatatctctctttttcttcttttaattcatcaaaaagtagtgtcccacacaatcagacacttttttttagaaatcaaatatcttcgtaacataaagataatcgagcttaaatcttatgtgattcaaataaagaggtttaaagttcgaatttaaacttgaaatcttaattaagttagagaatactcggatctaggcgcttttagatttttggtttaattttacattgacaaaaaaaaaatgcaggggttttactttatcataaatttaactattgatatatctcgagttagtaactttaatttattgttaaatgagaatgatgattagtttttagaatttcacaatcaattggcattgaaggagtaa

SEQ ID NO: 27869 - DNA, 960 bp, Medicago truncatula
  Intron number 1 from transcript AC233660_15.1 (locus AC233 660_15) derived from phytozome v7.0 (chr-ID AC233660; pos 56211 to 57170)
gagtctaagaatctggtgtgtacttgtgaaaactgaaaataacaaagcgtttacttttattctatagcctaatctttttcctgattttgtaccacattagtgtttattaaactaaaaaatggatgcatgaatcacaaaactgagagcggagtttgtgggttggggaatgcccaagtgtttgacttgcttagtaattagaatctatgaaacattgacatgtatacactaattataatttgacaaaatgaaagtgattgcatgtaatcacaccacatgcttaaaaaataattagtgtattcccttgccacttgtttttctttcaatttatttggcatgattccattaaacagccctataatatactttgcaatcatgtcttacatggagtctaaaaatcttgtgcgcatgtgaaaactgaaaagaatgaagtgttgattttgtaccatattgctgtttattaaacttgaaaatgggtgcataaatctctgatgagatccgagtttgtggaatcatgtttattttgccaaatgctcagtagtttgactttcctagaacacttttgagagtgttatttatttattttttaaaattatttatctaataagtttggctttgagaacttaaagtcccaattatcttggtcattttccttaaatcacttttgggtggatgctaagtcaatttagtggtgtcatgtttttattaggaaaaataatttcaacatcatggaacatactaaggtcttaaaaaatcttttgggaatgctgcattcccaggtatgaaagataataaatctatctagcaaatgaatgttacattctacaggccacttgttgatttgctttatttatgtgatgcctccttcattccctcgctctgaacatgggaagtaggatttgatgtcaatgtgaaatattttacataggaaactttcagaacttgttgaagtcaagtctgtgt

SEQ ID NO: 27870 - DNA, 745 bp, Medicago truncatula
  Intron number 1 from transcript AC233677_5.1 (locus AC2336 77_5) derived from phytozome v7.0 (chr-ID AC233677; pos 29 222 to 29966 reverse strand)
ggattcattaagtggtaggatccactaaatgattttaatttttttttgtctaaatctctttaaatgaaatcatccatttattttaaaaaatggagaagatccgctacatgtttttgctgccaattaagtttcataattagataatagattgtcaatttttattggagattgtttttttattctagatatttagtaatggagagtgagttattaatttattatggaagaatttgtttgaaaaatgagtcattaagaaaaaatttgttttgattaagagtaagtttgttttaattggctgaatttgttttaatcaacagtttgttttagtttattttagagagaaataatatgtgaggttaaccaaagacacaaaaggatgtaagtttgacgacgtgtcaaatattgtattttttgcagttattaagttttatagtttgtaatttaaagagataaataatatggggctattaaccaaaagacacaaaaggatataattttgacgacgtatcaaataattaaaatgggtaagtttgtatttttggcagctattaagtttcataagggtatggttttgattttaaaatcccgaaagagggtatgattactttaacctaagagggtttggatagtaacatattagattcatccctagatttgagttcttacgcgttgcttgctcaaaagagtttttcatgcttgttgttgatcagggagctgttgacacttggattttgtactgtgttga

SEQ ID NO: 27871 - DNA, 805 bp, Medicago truncatula; identical to SEQ ID NO: 27810
  Intron number 2 from transcript AC225519_15.1 (locus AC225 519_15) derived from phytozome v7.0 (chr-ID AC225519; pos 62658 to 63462)

SEQ ID NO: 27872 - DNA, 719 bp, Medicago truncatula
  Intron number 2 from transcript AC233661_2.1 (locus AC2336 61_2) derived from phytozome v7.0 (chr-ID AC233661; pos 10 257 to 10975 reverse strand)
aggttagcacattaatctttattcatatgttatcttcacagtgtcaattccggttgactaatttcacttcaaaacaaaattatccatatactataaaatatagcgggggacaaatctaggttacactacttagactagtgacgtatctagaaccctgaatcagggtacgaaatacgaaaattttaacttatatatatatgggttatcggattttgatataataattttttttatgatttaattaatatgtgtcaataatataacagtattttacacatgcatttaataatatgttgtcacatcatttaatatggttgaaaatacatgatttgtcatattcattgattgacgtgaaaacatattattaaatgcaaatgtaaaataattttacaattagtgcatagaaattaaactcattttcttattactactaaatttacatttttgctacttttacccaataaaaaatatcacaaaataactagagagtaaaatgcttttagtttacatatttatttgcaattaatataaggtaaaagtcttgggacatgagtcatgttcttcgtttttggcttttatggaaataaaatacagatgtgattggaagaaagggttcataataactgttgcataataatcttatagatgaactaaaattattctcttggcaatgataattttcagattgagttccaactagaagtgcgtgtaggagcagc

SEQ ID NO: 27873 - DNA, 616 bp, Medicago truncatula
  Intron number 1 from transcript AC233661_2.1 (locus AC2336 61_2) derived from phytozome v7.0 (chr-ID AC233661; pos 11 109 to 11724 reverse strand)
aattattgccattcttaattggtttagcagtcctagtatgttttctttctttggaagaaagagttgtaagaattcatttacttcttttttctttgtcaacacacggatcgcgcaacactagggtttcgttttttaatttaatttgtatgccttgtcaatataaaacttttttatgcatacatccaatcaaatcttactattcagattttcgaatgttttgaaaactaacatagtaagtggcatcatggtgtgatttgattagatgtatgcatgaattttttttcattgttagtacactaaaaattattctcttgattttaatcaattacaaaattttcagaatgtttttattttaaagtttggtagaaatagtgaccacagaaattgaaaagaaattcaaagttaattttcaatatttatacagaaaataaaaaataaaaataaggtggcacttttgtaattaaaattgaacagagtgaaaagagaaaatgaaaacaataattaaaataagtagtttgattaaaccaggtgattttttttttgttagttataaactaggtgattttaatgggtattaactaactcttcttttttctttttctctttagtgggttac

SEQ ID NO: 27874 - DNA, 827 bp, Medicago truncatula
  Intron number 1 from transcript AC146630_9.1 (locus AC1466 30_9) derived from phytozome v7.0 (chr-ID AC146630; pos 54 586 to 55412 reverse strand)
caatcatactcatcgacaaacaagctcaaaaaaaggtataagggtcgcttgataacggcaaagggagcaagttatgaaaaaatacttaggcggtcaatggttcaacttttgctgagaacatatgttagaggtaggtgaaaagctaatttttgatctagagaagccacctaaaaatatgcacgttcaagtcgttcccaaataaagatttggtgttcatgatgtgcactttcaacagaccaccttaactctaatcctagacaagattatcttcactcaccgatgctactttttttcttgatttcatctgatgtaaatatgagtatcaatctttttttggtaactctataacaacaacactctttttttataattttggataatgtgtaatcataattctcacatcattggttcctttttggtttcaattgttttcatcctaaatattatgtcaattcctaatctcataaactgattatatgctctcttaatcagccggtacatattttatgatgaatcacaatgttccgtcgttttaacatctcttctttcgaagaatttttttatcgaatacgttattgaacccgtgttgaattatcttttcttcaacaaatactattgagacctctgcatgagatatcaatgtgcatacatattagattaaactcatttacaactattgatgggatcataagacttttcattctatcaagaggctttaccgggatacagcttcctcctcgaaatggaagatgtctttgttgaacatcttcacattttggccattatattttatttgtgttaattatttggtctttattgtgcagata

SEQ ID NO: 27875 - DNA, 251 bp, Medicago truncatula
  Intron number 1 from transcript AC233100_9.1 (locus AC2331 00_9) derived from phytozome v7.0 (chr-ID AC233100; pos 43 963 to 44213)
acctctcctccatctccgtcgttcctgctcctcacgttttttccaggttcacttcacttcaatcgtaaacaacaaattctacattcgaattttgaacttcggcatttccgatttagcctattctgtataacgctatgtcgaatcatgtgaaattattcaatatagaaactgttcattcttccctgaaattcaaagaatattactgaattttttgtggatttttgatgtggaaaaatctgataggaagacag

SEQ ID NO: 27876 - DNA, 798 bp, Medicago truncatula
  Intron number 2 from transcript AC233675_22.1 (locus AC233 675_22) derived from phytozome v7.0 (chr-ID AC233675; pos 105380 to 106177)
gtaattgcaagtttccatctgggtaagtgttttagaatttgacttttcttaattgattttgaaggtgttttggttgagtgaattgatctgtgattaggattactttagatggaaattgatctaagataatgaatgcatgtttagatccgtagtgagtttgggaaaatcatgggagatatcataattttgcatgtaaactaccttttggagcttcaacaaaaccaccatgctacagtgattttgtcaatccgacggtgattccaaacatggacttagtatgtgtgtttcgttctaaggtgacaagaaaggattttgagcaaattgatcataaaaaattgatttggactaaaagtgtgttgaagtaaagtgatggtgatttattcataatgtaatatccacattacacactgctagataaagtacgaataatacaaaaaattgtgaaaatatctgtattaacatatatgaaactaaattttatttgattgcaaaagctacaaaatagtgtcttttattggacaacataacatggttatgatgcaaagttttctttcaaatgaaaatatttgtattaacatatatgaaactaaattttatttgattgcaaaagctacaaaatattgtgtctattattggacaacaaaacatggttatgatgcaatgttttctttcaaaatttgccaaacatgtgaattaagctgaaattttaatatattggaacttcaaggtttggatcatagtgcttggagattgttgattgtgaaggtttgaccggggtctcatttttgatgatgcagt

SEQ ID NO: 27877 - DNA, 755 bp, Medicago truncatula
  Intron number 1 from transcript AC233682_46.1 (locus AC233 682_46) derived from phytozome v7.0 (chr-ID AC233682; pos 167852 to 168606)
gaggagaaaaacgtgttgccaaacagacactataagtaagtttacgagacacctcaacttacactaaaatacctattcctatatgtgacttaattcttaattgagagttaatctttttcattaatataattttcaacatagtaatttgtccctaagcgcagttaatgtggacactttgaatttttgaaaaaattatctcttttagaattttaaatcgcaagttaaagctgaaagttggagtctccataacattgagaaatattggtcaatcgaaaaaaatacatagttaagatatataatgatgtcaggaagcatatcattattttttgtataatctcattgcaaacataatataagtacaagacaatttaatattaataaaaataaaatatcaatggttaaaaaatttgataaccttcaactctaaaagacccatatgtacccgtgcatcgcacgggtcggtgttctagtatgatttgaatagcaacaaagttgatgaaaataattgttacattgatttttgaaacaatctatttccactgtgataaaatccacaatgttcttcgatgtttaattacaccatgaagtatcctctaatgaatgctaatcccttaccgtcactcgttgcttttatagacttgtatcttttctctgtttccaaaaccacccggtgtgggactattctattaattgtttattttctctcctttttcataacaggtgtttcattcgacagtgtttaacctttggttcgc

SEQ ID NO: 27878 - DNA, 502 bp, Medicago truncatula
  Intron number 2 from transcript AC233657_5.1 (locus AC2336 57_5) derived from phytozome v7.0 (chr-ID AC233657; pos 22 765 to 23266)
acaaggtttgttttgttacaataaaggctttaaatgagtttatttgagtttttatttatttatttaaatgagtatgacaaaacatgagtttatccaggatttaataattttcctctctgattggctgttctgtaatttgatgtttattggattcattgtttgaaattttgaactttgaacccttttttcttttggtatcatatttgttagtggaacaactagtaatagcagattaaagaaaacacaaatcacaaacaatggaacatgatcttttatttacaaagactgtttttgagataaagtttttgttaaaatgttattttgttttatgacacgataccaagtcactctttttcagtttttgaatgtcaataggactgttgaagaaactagtttatgattgcttaatattgtttgttttgtcttggtaattatttgtacaaattgcttaatataaatgttgattatgatgatccaaaattttgtagaggacttttgtttt

SEQ ID NO: 27879 - DNA, 269 bp, Medicago truncatula
  Intron number 1 from transcript AC235567_49.1 (locus AC235 567_49) derived from phytozome v7.0 (chr-ID AC235567; pos 169510 to 169778 reverse strand)
tcccctttgcctccaacaactcctcctcaatccaggttccaaacttcttcttctcttctcatatttattagggttttttcatatgctttattagggttcttaatactcttcatgtcactgaattattttcatcatttcaacttcttatgccttttttgcttcaaaataggttaatgggtatctatgttctctctcatttctcactattttcgattttgtttttgcttcacttagttccaagagcaagatattttcacaaacggggattc

SEQ ID NO: 27880 - DNA, 844 bp, Medicago truncatula
  Intron number 1 from transcript AC159090_9.1 (locus AC1590 90_9) derived from phytozome v7.0 (chr-ID AC159090; pos 30 728 to 31571 reverse strand)
ccaacgttcctcatcactgctgagatcattcatatgttcgttagttttatcatgtttatgcctttaaacttttgaaaatatatcgttttctatgccattgaaatattgagtaaggttagttataaaaagttgtttgaaaaatagataacatgaaaaaacaaaacatgaaatacaaattccatgaaatatttgagtatgacgtatgttttatgcatgaaatacaaatttgtgagaatatgaattttttttaatagtattttcaaataaaccgatcaaccgaaccgatccaaaccgattcgtttgctttggttcctttttgaacatttttttgattgagagccgatccaaaccaaactgttacacccttaatgatattgtttaaattttaagttttttattgtaatatttctttataaggatttctatatattgccaaccgtaaacacgtgaatagatagctaaaccaaaacacatgaaaaccaaacatcgtccaacgtaaaaataaatatccaacggttgaaaagcattcgtgatattccaccaaagacaaattcgttgtattttttttttttttttgacaaattgtttttttttatttagctttttaccattttattttatctttaaatttaatttctttttttatttttctaaaaatgtcaaatattgttcaatcctatttatcacatgacatgaagtatgtgttagctctgcaattaaaaaaaaaaaaaaaggaaaaaagtggtcttatagtttattgtccctcgagaaataccaccttaataacattgtttcttatccattttcaggtacgattcccgaggagattggctatcttgataaa

SEQ ID NO: 27881 - DNA, 448 bp, Medicago truncatula
  Intron number 1 from transcript AC229695_14.1 (locus AC229 695_14) derived from phytozome v7.0 (chr-ID AC229695; pos 65782 to 66229 reverse strand)
agattcaggtatttttcttttttattttcattcataatagttttttttttattttatttaatttgattgtgtaatgtttcactgacaattatcttgttttatttagaaggaaaaaattaattaattgtgtattgtttcattgataattatatggttttgacttgtatcccttaactgcagtttggtttattcttcggtattgttttgttccaattttgaaggtttaggatttttcctattggtcatgttaatttgaaggtagctttggttgtcatttaggattgaagttagaacatgagaaactttgaaaatttcttgatgcttaatgtgatgctcaaactcggattgaagaacttttttttttagtgaggtgaaataatttgactaactttgaaaatctcttgaatggtgttgattttgcagaatttgcctccagttcctcccgtgg

SEQ ID NO: 27882 - DNA, 519 bp, Medicago truncatula
  Intron number 4 from transcript AC233678_5.1 (locus AC2336 78_5) derived from phytozome v7.0 (chr-ID AC233678; pos 23 413 to 23931 reverse strand)
ttggaaagcaccgtaggtcaattttattattaacatgatgttctactcattaatttatatgtacctgctcggaaaatatgtacatgtataaaaacttatgaataaggtagggcacattgtttgtcaattatttcaagttatggtatgcaaatatacaatactaggaaaaatgtttgtcataatctacctaattaaaaaaatgtatcattctttaacattaccatcccaaacaaattataagaagtaatatttacaaaattcagatgttgacagtttgagaaaatggttagcaattgaatgaagccactcttcctttgtttttgccatattataactcatgacgtaagggttccaaattttgagggaactatttggaatttcattggtacagttttaaagaatttagaatgttaaattgtgttttccttgttctacttctatatgttattcttatttcttattatttgaaagggatcttctcctttcataggtcgtgagtgtagctgcattttactgata

SEQ ID NO: 27883 - DNA, 660 bp, Medicago truncatula
  Intron number 1 from transcript AC233577_23.1 (locus AC233 577_23) derived from phytozome v7.0 (chr-ID AC233577; pos 107459 to 108118 reverse strand)
ctttggctggatttttgtgtacctgttttgttaatgtaagtcatgcttttccttggctatgttatatcgtgtatagtatagataatagaatataggaaaggtttttgtatgttaaattccctgtataatagcagtacaactttgtgaaccaggaatgtgttgaattttgaaattttgatgtagtataatagtgagaagctctagagatattaccaaattgttttgcctatgtaataaaaaagatcctcagatgtgtttgcttcatattgtttgaattggaggaaatgatgtgcttgatgtatgccttattgttgtaaccaaaaaaatgcagttttttatgccaaagatgataggatattaggatctataggaccaagaagaatttattgttttaatgttgattgtttctcttttctatctttcttggtttttctgttattgctaaccaataaagagaatccgtgcaaaaattcgtcaaaatctgtcttagttaatataatttatttgtgtttggtcattgagcagcaacgatatttaactgcaattcacgtatatgcattagatatataccaatgttgcaattgacatcaatcttgttattaatggtgcatttttttggatgcagagtttgtgctataataactttccaagatcagccag

SEQ ID NO: 27884 - DNA, 661 bp, Medicago truncatula
  Intron number 3 from transcript AC233685_20.1 (locus AC233 685_20) derived from phytozome v7.0 (chr-ID AC233685; pos 73236 to 73896)
cttgggtaaggtcttttcactgcttatggcataaattcccacataacatattctggttaagatatgctctttttgcttattgacagttttgaattttgacgactctgtttcttcggttctcttcttacttttgtttctgatcacttgacatagtatttatatttgtattcgaaaagagctttattcataaggactgtacatgtcagccataggacccgaattccctgtcgttaaagtactacacagtttcatgcagtaatcaatcttgggtattaatttgagatcggacagttcagattactctaccaataaatcatttttaaacaatcctgaccattgatttataccagacggtcgagatatgtaactgtgtcatatgacacagttactgcagggaatatgttttcgtcaatcctatgcttgtatgcaactactgatcaaatttgtttagatctctacaaatttccatcttgtgcacttgttttgggaggaaagtgagatggaaattagaattagggaggaatgcattgaaattatgaatttggcaaatatacgacaagtgcactttctgtttatgctttgagtcacttctattgctgatgcttttaattaaatattttctgcaggtgcttgttgtggcattccttgcagctgttccaat

SEQ ID NO: 27885 - DNA, 782 bp, Medicago truncatula
  Intron number 1 from transcript AC235488_25.1 (locus AC235 488_25) derived from phytozome v7.0 (chr-ID AC235488; pos 117445 to 118226)
ttcctgctcctgttcctagtgctaggtaccttcattttttctaattttattttgtttttttataacatgttattgatgcgaaatatccatcacccactctgagtgggctaccgactactaatcatgttttttcatccacacgactcaaactcgagatattacttaaagggatctaaatccagttccattcgaactaataaaatgttttggttttctaatttagttttgaaacatttcaaatgggtttgattaaaatgctaaaaattacattttttttacttaattttttgttaggtaagattgtattgtaggtggggtttgtttttgtgtgtttgagtatgagttagcattagggcttcacattatccttcaatgagattttttccgttggttgagagaaaagtgagctaaaaagttagtaattaaatggttgtattaaaagccaagttattaagatttgcctttatttgatgaagaaaagtttccataacggtaatgtagaatttgaaaagttcatctcaatattttctaatgcttttgttttgcgtttactttttcataaaatgcaagccgttctatgccactacttacaataataaataagtttctttgatttatgattgattatctttatttactgtttccttagaaccaactgtaataattaaaattttccaaaagctattaaatcatgtttttttactaatgcttatcatattctgatgtgatttgtgatcatgaataattgcagtgttagtgtgtttggtgtctcagcagaatca

SEQ ID NO: 27886 - DNA, 848 bp, Medicago truncatula
  Intron number 1 from transcript AC233100_5.1 (locus AC2331 00_5) derived from phytozome v7.0 (chr-ID AC233100; pos 19 717 to 20564)
gagtacgtttgattctttaaacaatatcctaatatcattttcccttgaaaaaatgctaatatcacttgttagcattttttaataataattattattataactagttttttcctaaaaaaataattattagtttttaatttgtcacaatcttgtcatgcttggctggttcggcacggcatttctacggtcagactcatacacttaggttgcgtctctagataaaattcttagtacatttttcattataccaaaaaaaaaaaaattatatgatttattctgcccctatttcatacgggaaagtagttatgcatctaagtgtaaataagaaatacgattgtattcaagtatctaatttcttatgttttcgaatttaaaacggtgacgacgttagaatcattaattgtatttgtatttgatcaaagttaatctttcaatcttctgcattatgaagggaaatcaaaaatacattgcacgaagacaggaaattaaacaaacagagtcgtgctaaaacaacaaaatcgcaaaaacaaacgaaagataattgaaaatatgtggaaatcaattatttaactaaaaagaaagaaaaataatttgaaagtattgtggaaatttgtgaaagaaggccaaatattatttgttgtctacaaatatgataatgcacaaatttatttttatcattaattaataagtttttccctttgagtcaaatgtgaatatgtgattagaagtgatttattgatccaatgataggtgcagtgcagtgtactaatgttccactaaaataattatttgcatttgtgaacaatttcttaggctgttgaaatcggaaaagagttatccaggaagca

SEQ ID NO: 27887 - DNA, 618 bp, Medicago truncatula
  Intron number 1 from transcript AC235567_59.1 (locus AC235 567_59) derived from phytozome v7.0 (chr-ID AC235567; pos 228068 to 228685)
gcgtttccttacttggaagctgttataggtgaatgtctctcttctatctacaatgcctgagttgcattgcattgttgtatcaatttttaattttgaaatttgtagttgttacttttttagggaaatgattttgttattcattttggatttctacatctttttgttggattttgagtttagggtttagaatgatgttttgttactttctattgtcagaatggaaaaagattacttagtttttagatgagtaatgatattcatacactaattttttccagcgacatctggcgaatcacattaaaaaatatggttaattcagttgagtagattagattataaattcaattcacggtcgaaattgtggttaattgaattcaactacatgtttaaccataattttgcaggtgcagggaaaattaaacatttttgtttttagatggtaggtggtcactttgattttgcttcctgaaatatatatcagttgagaataagaaaaattaaccattgattctatatggaaacacggatgataagaattaagaaataaaacttggggattaaaactcataattcattttatacttttattcatggaagtttagcagctcaatctaaaga

SEQ ID NO: 27888 - DNA, 255 bp, Medicago truncatula
  Intron number 2 from transcript AC235567_59.1 (locus AC235 567_59) derived from phytozome v7.0 (chr-ID AC235567; pos 228809 to 229063)
gcctcaacctaaagctgttttggtggccagttggctgactaattaatatgatcaaattttgtcaaccggaacatttgagggttctttttatcttttacaagatcatactgtgtcaattcatctaagtagtttatttgcagcaagtttgattgataaggaggactagctattagatgtgttgtctctggaaataaaatatagtatttacctgatctcctgttttcttcgaatccgttttcagggtttaagatatta

SEQ ID NO: 27889 - DNA, 571 bp, Medicago truncatula
  Intron number 2 from transcript AC159090_25.1 (locus AC159 090_25) derived from phytozome v7.0 (chr-ID AC159090; pos 120680 to 121250)
gttctcattctcaattacatttgtttttgaatcaggttcgtcaatctgtatatttatgctcttgtgcacacctctactttgtatgcatggtagtaacagtctgcggggcaagaaatgttacaagaattttaaagaaaattgtattagattaaagataatatggacacctatttggtcactcaaaaataaaagttccaattttgcactgaaaaatatcaaatatctatccaattattcttttataagatgattttcgggaatattgatttactcgtaatcaatagaaacagctcaaagagctttgtgaattctctagaatctatgaaccctagcttcaatttctaacattatgacattctcacttaaaattcttataatcttatctcaatagcgttattactgtagcatggaaaaaggtcttgctccatattgcaactgtctgtggcctatactgaatgctttagacgaaaatacttgtttcatagccttgtttgttttcttgatttttttttttttttgttatttacttcagtgttcttctacataaaggtggttggatttgatcttgtag

SEQ ID NO: 27890 - DNA, 645 bp, Medicago truncatula
  Intron number 2 from transcript AC233685_46.1 (locus AC233 685_46) derived from phytozome v7.0 (chr-ID AC233685; pos 194133 to 194777 reverse strand)
ggttctttctgagtagcttgaagattggcccgcaggttgcggtcatacgagatatgaatcgggagatgtaattcaaacgtcccaagaaacctctgacttgcttctctgtctgtggagctggcatttctcggatggcccggactttatcaggatcgacttcaatgcccttttggctgacaatgaagcctaataatttcccggatctgacgccgaatgtacatttgttgggattcaatcgaagcttgtattttctcaacctttcaaacatctttgttaaatattcaacatgctgctcctcatctgttgacttcacaatcatatcatccacatatatttcgacttctttgtgaatcatgtcatgaaacagagtagtcattcccctttggtaggtagcaccagcattgattaggccgaacggcatcactttgtagcagaaagtaccccatggagtgataaaagacgtcttttctctatcttcaggagacattttgatctgattgtaaccggagaaaccgtccatgaaggaaaacaccttagattgagcagtattatcaacaagcacatcaatatgaggtaatggaaagttgtcttttggactggctttgttcaggtccctgaagtcaacacacatccggactttaccat

SEQ ID NO: 27891 - DNA, 1045 bp, Medicago truncatula
  Intron number 1 from transcript AC235009_47.1 (locus AC235 009_47) derived from phytozome v7.0 (chr-ID AC235009; pos 194157 to 195201 reverse strand)
accaccaacaattcctcgtgcttcagctccaccaggtttaagcttttgaaaatccttcatatatattttcttaattttactaacatttgtgacacaataagacagcaatcaagttaatatcatacccatatattactgtcaacccatgactactatatctagcaagagttatttatcttttgtaatagcttggtacgttgtgaacgtgaattaaaatcattactaatcttttcctatcattctaaggatgttaggacatcaactagtaacaaaagatcaaagaaaacacaaataacaaacaatggaacacgattgtttgttttcgcagtttggccaattgcctgcctctgactatagagaagctataattccttatactacttgagcgaattagggtttacagtgttacaagcacatatataataattaactaccccttgtccctcttctatgtttatatagcagccatactcaacaaaggaaaatataagtagttcatcaatattttaagaactaggagagggtttagctttaaaaaagaaaagaaaaaatggcaagatgttatgtttcaatgggaggcccaagagaaggggatacatgattttggtcctgaaaaaaatcctgattagtcaagttggaaaagaatacgttgtcttatagccttcaacaacactaaacattataaccacttccttgatagaatggaatatagaaaaatgaagaaaaaagcataaaagaagatatttccagtcaatcaaagatgtttatttggagaagagaggggaatcaggaaatttccacccttaatcaaatacacaaatattcgtagtgcataatagtgacccctaatatcagttttcttcttattttcaacaatcaagagaaatagctcaaaagataaaattcttaccagtttatgaaatcttagttttttagctgcataatcatcagttttcttctcatttttcttaatgaaaattgacaatgacacaaggttgatatttatgcagggaaaggaaaacagaagacacttacaataattgtg

SEQ ID NO: 27892 - DNA, 559 bp, Medicago truncatula
  Intron number 2 from transcript AC202568_18.1 (locus AC202 568_18) derived from phytozome v7.0 (chr-ID AC202568; pos 85441 to 85999)
ttattacggataaaaagccaaaggaaactaaggatgtaagtatatatattttgtttatgatttgagtgtgattttggggtgaaggtcacttttaaacatgcatttttagatgatatattttgtaatgtaagatttttaacacgcctcttaacacttaaaacttaaaatttaatgtgattcgagcgacttaatatgggtgatccaactcattatattataatttgagttggtcataattcattctaacaaaatcgagttgtaagtttggaaatgtcacccttattttattattattttgtgatttttcataagttattttttttttttttatcaaaagtaatcatattcgagtgttttggacactacaaatgaatatcttcttttttattttattttaaatttgataagatataagatatagtagtaataatttatggacataaaataagttgagtaaaaaaatagttttaattaattttggtatttatgtattcatgacaacaatttttatgtctgatttgaagccaattgtccgaactatcacggtgaaggttcacat

SEQ ID NO: 27893 - DNA, 300 bp, Medicago truncatula
  Intron number 1 from transcript AC233109_27.1 (locus AC233 109_27) derived from phytozome v7.0 (chr-ID AC233109; pos 118819 to 119118)
caggtgagaaaaaacatgcctactattttagtttatttgagtatattattagcataatggaaacaatttatgacatgcccgtaaactgttttcttcttatattttcataagctcttcaggatagtttatgaaaacagcttatagattatgtgaaaaaagtttgactttcttttgtcaattgttatagaaataacttattcataagcacttatagatttgttggcaaaagtacacaagtttgttgacccttttttttcaattttaggtgtggcctcctattggcaagaagaagtttgagac

SEQ ID NO: 27894 - DNA, 848 bp, Medicago truncatula
  Intron number 1 from transcript AC233668_31.1 (locus AC233 668_31) derived from phytozome v7.0 (chr-ID AC233668; pos 131646 to 132493)
gcataccatctttttgtgggttgtggattcttgaagtactatgatctcttcttcgttaatggatgaccatttgtttaacagagaaactgcacatacttattactttaaacattttaaaagttatgaggtgattctaaaaagagttgttcttcacttcatttgatttggttaacttgtgttttattatggaagaaacataattgtcgtatttttcgttaaaaaaaatgtatatattcagtaattattttataaagtaaaattttctctttctggtggtttaaaacaaagaacaatatttagcttttgattttctcgatggtagataaatccacttcatttttaaagaatagtgacaaaaaacataacttgtgttttaatcaattttaaagaatagtgttatttatatgagagaaattaacatattgtaaaccatattatataaattatatttcattagaagttttttaaaatttagagaaaaacataaacaaatgcgtaccacaaagttttaaaagaattagactgaaaccctaatattaatatatatgtgataatcgatcacgttaggtttttattgattaatatattaaagattaattacacatgaacatgtaataatgtattataaagtttactcaatcttatttcatatatatgatggagaagatttacaatgatatataagtaatttaccaaaaaaaattataataaatgtatgtatgtgtatgtacacacacatatgaggtccccttgtttgcatggaggttgtttcaaaattgattattaacaaaagacaatttgatttgtcatggatctattcaggttaatttaggtttgtgcgcgagtgg

SEQ ID NO: 27895 - DNA, 1015 bp, Medicago truncatula
  Intron number 1 from transcript AC233100_67.1 (locus AC233 100_67) derived from phytozome v7.0 (chr-ID AC233100; pos 286742 to 287756)
ggttgggttgccaaggttgcaaacactccgtgaaggtattgtttgggattttttttgggtgatgaaatgtgttgtgttgttgattaattgagtttagctatgatttggttatttattggtgtttaatggtttaatagtgtgttaatctgttcttgatcagtttcagtagctttgattcttgatgagtttatgcagctttgattgtgtttaattgatattgtggataatcatggttaattaaagtcgatgctgcctcaatcaaggtcatcttatggtttgcattatcttgccgcgagctcagattgcggtcacagacctttttgaagtcaattctcagtgaattggaagggattgttgctcccttgattgtgttttttttcctcgcatacacgcaagtacacatgatattatagtacattagtgtgtgttataaaataagtattgtctgaaaaatttacatgatattggaaaagattataaacactaatttgaattcatatatttagttgatagtggaaaatggatgtcttagagagaagaaagtaattgggaataaactgaaacatcagaataatcataagactgaaaaagattattccatttcaataatttctcttggtggatcaatctttctggaccacatttctctgccaatccagctggaattcaactatacggctattggatagatcattgttttcttttagcacactatggtttttacgctatgcctcaatgtccgtagaattaaaatatacgcctaatttttttgtgttttaactgtgagggtggtaggataaaaatgtagtagagtagcatcaacatatggttatggaataaagggtgggagaaggattgaaaaacatgtttgttagattactgccacctttgccttatactatgcatctttactggatacaatttctgtgtaaatgtatgagctgtcttactgaaagtgctaatctcagtacttgtcctgactaagatatgtatgttacaggaaaatctgcaaaca

SEQ ID NO: 27896 - DNA, 859 bp, Medicago truncatula
  Intron number 2 from transcript AC233659_27.1 (locus AC233 659_27) derived from phytozome v7.0 (chr-ID AC233659; pos 111914 to 112772)
ggaagaatgtgagtcagatgaccacattcatttcttttccttatcaatgctttgcatttatactgtcatcatttttttatgcaacattcataaatgactgcacatcgtgcgattattttaacactgtcataatagtcatggaacttttgttctttactctcttttataaaatttgacagttgtagttcaacgtgataattgccggcataaaaagttttggtacctttgataatttggtaaagtattggagattgtcttaaattgtttaattggtaaaccactttggcaattatggcatggcgggttctatgccagccttcataggccataatgcctattacatccgccacacaggctgcaaagccgtatttttgtagccgatttttgtttgcccgcaagtaatctgccattcataacattgattgagcgtttaattcgtgctctttagtctcttcaagtcttattgtggttataccattagtttctcttgtgagttgaaatccacttttgcacatcaatttgtttgaattctctcttttaaacttctcgataaatatttataaacttacgatggcttttttgtgagcaagaaattaagtacttatttcacttgaaaagctcctatgtgcaagaaaataaccaatgtgggttctagctagttggttaacactgacctagctcatactttgagaatcagcatctctaaggcactagatttttaactgttctcttagcaaattttgagaaaagaaaggaaaaatgtgtaatataaaagttggacttgctagtggataaattgattctgagttttgcaaatgataagtactggttaaccaggtttggaggactgcaatcaact

SEQ ID NO: 27897 - DNA, 771 bp, Medicago truncatula
  Intron number 2 from transcript AC145023_10.1 (locus AC145 023_10) derived from phytozome v7.0 (chr-ID AC145023; pos 79028 to 79798 reverse strand)
caaattttctcacagtttgtgaaagaaaactcaaggtgagtacgtgataggttgacttaaaatctctggattgaaagtgttaaatataacttatagttataactaatcaggcgaaatatagactacttagtcaatgtttggatttacatttgaattgtctttctcgcgtctcattgctgtttggggctgattctttgacatacaaattagtttatactgcttttctggaagttagcaagcaattctctgacatacaattatacaaattactaagtacttttcaccagataactctaaaactagccaaactacttaacataataacataataatatctttttgcttttcactttgagacttaaaagtttcaaattcaaacctccatgtatgtagtacctgctcgatttgtattttcattcgtgttttgattaatcactacaaaatatctttttgtttctactttattttctggtttgaaggatttgtaataaaaataacgattcaccatttcctgcacgaatccttgaaaatagtaaataaagtgatctgtatctaatcaaatcaaattatcaaactgcattgtacattacaattagtgttagagataatatttcaatctaaggtcaacatttttctaatgcatatacatatagtttaccgctaaaatattcttcttgtatatagatggatggatgttgtacatttgttcttaattgtgtttccacgttacctatgtctgcaggttgacttgacagaatacgtcgagaaaat

SEQ ID NO: 27898 - DNA, 647 bp, Medicago truncatula
  Intron number 1 from transcript AC233655_22.1 (locus AC233 655_22) derived from phytozome v7.0 (chr-ID AC233655; pos 136100 to 136746)
gccatatctctgccttggtttattgaaggtatttttctacaccaaatcacagattcaactcttgtgctgctagataaatctaagttcctaaaatgttgaagcttgcactttctctatttatatacgatatttactctatatgtttaagcttcctgctatgggctggtgtaacaccgcttccttcaaacttattttacatttatctcacatttattagatgacaccaattcttaccaatacccagatagtattaatgtattgcatctgtcctatatcctagttagtagtgctgataccttgacgtgttttaaatgtttagatgctgaatggactgtcatgtcaatttaaaagtaggattacatggattatcactttaatataacggctttgacaccttgacagttgaattatttactttattgttcacttgttcagaaaaaatgatttttccaaatgatatgtagtttttatcctgtccttttttatagtattgacttgccttttgtgaagtaaattcatgtcaatattaaaaaaccaattccttgcttaagaagaaaccaaaattatgatctaactatgttttattttattttatttcattttgtgctctagaactacaaagtatttgaaattcttccaggtgataa

SEQ ID NO: 27899 - DNA, 951 bp, Medicago truncatula
  Intron number 2 from transcript AC233845_6.1 (locus AC2338 45_6) derived from phytozome v7.0 (chr-ID AC233845; pos 13 080 to 14030 reverse strand)
acttacaagcttcaagtatactatttcttcagaaggtaataatatgttacagttgtgatagaaattcaaatcagttcatccattttgatctcttttatttctctgaagcaacttacatctctattttttctctccctgattattgcatgaagttgtatatgtctgtgatgttacacctacacctatgaatcttagctcatggagttcaaatcagtattttattttaacttggatgtgtttctttttttatattgagaccaactcttggatttattcattttcatagcatggctaaatctggtaattgcattttttaaatgtttaatattaaatctggtaatttccaagggtcaatgagaattgtgctttgtttctttgtaattatagagtaaagatggaaagagtagagaaatacaacttgagtgatatcatgaaaaatcaatcatattggtactatgatataaaacactgaacttttactcctatttattttcataccaatatttcaggtcaagtacttgctattacaacttgtacatagcacaaaccaataacacattgtacattataagactcataaaaggatgtgtcaataagaatcctatcatcttactgttgagttccatctcattttcattttcttaaagaatttataattataagtttacatcaacatagttaatgtgatgcaataaggcttttgacttttttttttccaaatataaatattaagcttcaaccaaatttcgctggttttcgaaggcctatcgtgatattttttaccctctaccatacactcacaggattgattgtgcatatgatctgattacagagttgcactgttcacattcacttacttcttctatgtcagtatatagtttcttattttttctttttggattggtaatttgttcaaggtcttagatatgatatcccttaatgtttcaggaa

SEQ ID NO: 27900 - DNA, 759 bp, Medicago truncatula
  Intron number 1 from transcript AC231338_4.1 (locus AC2313 38_4) derived from phytozome v7.0 (chr-ID AC231338; pos 77 65 to 8523 reverse strand)
gagaaaaggtaagcttggaagaaacataattttcttttaatttttaatgattattaaattaatataataaatatattatattttattgtcaattatttgattttattctaatgagtaagattttatataatttatttattggatattatttattatgtttttcatcttttgctgagagtgttttaaaaattatgataaatttaaaaggagtaattctttggttaaatttgtaattttgttggtctaattttgaatcgatagtgtgcatttcaattttttgttttagatccggttttatataaaggcaaattccacgagtttatgttgagatcaaacatatgaatgcgtgaatatgtaagaaatcattttatgttaggtttgatcgttggttattcttgattccacccagatattggacgttcttatttggttttgaatagtaatttcaactctaatttgaaattttgtacataaatttcttttcttttttatttttcattcctccaatttaaaaattataaagttaaattataaaaaaattagttatagagaaatttttttttttaaacttgagacaattattatttgtcatttctctgcctcattcttaaagaaaaaaaaaaatcatttctctgcctctaaattttgttgtgctaatataactttctttgtcaataagagttgattattgagtctaatttacatttgattgctaccactgtaggagcttgaaacttttgataagaaattcattcgcag

SEQ ID NO: 27901 - DNA, 657 bp, Medicago truncatula
  Intron number 2 from transcript AC231342_4.1 (locus AC2313 42_4) derived from phytozome v7.0 (chr-ID AC231342; pos 10 977 to 11633 reverse strand)
atttctttgactcattcgtaattatcaactaagtttctgattatgacataacataacctctttagaacagatttaagtaaaacttgattgataccatgtgctttggagtttgatgaagtttctgattatgactaactaagtttcttaatataatatccataagtttcaggtgtggataaatggatcaattaaaatggttattttaattgattatagtttgatgaacctcagtatcattaaataatgttttaagttttttttcttatctgattattacagaaaacgtttacatggcaaccaaaacacaaggtaaaagcgcaatttattttttttaaacaaggggtgcagctaagatgtctcggttgatgcaagaagttcggaaaaacatggaggataaaccaagttggatgggagaggacgtgtagaatgaatcgacacaatattggaagtcctccaagttcaaaaaagaatctcaaacaaataaaagaaatcacaattctatggctggtgcatctcttcacactggaggatcaattccccatcgtttattataagtttttattatatttcataatatagtatttaaaattaatgaccctataacatttttgataatatacagaaaaaggaaaaaggtgcagatccgccgttgactgg

SEQ ID NO: 27902 - DNA, 450 bp, Medicago truncatula
  Intron number 1 from transcript AC233662_51.1 (locus AC233 662_51) derived from phytozome v7.0 (chr-ID AC233662; pos 243150 to 243599 reverse strand)
tctctttaaggtcgtctttcaattttctttcattcttaccgattcaacgtgtttggatttgagtttttctatttttttttttgattttttgatttgaatttgaattaatcctggttattttttgatattcttgaaaatgattgaattaaacggttattcggttatgttcgattcaaaagtttatatcggattgaattactgtctgttttgtttgattgaatttctttttttttttgtgatttttttttttgtcgtgtttgttgttgataaatgattaaaaaccgtttctaattatggattttatcttcaggcgttgattgaatacgaatctggagtgaatttcagtgaattcgtgtttggcattgatttattcgtgcatgctgtgcggtagttttgattttctgttagttaataggtgatttgaatttgaattctcagaggctctgttat

SEQ ID NO: 27903 - DNA, 572 bp, Medicago truncatula
  Intron number 1 from transcript AC235006_12.1 (locus AC235 006_12) derived from phytozome v7.0 (chr-ID AC235006; pos 56242 to 56813)
aattgctcctgcactttctcctaaaccacgaaaaggtatacatttccccttattatccctatattttaagatcccatttatttgtgaacttttttaagtatttagtttctaaaatatgtttattttatattttgttaataaaaaatgtgagatgtcctctaaataaaaaattgtgagattttttaaatgaatcattgtgattgttagaagatgaaatgctacttaagaatgatacataatttctggaaataaggaaaacaattttttttagcatttttattgtttcttaaaatatgcacacaatttataagctagttcctctataattaactgagttttattgtaccattaaacatgagcattttattgtttcccctttgattacttctactagattcatataagagtataaagtgggatttttactaattatgagaaatttatatcaactctctctttttaaatgtcgaaagatcaaattttactctctgatataaaaaccaaaattgataggatccattctgatttcttgattaggaaagagcaggaaaataacaacggcgatcgctatc

SEQ ID NO: 27904 - DNA, 758 bp, Medicago truncatula
  Intron number 1 from transcript AC233100_56.1 (locus AC233 100_56) derived from phytozome v7.0 (chr-ID AC233100; pos 212136 to 212893 reverse strand)
aacttaggtgtttccagactgttacttgctatcaggtccaaatctcaactcaatctctttttttctattttgatttttttttcttagctactataggtatgaaaatgattttttttatatacaaagtaccttttatgagatttgcaaggatattaatatatgaaatactttaggaaaaaatagtgacactgacatatataggtggaccctggtaataataattttataaaattgaaatgatttagtgcaactatatgtattatagttgtgttgttggtcatgaatatgataacatatgtttgatctcacgtgtcagtgatataaagttaatattaattgtataaaaagttttcaagtataggttcggttacaaagttatgttgtgattcttgatattataattggactttcaaaaatagtattataatatgattggcatgtgaatataagttgttcgtgttaagtatactactaaatttgtctttttataatttagtgcttaaatatgaattaaaaaagtaaaatcaatattttgctgagtataaaagttaaacattgcaatcatgtgattgctcaatttaagtggtgtccatttgaaaagctatgctttcttgatatgattcagtttactatttggtttaatgttttctgaagtgtttattttttttctttctatttggtgtttaatgttttctgaagtgttaaattggtttatatgtacttggtttgattataggctgtggtcaacaacttggaag

SEQ ID NO: 27905 - DNA, 640 bp, Medicago truncatula
  Intron number 1 from transcript AC234701_10.1 (locus AC234 701_10) derived from phytozome v7.0 (chr-ID AC234701; pos 38491 to 39130 reverse strand)
aaatctgtatcctacggattttgccaaggttccaggtaatacatttgtgggtatccttaggattttggtatccgcagaaaacgttcggttagtgcttgggaagtttcctgcccgttagcactttcgtgcgaacatactcgcaggtacttccgtggcaaactacgcaggtaaatccacaggaaatgctatcaagagaactacaatttgcatctaagtccgcacgaaattgatttatttacttaaaaaaataacgcacttcaatgcattccagaacatccctgagtaaaacaaaagaatgtttaacaattgaactagtcaaacatcaaaataaaattgaaagaaacatttgtttttttttatttgattttgcactcgggacaagctcagttcccctttcttcttttgtacgcaaagcaagtaaaagcgtgaggtgtccatgagaatgaataaaagcgtgaggaatggaaaagaagcaaatttgatcagaaattcatgttatgtgcaactagtctccctttagtttcaattgaaaccaacactcaacaccaccacctacatgcatatcaacctcatcattcaaaatatttattcaacagttaatctagttaccgagaaccaaaatttgcaggagagggaattc

SEQ ID NO: 27906 - DNA, 366 bp, Medicago truncatula; identical to SEQ ID NO: 27746
  Intron number 2 from transcript AC235488_20.1 (locus AC235 488_20) derived from phytozome v7.0 (chr-ID AC235488; pos 84421 to 84786 reverse strand)

SEQ ID NO: 27907 - DNA, 719 bp, Medicago truncatula
  Intron number 1 from transcript AC235005_24.1 (locus AC235 005_24) derived from phytozome v7.0 (chr-ID AC235005; pos 90982 to 91700)
atcatcaacacttttctcgaaggtgtaattgtaaggtgagagtgtctctcttcataaaaaaaattcaactttatctcttttgagccaatatactctctcatgcccatgattattggatttcgtcttttggtaatttcgtgggtgattcaaatgaataaattatgatattatattatgtttttatatttggtttaagttattcttagtaaatagacttctaaaatgactaatgtcattctttattaattctgagttaaaattcattttgataattcacaatttttctatagactaattttagtcttgacaaaaataaaactcaaagcggatcctaacattttcatacaagagacaaattagtttttatgttatagtgaattgttgctagtataaaatgacggactatttttgattttaggtttgtcagaaactaaattggtttgcacgaaattataaaggactaaaatgagtttcactctaattgttttcatccgatcttttttagaattcaatgtgggacttggagttttttccagtagttagatccataaaaaaaaaaaaaaaaaaaaaaaaaaatcaagttaattttacttggtttgtgattcactgtgctttattatccttaattttccatttaattaaacatctaaccgatatgattagttcttatttttttttatgcagataaaataaacacatcgagaattattgttgataca

SEQ ID NO: 27908 - DNA, 765 bp, Medicago truncatula
  Intron number 1 from transcript AC233677_20.1 (locus AC233 677_20) derived from phytozome v7.0 (chr-ID AC233677; pos 114087 to 114851)
ttcgattttgcaattttctcctctctaactgcaaggtgagtattttttttcttttcttttcattttactaggtttcatgttctacaagttcactcagttgcgttttcatgcccaaccattttgagattttgactactgccaattttaacacattctttatttacataattactgatttttgttatagcttttgtatttacagaggtttgatgccaacatactgccattgatcaatttttttatttatttcatttttttataattaaaatgactttaatatgtcagtttaattttttaatgctaatgataagtatatttatttttcttaaattacccaaattgatctagaggtgtgcaataggtatcttccacttatgatgttatgttggatgaacagagtgtgggatatacatgaacactttagtcaaacttcaagaggaaaaatgcttacttttgttactttaatatttaatttgcaactttcttatttcgatttccaaattgctagacaaaattcatattgtagtgtttatttaatataggttcaaggtgcaagtcattgctatggatgaaaccggttctactgcttttgtgttgttagaagttgtttctaaaatttttgggacgaaatgttcgatattttcttggtcgagctgatggggcaatcttagttacttattttaatttattcaactggtggttttgtaaacaagtgatttgtctgtttgtataaaaaactgattcttgatgtgcagaacgagaaaa

SEQ ID NO: 27909 - DNA, 889 bp, Medicago truncatula
  Intron number 1 from transcript AC233109_22.1 (locus AC233 109_22) derived from phytozome v7.0 (chr-ID AC233109; pos 87497 to 88385)
cttgctattctcattcaccattaccatttaataaggtaaagcactttctttgttttgttttgttttgctgtcctgttttgtaatcttatctgcatttttcttgtcttttttgtacttttcttaattttccacaaatggggtttctgtttgaactttaaagttttgaactttgaataaatttatctgaatttgaaaaatgttttctgttatagatttgaatcaccaatgcatactaatgtgaaatgggcctttgagcttcttttttttagtttgtaatagatctgatgttaggtgcatgttggtattaaatatgtagaattgacactgcagattgatgtcactgtcatgtttgtgtaagtgcttcataggcaataaaagggagtttaaattgccgcgtaagtataactcagacggtaaaatgttgcagtgagtcagtgacatttgatatgttatagtgcatattggtatattgtcgcgaaagtacgcatcatatggtaaaaggttgcagagaaatttgatatattgtcgtgcaggttcaacccttcattctctactttttagcacttagtttgtgtgagttttgtcgctaggttgtttaaaacaaaacaaaaaggattttgtatttcaaaaagttggcacttttgtgtcatcaaaccaactttgcagcaccgacacttaaaattgaagatttgtccggtgtttgacatgtgtcggtgtccaacaccggcatatgtgcttacattgaattatttcattttttgagtcaatgtagtttatttatacctagggtgtatttcagaactcaagaagttttattctatttcttattgatttatcatcatttggggcggcaggatataaaactctgtaggacagttgggcaagtgaa

SEQ ID NO: 27910 - DNA, 633 bp, Medicago truncatula
  Intron number 2 from transcript AC233842_8.1 (locus AC2338 42_8) derived from phytozome v7.0 (chr-ID AC233842; pos 27 931 to 28563 reverse strand)
ttgaattcgagcttagcactgtgagtattttatgttgctacttggtccggtgctatgcctgtcttttaatttatagcaactgttgatgcttttcgttagttgtttatcgcgtcagtcattagggactgtaatcatggtcaagtttttctttgcactatcttgctgatcacgatatatggaatgttatatttaatgaagatatatgactggttttgagtttcaccgatgcatggcgttagattgttgttttagaacgatggtgaatgttttttacatcagtccacaacgaatgctttttggtttacattcatagtcatcggtgtggcaatcgtggtacaaagttattgatgaatgcaacttatatgcttttagaagtctccttgatttcaatttacaattagatgactgtaggtttggtaactctgttgtgaccacatatttcatgtatgaccatggcagtttaggactcttatgtggatcattttttcatgtatgaccatggcagtttttgtgattgattccatgttaagtcatttcttttgttgtatattttccctatttttgtttgtttaaacatgtttaatatcatgatacacagttgacggtggatagttgctgctacaaggtacagca

SEQ ID NO: 27911 - DNA, 899 bp, Medicago truncatula
  Intron number 1 from transcript AC233842_8.1 (locus AC2338 42_8) derived from phytozome v7.0 (chr-ID AC233842; pos 30 506 to 31404 reverse strand)
tcggtaataggtttgtacatgcttgattaccttcaatgacaagtttgtgtttctattgtgtcattgcttattttatcttgtacttttattgaatgccaaaattcatgagatcatttattgagaaaattgtagatgtcaaaggcgatgtgaattgtgggtttcgaactatagctgagtacatgtgtctgacgaaagaaagtcatgttatggttaacagagtactagagtgatgatcgttataactatattttgaatggattgcatactcacgaaaatagtagtggtattgcacttctagataagtggttgacattgccggatatgggccacatcgttgcaactcattacaatagggttgtggtggaattgacaaatcatgaaattggattttagggactttttttctcaattaaaggtaggccaccgattaacccaaaaacctacatcatgtgccttgacttaatcccaaatcattttgttctctttttgaaaaatgattgtctactacctccatcatctacaaagtggaagctacataagagcgaagaagcattgtcttgggaatttgaattttttgatcaataaacttgattccgagacctcaagaaaatggaaaaatgagattgatagcgattttcgcaagtgtacgaaatcgttcaagtagtaaatttaaaacggtaagaccgagtgtcgaactcaaggatcgcgttatactgtcgaataatacttgttacttaattgaacaaaaaggtacgagatttgtttgatagcaataatgtaaattaaacagaagaaaatttgtttgaactttataataagaaaattgttgaggatgaggttcgctagatgactatcttaagttagtaactcgaatataactattgaatcaacttatcgaa

SEQ ID NO: 27912 - DNA, 1052 bp, Medicago truncatula
  Intron number 2 from transcript AC150841_4.1 (locus AC1508 41_4) derived from phytozome v7.0 (chr-ID AC150841; pos 89 61 to 10012 reverse strand)
tcaacttcagcttctctcaaccaccccctcgtgaggtaatattctttataattcactgtttattaatttttgtgcctaaacgttagattttgtttcacgccaatcatcaacaaacccaccaaaggattaaatgcatctattttgtttgttctgcgtagttattacaatttgttcattaaattatcatgattggctaagatgatgcatataaagttgtgcattattcttgttattttcttttctcttctgttggctctagctttcttggtctccaacttttacagtaatgcagttcttcactaatggcttgtagaaattttcatgcattaattttttaagattcgcatgtttgggctggaattatctcttaaaatcaaaaatatctagaaattagaaacatgttactgatatccattttgttagttaccagctcatgagttgtaatcaggaaacatttgcttgctccttgtgtgtcatgtaacccaataccatatgctctttttcttcaggtttaattattttgtaggtccctaaactatttgtaaatttttaaataggtccctaaactaaaacaaattgtaatcagatccctgggttttttttacaagcaattgcctaaatttattagtaattgtaattaggtccttaaactgaaaagtttttaattggtccttaaatctttttttttaacagcggtccttaaaccttaaaataatttgtagttagctccttgaattcagggacattaattcaaattatttaaacttttagggatctaactgaaattatttttagtttaaaagggacttgattaaagattatttaaaagtccagggactagattaagaaaatagttcaggtatctaattgaatatttttgacaaatatagggactcaattacaaatatgtttaatttaggaacctatttaaaaatcctcaaataattcatggaactacagcacaattaaatatttctttaagctataacaaatatgttgaatgtaattgcttttcaggtgcttctagagctagcacaaaatcgcaacaagat

SEQ ID NO: 27913 - DNA, 841 bp, Medicago truncatula; identical to SEQ ID NO: 27780
  Intron number 1 from transcript AC157372_6.1 (locus AC1573 72_6) derived from phytozome v7.0 (chr-ID AC157372; pos 27 454 to 28294)

SEQ ID NO: 27914 - DNA, 933 bp, Medicago truncatula
  Intron number 1 from transcript AC235488_34.1 (locus AC235 488_34) derived from phytozome v7.0 (chr-ID AC235488; pos 161047 to 161979)
cagtgcaaaccactctccgaacaacaggttttccttccatttccattcaattctttcgatctacatcattcccaaacaattacgcccattttctcttcatttcttctaccttttactttttcccccattttaagtttaggtcgcattcaattacaaactgtgtttaatttcgcgatttagagactgagatgccatgattttttttttacattcaatttcgctctaaattgatgaaatttcattttttgctatcttgtatgttgtttatttatttattattcgttttttttacaaggggattttctcgttgttatgctatgatggtttgtaacgcatttgacgtttggaatctaaagatgtaatttttattaatttcgatttatcttggattgttgctattgctgtaacaatttctgtcgaatgtagcaatttggtgattgggtttccaccaaaataaatatggcgatttgattacctacagaatgtcacgaatttgttggtattttagtggattcagatgttggctttctatggcttgtaagttgaagcttaattctggttaattggatgtgattgaagattgatcaaattaaaatggaagtgtgttggttcttaatatattatttatgatattttagtggtttcatctagttttgctttgtttattttttcatgcaaaagctgtagtagtgaaatttgtttattttcaatttattgagatgggaacaatatttgggtgtcattgctatctgagtgatgtatcttggggaaatatcattttatgttgattgtttctgtatttgtttttaatagttgtttcttattagggggctatatttcatttactccttgtggtattatcaccctggggaaaacaaatagtacataaaaattaactattgatcttgttttctaactgtaggttaaagaatt

SEQ ID NO: 27915 - DNA, 922 bp, Medicago truncatula
  Intron number 1 from transcript AC235009_6.1 (locus AC2350 09_6) derived from phytozome v7.0 (chr-ID AC235009; pos 20 106 to 21027)
ggtatcatcaatttttattaaagattctttctttattcttaattatgcataaacacaatctatatatctttgcattttttttattaaaaaagaaatagatataattcttcaaccatgctatagggtttcattggggaggatacaaaataagcttttacttccactttcttattgatctgttataaatttgttatttttcaccattttatttatttatttttattttattttttcttctggggttcttttttccctgttggattggttgtggtttcttcttatgtaccttctttgaattttgtttctttctgtgatgattgcttctctgaaaccctataaagtgaacagttataccgtttttcggttgatttttctattagcatcaattgatagtttcatttccatggaattgagtatgaaagttggaactttgcaataagctgttaaaatgggtttgttgaacatagtttttttcaattggattaaggccccaagacttgagagttgagaaagactagtttgttactgcatttgtatcaattttcggttgataagttatgcgtttttggtaaactgttactgtatgtagtttttagtcctttttttcatctctgtactgtaaggtcacttagtgctctggttggtgtttcatatgtacattgtttaggatattttaaactcgttataagtatttcctagtgattaatgagtttgatagagatatgatattggacaaaacattatagtttcgtttgatccgtgtaaccgactttacttagtggtatgatgcttggttgttgataagtatttccaatttagttgcaccttgacattgatgatcatagatttctgaggtccttaatattgaatttccttatccaaagcaggtgtcctgatcttgttatttggagaagacgagtta

SEQ ID NO: 27916 - DNA, 945 bp, Medicago truncatula
  Intron number 2 from transcript AC235487_7.2 (locus AC2354 87_7) derived from phytozome v7.0 (chr-ID AC235487; pos 32 408 to 33352)
ccaggtacactgcaatgtagcatctgtgcatgaaatttcctccatatgaataggaagtggtttgttttttggtacattgcaaatgataattgaattccctagactagacaggttgaacataactggaataatattttactctggttcgattcttccgattttgttcttagctgattcagcttaacttggtctgctttgacaactcttgttctaaattacttgtttgacttgttttgggcaattctgctgacagaatctatccctcttttgacagaaatgctaagagttatattggcaagattaagcatcagatgtttgaataatagttctgcttagtgctttgccttttcttcctgatgtgcatagatgcatggtgtgattaaataaccttgcttccattccatatttttgccttctgaatgtaaaaagtgtgacacagctgttgatacatgttatactcatcccccgatgttatcatcaattgaatgatgctttttctcaagtagtttgctcgtgctgctatagagctggcatatagagcatttaagctctgtttaggaaattcaatatatatttacaagtaattttcttttgaacaccgcatacggatttaacagatatcaaatttaaaatatataaaaaaaaaattaaaaaaaaatcaaaatatgtcaccactgaagtttctgtttgaagaagataaaggctttgttattaccggtgactggaaggagatttcttatgtgatgtatggaaatgcatcccaatggctttgtggtgtttcccatactttaaactgtttatagtatggctgcgcttcctttctttacttcatatatagtttgtcattgattcatattctgtaggctcattttcaaaatgcaatttattgaactaacacttaatttttcaggttattacaacaatccacaggcctcaagattgact

SEQ ID NO: 27917 - DNA, 835 bp, Medicago truncatula
  Intron number 1 from transcript AC202349_2.1 (locus AC2023 49_2) derived from phytozome v7.0 (chr-ID AC202349; pos 52 80 to 6114)
acttctacaaaaacaaaagtctttccatcaaaagagtaatggaagcatgtaacacactctataattattcaaaactaatttttcattattcaaaactaatttttcgtttaatgccaaatattaatatgttagttgttatgttagaattttttttcttgtatcttggatctttaactcttcatatcccttaaccctatagctcaaattagttgaactaattaattaataataagttgaaattatttcaatccaatatactttgaattgaacagatattggggtccaaaagtgttgagtaccttgcaaattgcaatgatggaaaatgagtatgtgtaatttcctaacaattttctctcatcttttcaatcttttcgtacacatctattattgataattttgtttctactttcctggttgtttcctctggtgccataattcaaactacctattctcagtggtgtgttttaagtcaatcaactttcctaaattgctaaaatcattaaatactgacatatcagaaatttaatgtgttactatctttgcaataatttgctttatttgtcattaaacaaaagccttgttcaatagctgggtgattttgatctgtctataaatatgagcctagtttattctcagttcttcaattcattccacttcacaattcagttaactactttatccctttgattaaaataaaccaaaaatatttcaaaaggagtagatctcaataatgctttgttttgggtacaattttctcttttgtttggtgtcctttctatgttttaatgtgttatgtgcagaaagttttcatacaaacaagtgtgtggagaaagag

SEQ ID NO: 27918 - DNA, 428 bp, Medicago truncatula
  Intron number 1 from transcript AC146721_19.1 (locus AC146 721_19) derived from phytozome v7.0 (chr-ID AC146721; pos 116431 to 116858 reverse strand)
ctggtctcgagaagcttaacattttgcctttcagggtaagtattattgcttttgcacatgaatttaggttccacctctctaaaatatgttctttcaatgatattttctttagtcaaccgtataaacagatccaattcaaactgcacttaaactgatccgatttcttgaagaaagaaatctgagccgaatcacattctgttatagtctttggataggatgtgtttctggcttagaattgatcaaaactgaactgcaaacacctctattcttcataatgatgcccatttttcttttgtacaaagtttcattgaagttaatactttatcattcaaaaaaacttcttaatgatatacacatcatgtctcttaatgtttgtttcattttaatgatttaccttgtgtgccattttatattacaggtggcagctt

SEQ ID NO: 27919 - DNA, 304 bp, Medicago truncatula
  Intron number 1 from transcript AC233668_40.1 (locus AC233 668_40) derived from phytozome v7.0 (chr-ID AC233668; pos 166455 to 166758)
ctgctccaggtcaattccttttcattctttttttttttttatattaattaaggttataatatttgtagtttatctttagtagttacatgtaaaatagagttataacacaattgtctactctacatttcatgttttgtttatggaattatattttacacacgataactcttctttgaatgtttacagaacttgcatacacaatggaagtaaatgagaaatgtgatgtgtttagttttgggatattaaccttggaaatgctttttggaaagcaccctggagatattgtaacttatttgtggcaaca

SEQ ID NO: 27920 - DNA, 189 bp, Medicago truncatula
  Intron number 2 from transcript AC202568_14.1 (locus AC202 568_14) derived from phytozome v7.0 (chr-ID AC202568; pos 68919 to 69107)
tctctgtggattctcctcagatcaaccttcttcaggtatctatctgaagaaactcaaatcgatttgaaaaataataccaagcatttaaaaaattagggttccatgtaataatattctcgaatcctttcttcaaattatcgattcaattcaaactgaatcaaacaaacttctttcttcatttttgcagaa

SEQ ID NO: 27921 - DNA, 942 bp, Medicago truncatula
  Intron number 1 from transcript AC235094_3.1 (locus AC2350 94_3) derived from phytozome v7.0 (chr-ID AC235094; pos 18 206 to 19147)
gacgcctcgttatcgactttctctgtaagtattttaatttcttctatttattcacatcaaaatctttcttacttgctaagattagtttgctatctggatatatacatacattaacaatatagacccacatccttcgccttcgccttcgccttcgcgttcatcttcactgtgtgtgatctactcatttttctttaaactgcagtaggtggggcccgtgtcttcaaattatcgattattaacccattatggctccatatatcccgcggtttctgttttcttcaatacataacaaactgtcctagctcaactttacaaaaacactcattatttagtgacatatatgacaataacaaagtggtaataaacagaagacaaatgacaaattttcactatttagaataaatgaatttctgaaatttttattttaaaaatagtaatagtataaaagttgtttgcattagttctatagggtagaatggagtcaaattacatgtcataacatccattttttaaatgtacctagattattattccacttcatttcacccatactaccaatccagagacataccataagagttaccgggttaataggtaacacattaaattattggtttaaatttgtacgatgtttttttttttttttgtagatagacgaaataacaatagtcactagaaactcacagacaagtggaagtggaggaactggtgtccacaggtcctagcaatttctgcattttagtcggttgagctaagacatgtggaaacatgacgaatttttaacacgttgaaaataatttttcacttactaatggaggaattggggtgcaagtttcatacagttagtaattccaatattagtaataaccttgaatctgataaatatttttcttcaaaccattggcaggccaaagtttgaatacaagatttttgaccccatac

SEQ ID NO: 27922 - DNA, 838 bp, Medicago truncatula
  Intron number 2 from transcript AC233660_33.1 (locus AC233 660_33) derived from phytozome v7.0 (chr-ID AC233660; pos 126917 to 127754 reverse strand)
ttatatccgtcatagacaggtactgccctgaaatcatatgtttgtgttggattgcagttgcttttcctattacggagttatttcatatagtgattggccctgaatgttttagtgtgaataatatttttggttggtgttttgattaaatattctcaatgattcatcaattccctgtccttttaaaacacaaaatctttatatttcatagttagccaataaattttaaattgcaatgcttggattggtggcaagattgatagaatcatggcgagtcatttgattttaataaagccacactttggagctacacaaaatcacagtgtcaccgtgattttgccaaattaacggtgtcaccacgattttgccaaattcatcgctaatccaaacatttataaaagtcaataacgtacctcttgatatccgtttagtttaatatcagatgatgaagtgggttttgctacgtatactgcatcaaagtcctaaggtgtaatgtatatattttatgacaacgtcacaggttcacatttgtgagtcacagttataaatgccatagttcaaatatatatatttttttcttcgtttttttcccctcaaatccttgaagttttaatagtcccctgtccatggaaatgcaaataaacagccgttagttcagtttgttactgtttttttccccactcaatgcatactttctcatgtattgtagtttgtacatgaatgtcgtaggtacctaattttgtagcttggtttcttgagccgatttttttttcttttttctttgagtctaagatggttccaatcctcatggcctcttttcttttccagacttccatttacg

SEQ ID NO: 27923 - DNA, 481 bp, Medicago truncatula
  Intron number 1 from transcript AC233660_33.1 (locus AC233 660_33) derived from phytozome v7.0 (chr-ID AC233660; pos 128168 to 128648 reverse strand)
cctcttcttcctctgacttcgcttccgccattcaggtaccctgctcattgaatcatcattttcactctttttctctatctggtactgtaccctttatgttatttgcatcatttttaattgctttatctgggtacccttgtttttttagaatcaaaaatgttagtaaagttagtatttttatgtcgaattaatgcttttccttcttatcacttcactgcgtgtatcatttgttattctttatatagtaatagaaaaagactagtatcaattttgctgatcattttattttaaacagatttttattcatttggggtcacccaatttcccttcaatagcaaaaaagttatcttttttcatatttgttattgactttctttgacacggtttcttgaagagtcagaaatgaagtcaaagtttctaaatttggttgttttttatggtgatagagtgcatcccggagtaggagaagtggcggcggcag

SEQ ID NO: 27924 - DNA, 469 bp, Medicago truncatula
  Intron number 2 from transcript AC233100_39.1 (locus AC233 100_39) derived from phytozome v7.0 (chr-ID AC233100; pos 134036 to 134504)
tctttaaggtacactattgttcctcttgtttgtttatttttcttcatctatggtaaggtatttaagaatttacctctaaataaagtagtaagccgataaaaaatatagaacattgcgcaaattatttttattgagaggtctatgtattcttattatgtgaaaatcgttggatcaaatcaaatggcatatatccggaacactcgtattgaatttgaacaattgcactggaagacttttataagtcttcgaacgatattcttgcaattctggcacaactcaagggaagccgaaatatgtatcatggaatgatgaattgaaacatcagtgcaaatacatcaaacctcttttacctacatgagcaggttctcgatttcatttcttatctttatttataaaaaacaatagttggatcgttattttgttatattctcttctgacatatataattcaattgtgtagagagtttcct

SEQ ID NO: 27925 - DNA, 1023 bp, Medicago truncatula
  Intron number 2 from transcript AC233662_22.1 (locus AC233 662_22) derived from phytozome v7.0 (chr-ID AC233662; pos 98633 to 99655)
gttctgaacccgaaaaccaggttctaaaatattattttttatttattgaagctatttaattaatttatgtaacattatttaacccttttgaatttcgcaactgggttttgttttttataagctaaatgtgaattgggttagctaaaaattctaacttgccattgtatttggaactaggttagaaacaaataattcattagtgtgtgttatggtgtttagaaaatatcgttatcataaagtattatagagaatgatatgggttttgtttggataaacattttaagtataagtgtttatcatataagtgcttatttataagctatttctataacaaaataaaattgagttaaaatgtttttatataagctatgttattttcattagctatattggagagcttgtagaaataagttaaaaacaacttatgaatattttataagttgtttttcgctttttattagctctctcaagcagtctcacaagtgcttatgccagtaggtaagcttaaataagcaaatccaagctgtcccatggcgttatggtgttatattgaataagcttaacaattgggccacattgttatataaagaatgatataggttttgtttggataagcaatttaatgcgcttaaagaataaacgcctatcatataagttcttgtttacaaggtatttctataacagaagataaaatagttaagctgtttttataaaagctataagttgtttcattagctataccgtagagcttataaatagaagttgaaaacaacttatgatcatgtcataagttgttttcataagttctctcaaacggtctcacaaagtaggcaagttttaattaagtcaatccaaacaatcctgtggtgttacggtgttgtattaattttactagaaacctttctttggtgtttttagcttaaagatagattattgggttcttgctcatccgaaagaagataggtacctctaattgtatatgcttattgctcatctggatttggttgtattgattgcagggag

SEQ ID NO: 27926 - DNA, 427 bp, Medicago truncatula
  Intron number 3 from transcript AC233655_5.1 (locus AC2336 55_5) derived from phytozome v7.0 (chr-ID AC233655; pos 48 605 to 49031)
acaatttcattgagtatggctttcttttattggatgcaaaattgtttatataattaaaaacgattttgtgttggtgtcttctttttcaaaactacaatatgttattttaactataaagccttcgacactctattttcagtaaaaacagaaaattggaaagcaattgtcatgtttttaattctccaatctaccaacaaaagatttgttaatttttgtcgattattgtttccatttcatgtcaaatttcttcatctaaaatggcagaaacctttagtgaagttgaaattttctctgtatatcagaactatgattgattgtgtatccttatctgttttgatatcaattctaatgataaattggttctcttcctttgtttactattaatattgcaggtgttgtcttactgtgaaggtgagctatcgaaata

SEQ ID NO: 27927 - DNA, 900 bp, Medicago truncatula
  Intron number 1 from transcript AC233082_11.1 (locus AC233 082_11) derived from phytozome v7.0 (chr-ID AC233082; pos 98211 to 99110)
ttgacgttcttttgccctttgcccctttccatacggttagtagacttcctttttctaataaaaagtcttctcattttgtgcgatcaatgtagcatatatgtatttccttcaaaacaatttggaagtgtttttaatcactcatgaattatttcaattgtggttagaaactacctaacaaacaattcaatcctaaatgaaatggaaagtagaataatactttttggatctttatagagtaaataatatcaaatattgtcttttttagtgaatatataatttgagcatggatggacgataaaattacaggtttattataaaaaataaatttcacgtttaagaaaagaaataagtaggaaaatacaccttccataaaaaataatgacacacgcatatatatgcatgtgtgtgtttttgtataactcttgagaatatatcatccattagagaacctctttttttattttgcagttgaaatgatgatgagaaactataatattgctacattacatgcattgttagtgttgttctccattgttgggttcaactcagcaacaaagaatggagacacacagtgcaaagaaagggagagacattcactcgtcactttgaaacaaggccttcaagatgactatggtatgttgtccacatggaaggaggatccaaatgcagattgctgcaaatggaagggagttcaatgcaacaatcaaaccggttatgttgaaaagcttgatctgcatggttcggaaacacgttgtttgagtggtgaaatcaatccttcaataactgagttgcaacatctaaaatatcttgacctcagatatttgaataccagtggtcaaatcccaaaatttattggatccatcagcaaattacaataccttgatctctcatttggtggtt

SEQ ID NO: 27928 - DNA, 198 bp, Medicago truncatula
  Intron number 2 from transcript AC233668_39.1 (locus AC233 668_39) derived from phytozome v7.0 (chr-ID AC233668; pos 161054 to 161251)
ccgctccaggtcaattccttttcattctttttttttttatattaattaaggttataatatttgtagtttatctttagtagttacatgtaaaatagagttataacacaattgtctaatctacatttcatgttttgtttatggaattatattttacacacgataactcttctttgaatgtttacagaacttgcatacaca

SEQ ID NO: 27929 - DNA, 996 bp, Medicago truncatula
  Intron number 1 from transcript AC231338_8.1 (locus AC2313 38_8) derived from phytozome v7.0 (chr-ID AC231338; pos 21 594 to 22589)
cccggttcgccaaaacgcatttccctaatcagaaagtaaaaaaaaaaacgtttttcacccttcttaatctcttaaacggtctcaaatcttatcattgaacccattgattattgaagatcttcccaatacagccactatcaataattagggaaattttcaataaacccataaatcatggaaccttaccaatgcaatttccatattcatagcactcaacttcctctcttacgttactatttaatcagtcttctacctattacttcaacatgaattgtttggaaattattaaccattaagataattatgattaagttttattgttgttatggagttgtatgagtactgttttgaagtttttaagtgttttttttttctttttctattaatgaatttgagttttatttaaagttttttttctattaaattatgttgcttcatgtgagtatgtatgaatttatatgcaatatatatgaatttctaaatttggtaggatcttacgatccgtgttacgatcccccgattcacgatcttatgggtcctacccgatcttacttaggatctcgagtttgtctaccttgcctgtaactgaagaaatgattgtgctaaccggaccttttatcacctagttctaagttgaagttaaataatataattatctagtcaaattgagtcagacatgtttgtttacatgaaatatctgtagtcagtacaacatttccgacctttagattaggtcacagtattaagaagggacacatacttttcatggagattgaatcaacgttgtaatttactggattgtttatggaatttcacaacatttacaatatatataaaagggcttcttaaacacttccttttcttcattcctccgccctaattaatgtctatcttacattaactctgctctattattttgttccttttttctggtttataatactattttttcatcctgcaggcactgattgctttgaaaaagggtgctcaacttct

SEQ ID NO: 27930 - DNA, 665 bp, Medicago truncatula
  Intron number 1 from transcript AC233676_6.1 (locus AC2336 76_6) derived from phytozome v7.0 (chr-ID AC233676; pos 23 678 to 24342 reverse strand)
agaaaagtacgtatgaaaaaaatatatatgattttatcttaaattttaataattatgaaattaataaataatattttgaatctattatattttgttttgtgttgattgattttatttccaggagtgtcgtaatggcatgatttagtcaatgattgataatgttttatatatttatttatttgatagttttataatatattttcatctattattctatttattgtaatcatagatttcttatgtagtgtgtgtacttgctatatttttgttgaattcctgaatggtatatgatgtgttataagtatactaacttttgacaattctaaactaaagaggcaattattaaaaaaaaaatcattttatatgaatttcgaagataaattatttattattattaacatttagaggttgaagcaaattagcatttgaagtctttgaaaataacatgaggaatttttttattttttttttatcaatgtcatttttgagtttgtttttgatgcaatcctaattttttattttttacaacatttttggtatatgcaaccacttggtacaggtaatagagcaaatagatgtagagatataaatgctataaaatattaatgttttcaatgtgctcccttgtttttctactcactttttttttttgtaatacggtgtag

SEQ ID NO: 27931 - DNA, 551 bp, Medicago truncatula
  Intron number 3 from transcript AC235567_36.1 (locus AC235 567_36) derived from phytozome v7.0 (chr-ID AC235567; pos 135421 to 135971)
gtagcaaaaacagcggcagagtacggcaatacagtgtaatatttctttgtaccaaacacttaattaccatagcttataaggaagtatttgtaattataaataaattcttaacatgtgtgaagtaaaataattttgtttataaaaaggacatgatggagtatctcatacatattaaataggttttgaatcaccaataaaatgttgaaaggttgacaacatatctcttctttaagaaaatattatgagtttgattcttgaaatcgtctatttgaaaggtagctcaatcttaataaaaaaaactcagatattttaccatcaactttaaaattaatctcaaaaacttaaacctaaaccgtaaaaatatcttgtggcatctattaaaggttaagtagcattccatatgctgtttcttgaactattatcaatacaatatttttagttatttgaaaaaagttgatcatagtttttcacaatattgtaatgttatattgtggtgtttttttttttttttttttttacagtgagcaagagaagttgtatagtgtgggaat

SEQ ID NO: 27932 - DNA, 947 bp, Medicago truncatula
  Intron number 1 from transcript AC233070_18.1 (locus AC233 070_18) derived from phytozome v7.0 (chr-ID AC233070; pos 86453 to 87399)
ttgccagagaagtcaaggtactccctcaatttcccccctttttcactctttgtgtttttcattatgcatgtgctaaaagtgtttattgtattgtacaaattggtcatgaactaagcgtaatagagatgaggatcttgcgttggatgtgtggtaaaattttacatgatgatagaattagagactagagagtgttggggtaacacctattgttgaaaagatgtttgaaatttggtttaggtggcttagagactagagagtgttggggtaatctggagttcgggtgtgaggtatgtatggtttgaccaaaaattgttccgcacaggaatcaaatttgggttctctcgaacgatacgtcctttggtgaaactcattaaccacttgagctcaatcactttgttttggttgttgtacaaattggtcatgaagaaggtgaagacatttttaattcaactcgcaagtgtaattaatttggctttaaatagctgctgtggtatggttatggttatgtcgtgatcctaatagcattttataaataggtaataaattttcaaagactagacctaatagcatttttctggaataggattgtatatttaggcaatgtttggttaatagcttaaataaactatgtatacaatagcttatcttataagagtttatgtatataagctctttctaccctcacatggagaatgaggctaaattacatatattttctgaataagttgatacttggttccataagttatatatttggggctttaaaattaagtagaaaacaagtaatgagtaaaaatcataaaatatttctattaacctgtttgatcacttatgtaattatttgtatcataaaataagtcaaaataagctcttgttaacgcccctttatcattttcaaatgttcagcggcatccaatagatttttgatcttttttttcagagtaaat

SEQ ID NO: 27933 - DNA, 798 bp, Medicago truncatula
  Intron number 1 from transcript AC225518_14.1 (locus AC225 518_14) derived from phytozome v7.0 (chr-ID AC225518; pos 44294 to 45091 reverse strand)
ggtaaatcttaaattcatcttttgttttactaacatgcttgatatgcacttgttgctttaatctcagataccccttttggaagtaaattttagattcattggtatgtttatgtttggagttgttatttgctttcttttgattatgaaatgatttattaccaagacaaagaaatgaatccttattttcccaattatagcttatcgcatctgtcattacaattttcctacaccttttttccttaagctagttgaaaagaggtctgcaagagtggtaacattatacttgtgacattttcctatcacatttgtcacatttttctgtcacatttctgctgatttgatttgttcaaccaaagtcgaatagatgcacccgtcccctgtacactccgacacttccaatcggtgccacattgctggcttaacacctgagtgtgaagttgcacaagaaaagccaaaatgaggcactctctaaactttttcaacttcaatggggtgtatccactttaattattattcattaaggtcactatacctggtcaatcaatggtggtagcttagctactataatgagattgagcagttgccaaacaaaattgaagattatgaaaattttatatgcaaaagacaaaagacatatactttatgaggattttaaaacgtttcgacatttaaatttttttttttattgaaatctataacatgtcattatatatttataagcagtgaaatgagtttactcatacaattacgcacgtatttgcaggaggactactggccctacaaggcgatccactaaag

SEQ ID NO: 27934 - DNA, 849 bp, Medicago truncatula
  Intron number 1 from transcript AC233109_12.1 (locus AC233 109_12) derived from phytozome v7.0 (chr-ID AC233109; pos 52918 to 53766 reverse strand)
ttatacatgtaaatctttgttccattttcttattcattgccctccagtttagaatgtttctctatttgtctcattctttcaagtgccaaagttcccaccaactctaatatcaagacttttacttgggcaatggtaattgatagaacataatcaacaaaagacaaatgatctccctacatatttacaggcctaaaaaatgatgcttcttttgatttttaggttattttcagagttttgggggaaatgacagtctttgcgtacttcatgcctttcaactttgcagtttgcacaattgcatgcacttcaataattttcttctgtacttttattctgaaagggcgtaaacactcgaaatgtttgtctctgcacctattggtgtgagtttggttttttttatccgtgcgtatgtattaaaatgaacaacatctaaacctacaatttttttggatattatgattgtcatatgaccgcattctgaagttatggatgtttgccaactagcatgaagataatctagatagcagtagttctctcctcatttcactgtttggtcctctgtcgacaactttgatggatgcaactaattgtttttgatgaattgacatgatttgttaaaaagacttcagataataagctgaataagtaatgttggataaattatttttctaataatgaacttctgtgtgtatttctcttattgcatgtaatcacgtcattttctgaatttgattagatgataacatcaattctttcagttttgttatgtgggacgttttaaatccctgagctgtgttatctgtgcttctattcacagtctggctctgccaaccttcggcgctcaaccaggga

SEQ ID NO: 27935 - DNA, 351 bp, Medicago truncatula
  Intron number 1 from transcript AC233082_9.1 (locus AC2330 82_9) derived from phytozome v7.0 (chr-ID AC233082; pos 65 711 to 66061)
gaagtgaggttctttcaaaacaaagaaaaaactccttgatggaagtgagttacgtgacaattgcttccccctgtcttgtcttttgtatttatttatatgatttttctgttaaattttgatgcattgttagtgtaaaaaatgtatacagtcaacagattacaaccaattttcatttatgtcaacaaattgcaaccaattgtcatttttaatgatttaaaaattatgatcgtttgacagtgtacaaaatctttacattgacaatatatatgaattcaatttagttttttttttttttggttttatcttctattctaaggttaaatcttgattcaattcaactattatatacaa

SEQ ID NO: 27936 - DNA, 965 bp, Medicago truncatula
  Intron number 1 from transcript AC233100_17.1 (locus AC233 100_17) derived from phytozome v7.0 (chr-ID AC233100; pos 66364 to 67328)
cttcaagcttgtaagtttatcaagcgacagaactgattgttttgtggttatccacaactcttcgaaggctgatcagcttgcctaaccctttaggcaatgtttcaagattcatgcatccattgagtaacaaaacttgcaaatttaggagtttgcaaatggaattgggaagttttttttgtttttgcagttattagaaagaacgagaacacatagggaagtgttttttccaagtgaaattctaataggggctctgttattttgagttgattaaaatatgtaacatgctgaatagctcttgctcttaagattgttatcaactttacagcttgtgacatttacttcaaatattgaaggtactatttgaaagaagtatgctatttaatatgaaatgaattgcataagtaggcgagcaaagaaaataaactcgagagttcaatgtagaggaattgagggaaagttgttgattttattttattttttgaaaaagttacaaaatgtttattactatcacccctgcaaatgtttcatgatgattttattttctaaataaattttcaacatctaattagtagtgaaatggtctatggttaatcaatgctcgatactttaatgatgcatttagattcatcttctttgattttctttctcgtgttcatcctgaatcacggacttttctgcttaaacatttgatctttgattattaatatgatttctgatggatgtcacattggtatttatatatgcacactcaattgtgagcttgtttaaattgaatgggtgggcgtgtgcaagctctactgggtgttcccaagtcttataatactaattattatggcgtgccagaagatggaccgtctcagccttctatttctcatgacctgtcttgtttgcccaacgatggttctgttaacaataccaatacaaaatagaaaaagacatagtaaagtttatccattacgggaaca

SEQ ID NO: 27937 - DNA, 542 bp, Medicago truncatula
  Intron number 2 from transcript AC225530_6.1 (locus AC2255 30_6) derived from phytozome v7.0 (chr-ID AC225530; pos 48 637 to 49178 reverse strand)
attcctccctcctaagttttgtaacaatttctacggtaatagcctgttctttcttgttttctttccctattcttttaaatgctggttcaccactgatattttgatgattttcaattgtggcagattatcattggccctcatttttttgacaaactaggactgcagcaacaatgtggctctaatctttagcaggttactaggctgttgttttggaatcattcataatgcttgggattatgtttaagtagtatatacactttgcaaagtgtttatgcttgatttatattttctggtgtagagttcataaactgaagactcaattttcacggtttgacgttgttatcacactcccaagattataggaaattgattcatttactcggccatatttcaagtgagttttgttacttctgttccgattgattaatgttagttatgtatatgacttgaataatgaaagaaaatggatcatggttacgaatatgtgaagatttggaatcgagatttgaaagcctacatttgtgacagttaaggacttggag

SEQ ID NO: 27938 - DNA, 786 bp, Medicago truncatula
  Intron number 1 from transcript AC225530_6.1 (locus AC2255 30_6) derived from phytozome v7.0 (chr-ID AC225530; pos 49 263 to 50048 reverse strand)
gatgtaattggatttatggtttttctagattttgtcgagcttctaatttattggctgaactttgatctatttttgagaggtcgtcaactggatttaattgttgatcacactaatcaaaataactttcgtcccatacagcttattttctctcattaggaagttcacttctcatttttgggtggtcttctttaatcataccttgagagaagggtagaatgtatttattggttgattaaggttgatgtttctaataatatcaaccttttgaaactgtggattgctcatctccctcaattggatattatcttgcatctgcggtgtttaggtagcagatagcttagtcctttttccttgtttttattttcctattgataaaaaaaaacacacacaaccaggtaaactaatacatctatacattttgtaaatattgattaatcaaagatcagatatattgtttttcaaacggtagagcagatatagtctctcaaataagacaatccaaatagactcatgatatatttgttactaagaaagctatattctcttgaatcccatcagattgatctaaggatctgtaataacttaaagctatcatttactgtggaaactttgcaattaattatgcttctatccttctcttaatccgttagcttcttagatattttgtttaaattttaattttctactcaattttaatgagtaataaaacattttatttatcctactttattgtgtaaaattttattggttaaaaaaatgcattcttatctccacttgtaggtataa

SEQ ID NO: 27939 - DNA, 592 bp, Medicago truncatula
  Intron number 1 from transcript AC233655_14.1 (locus AC233 655_14) derived from phytozome v7.0 (chr-ID AC233655; pos 100619 to 101210)
aagcaaagtgtcatgccctagaatagaattattagctatccatgaataaatttttctttcagtattttcgttttctttttaggttagggtttttcagtctgcactttttatttttatttacttgctttcagtctgcactttgtatgctgcaatcgagattttgctttatggtaattaatttggattatctttctttttttcacaccatgtgcttatttgttttttgttaatcctatcttttcctgtaaaattattaccgaggattaagatatgtatgtttcaaattgattttacttgacgtctctaaatgttttgtggtattcatccatttttttaattatgtgatctggtatttgattgtagtcaacattggcggagtagaacaggttgttacaattgtaactccgtttataatccccaatatcttagatcagtttcacaattagattggaataatagaagaacctctatgataacacttattttttcattgatgttgattgtaaacttgttatcttgtggtaactactgcacaggaatcttttatatatttgttaatagatggtaatcaggtttcatagtctgcatttgg

SEQ ID NO: 27940 - DNA, 505 bp, Medicago truncatula
  Intron number 1 from transcript AC233668_42.1 (locus AC233 668_42) derived from phytozome v7.0 (chr-ID AC233668; pos 175575 to 176079)
gtagggagaatgttagccatgagattagacttgaaatttttttaaccctttaatcaatcctttgaactacgtaaaaaaataagtatgtattttctccttacctttcaaatccgatcaaaactccataaaaattgttgaatttcattgtgtatcgagagataaccgatcgggtcggaattcgggtagtaaaaacccgttttgaatgagacgggcgaagaagaagactattaaaaaaaataaaaaaattggtgcaaaaaaacaaaatatggtgaacaaagaattgaaccgaagacctataacacaaaaggcatcacaaataaccaaccacaccacgcatacacatttgcattattaggattttgattttatttaattgttaaaatagttttgaatagatcaacaatttaattcattttattatgggtttttgtatatagcaaatcttacatatacacgagtttaaataaaatttattttgacacacatacaatttaattcattttag

SEQ ID NO: 27941 - DNA, 1045 bp, Medicago truncatula; identical to SEQ ID NO: 27891
  Intron number 1 from transcript AC235006_11.1 (locus AC235 006_11) derived from phytozome v7.0 (chr-ID AC235006; pos 42955 to 43999)

SEQ ID NO: 27942 - DNA, 961 bp, Medicago truncatula
  Intron number 1 from transcript AC233663_5.1 (locus AC2336 63_5) derived from phytozome v7.0 (chr-ID AC233663; pos 57 015 to 57975 reverse strand)
tggcttctcagcatcttcaaaaactttctttgacggtgagatattcaagttcaactctctattttttaggctgttaatttttttaaaaaaaatgttataattaaactttttaatgaatcatcgttttctaaatggttatctgcaaatcaaatttacaaaattaaactttactttaaactacaagttttacttatattaaaaatgatatgcctacatatatcaagaaattgtcaaataaaaacttattttatttattattagaaaataaatagacaatttagcacgataaactcacattagtttataatgatcttttttggtggtgagtttataatgatcttgattgataatttagtatacttaactattaattattttaatttttcttttagcttcttaaatcaatttttagaactaaaattttaaatttatgtgtataataaaaataagaatctataatttaactcaattggcaaatcccggggtagttaaatataaaggtgtaagaatgaatcatcaatctctctttaatttaatctttaaactaacatttcatggattgaatggttgttcaacaaaagttaacgataaggtagataatgaaaaaaaactatatttttactttatatttaaatttcttcaattagaataatgagggtaatttaaatttcttcaattagaacaatgagggtaaaattgtgtgtgtgagagagagttatattataagtatataagttagaaaaactcaaaacgatattttaagtaacatgacaactttattttaatcatgtgagtttatatgctccaagttactcttaaatcatagtcatgcattgtatttcaactaaaataatgatcaagtcctgcattgcagagtgttatatgaatggcgaatttgttaaaatttcatatgtaaaattgtgatatttgtttttcaatttttcaggttagaaattcacat

SEQ ID NO: 27943 - DNA, 960 bp, Medicago truncatula
  Intron number 2 from transcript AC233577_35.1 (locus AC233 577_35) derived from phytozome v7.0 (chr-ID AC233577; pos 160719 to 161678)
attccatacaatttcacagatcaaccgcaaatgtatcgcttattgtttcttattctttgcactttaattaattgtatctattaatttcacttcttatgttatcttcattttcataccacaattctcttcctacaattgtttgatgcatgagtttaacccacccgtgatctaaaattacggtttcaaagaatttcccagaatatattgatatgctttaaaattgaaatccttgtataataatttcgctaccagtaattttgaatcttctgctatagcttatcctcccgtgttgtgttttgttgctcgtctttatttttgctacatgcatttcgatgtttagtgtaatcctcgagaattacatgtaaacgggcacaaactgcgccgctaaccctttctagatggcaaaaccaatcctccgaaattggaaccattatcagtgtggagtgatgtggtctggcattatttttcctcgtagcattacattatagttggcctaggcctcatgttgagcgaaaaaagatggaatccaaagttaggaggatagaactgccaaactagattgttttaacgactttcttgccgaatggcatctgggtgtggctcaaatggtgaagctaaaaaatatggtttttggtttaggtaaaagaagaattcacttgagtgtggaacctgtattttctgtttctttttacatgtttttggctttctatttcgtaatgtttgattttcttttatcccgaatttagttatgtaacatttaatgtttgatttcatcctaaaaggtcacaagctcattccctttagtaaattggaaaagcaaacatctcttggcttaggaaatatagaagtttcgtatctgttcctgatttactatttgtacagttatttttttcttcttcaatttttgtttttgtttgttgtacaggttgtgcttgctgcatccattgtcggcaaatctgg

SEQ ID NO: 27944 - DNA, 325 bp, Medicago truncatula
  Intron number 1 from transcript AC233685_39.1 (locus AC233 685_39) derived from phytozome v7.0 (chr-ID AC233685; pos 169189 to 169513)
cagagcagttgtaactaataattattttttgattggattataagctgatttcttaggccatacaaggcttgtctagatttacttatttttgagcttatgaaaaataacttaatgtaaataaataagcttttatgttaattcataagttctcacaaacaaaatttgtatcttcttaagctgttttttcataaattactttgacacacctacgaataatacacaaaagcttatttctttgcataaattaaaaaataagtcaatccaaacaggctcgtagtgtgttttgaaagcgagtgcagctggatttgtagggttaataagggat

SEQ ID NO: 27945 - DNA, 537 bp, Medicago truncatula
  Intron number 2 from transcript AC232874_4.1 (locus AC2328 74_4) derived from phytozome v7.0 (chr-ID AC232874; pos 15 147 to 15683 reverse strand)
atcttcataccgccctcggcaccgctaaattgcaggtaattcatttcatcttagagctgaaattcaattcaatgcacatatgaatattttgaattaggtcatgaactaacattaaatcaatacacatctaacctgcagtcattaaggctttgtttgcgagttcagaagggaagggaggggaagggaagggaaggctttgaggggtggaaaatatgagggaaaatggagaaatctttcaaaaaatttaaaagagtagttttttttagagaatgatataaattaatgcatatgattaatatatttttaattttaaaaaataatataacaacatagattaaatttgaagaattcatataaaccctccaaaaccctcctccactacaatttttttagtttcccaaacgaggagggtttagtattatgaagaaaagttaacccccccaaagccctcccctccaaactcgcaaacaaagcctaaagagagtagtgacaatgataatgattacgctgttgaatttgggttggaagtgcagttag

SEQ ID NO: 27946 - DNA, 845 bp, Medicago truncatula
  Intron number 1 from transcript AC229695_7.1 (locus AC2296 95_7) derived from phytozome v7.0 (chr-ID AC229695; pos 30 267 to 31111)
actcatccaccgccgtggcctcgccgcagctgcaggttcttttttccatttctctatttacttaatcaattctccgatcccatcaaaatctcacaaattaaactcaatttgttcattccaagtaattcaaatccaaatccatgtctcaattgcatgttacaaagcacgattttgaaactgaaattttattttgtttcgaattgtcctgtgattggaataagcgtgattttaaagctgtaatgaaatattagctattaaatgacaagggagaaagggtctttgggtggaggaaaggagagcttaatgtttatcaatggcgaataaggtttgaatttcggctaggagaggtactacatttagtccgacatgtctgtctcgaatccgtggaggtaacttatgggaaacaataataacattaatctagttctacaaacattacaacagattgagtggaattggacccgaatctgtttagcgaagtcttggattcggtgaagccttatgaatggaaaaaatgtggttgagtgtggagaccttgctaatggtggttagatagattcgttagcggagattagttttcgcaccagtcgttggatgcttcaacttatgatatggttaatgaaaaaataatctagttttaaatcttggtgattttcgaacaaacaattgactttggttttggatagattaatggactaatgatataaggacgaatagatgtttggtcttgctttcttttgtttttattctatgaagaagttgattttgtgtattgtagatttgcattttgtacacaattttgatatatgtgaaatggcttcatcgtttgattattgcagatcacc

SEQ ID NO: 27947 - DNA, 1023 bp, Medicago truncatula; identical to SEQ ID NO: 27925
  Intron number 1 from transcript AC233657_11.1 (locus AC233 657_11) derived from phytozome v7.0 (chr-ID AC233657; pos 43703 to 44725)

SEQ ID NO: 27948 - DNA, 664 bp, Medicago truncatula
  Intron number 1 from transcript AC233680_10.1 (locus AC233 680_10) derived from phytozome v7.0 (chr-ID AC233680; pos 56280 to 56943)
gtggttagaggttgttataggtttatgaaagagagagaagataatattggaaagttgttattctcattagattttgaaattgagttacaattatgtatttatacacaatgacttagagagcaagtatcttgtaacttcctaacaaacttatccaaacaaaacaaactaaactcttaagcatttgttaatcatgattatggattaaaacacacaaactaataaattcaaccgctattttttcaaacactgcaaattcaatctattagtttatctactatcaactatcgactaatttatcaaattggcccttctttgtttatcctttttttttccccactgtcacaaaactccacatgtataattatattgactgtagacgtcatagaagaaggaagaaacagcggcaagtccaatggttttgtttgctggtgtgactatttcattgtactgtaaacgtgtacttcacaattcaacttggtaataactttcttctccaatggatcaatgatatgccactatacgggagttatatttaattcagttattcaaatttccattttgggaccaacttgacaaaacttatacatcaatgtttatttatttaaatgcagcatttgggttgtttatgtaatccttcaaaattaaatatcaaagaaattcaacc

SEQ ID NO: 27949 - DNA, 808 bp, Medicago truncatula
  Intron number 3 from transcript AC234702_6.1 (locus AC2347 02_6) derived from phytozome v7.0 (chr-ID AC234702; pos 46 599 to 47406)
ttaaggtaatttgaggattggagaacaagatttctacaatatgtctgaagctctaattatctttttttcatcactattttattttcttttttgtttttcatttggtggatataaaggatactaatgtttgtttacacaaattgctatttctaactcatatgtatattagattctatttctatttgatgcatcaaatgtagtttctttctgaataaactaatgaagattttattgaaatagaatctaaactagaatgtgaagtgtgttacacatgttgaaaagtgaaaaatgcaaaattgaaaagtaaaatggatctgttgaaattgattttatgatatgtcgcaacttaccatactgtggtctttcagccttataatcttgattaaaatactgataaatgttgtgattagttttacaaaatttaatggtagattttaagtttcattagtctgtcataggcgtgcattcttatctctttcataaattttgataaactggtgatttacaagttttaatattttttggatctgttataagtatattgtgttattttggttcattggctttgatgaattcaaattgggatgggctcattgcgttgccaatccgttaactcgatttgtttcagctatattggtgtgctatcaaaaagtaagaacacacggtattttttgaagtgatgcttggcttaattgcaagatttctattggttttactattttgtaagttgtgtgattgaaactctatgtgatccttttaatatttttaaacagcttgtgtggttcttggttctggctaagcttcaaaa

SEQ ID NO: 27950 - DNA, 632 bp, Medicago truncatula; identical to SEQ ID NO: 27766
  Intron number 1 from transcript AC233100_51.1 (locus AC233 100_51) derived from phytozome v7.0 (chr-ID AC233100; pos 177822 to 178453)

SEQ ID NO: 27951 - DNA, 633 bp, Medicago truncatula
  Intron number 2 from transcript AC151525_3.1 (locus AC1515 25_3) derived from phytozome v7.0 (chr-ID AC151525; pos 65 33 to 7165)
tacagagtaccgagtgatttcatcatcgtctcgttggttaaattctgagttttaagtcaccttaactttagagattgacatttgtgattgtcccattaagtgtgggtgaacttgtgttttatagcacaacatgattctgggttcaggttcttttttcccttttgcagtgtctttgacattttaaacttatctttagtttcgtcctctcaagcactaattaacatccctcctagtggaatttctgaaatgcatgcttccaaactagtcgaatttacaaaatgatttattacataatttagtttaataatttcatatcatcacatgttattcaaaaaagcatacacaaaagtgaactgatagctacataaaaagcaggatttcaatttaatttcatatttgggaaatagaatatagtctgggcacaagtaattaaaccaatagatgatgtcctacatgatttttatcacagcagacctaattgcaaatgttcgagcctaggatatattgaaaatttgtgatgcatccttccctctcccccctttgttatgatgagttttccttcaaaatgtgtctcttctgatcttctcagttgccaacccctactcatgtcaccggtaatgatgcaggttttac

SEQ ID NO: 27952 - DNA, 654 bp, Medicago truncatula
  Intron number 2 from transcript AC233100_59.1 (locus AC233 100_59) derived from phytozome v7.0 (chr-ID AC233100; pos 236776 to 237429 reverse strand)
gctcttctttcggtatcttcttttctctgtcattaaaatccattctgattttgttgctgcttatgaacaaggtttaaaatcacagttgtgttgcgttttttatattttgcaataattataatcaaattttggctgtcaaaatgtttaacaaccgcttttctaaaaccttccttgtaaagttgttttcgaaaacaagttaacgaaaactggaattcttaaggtgttagatttgcgtaataatctttcatagttcatacaaccatctggatgataaggatttatagtgcatgttttgggattgacgcgcatttcttaactgtttcagagttaaaattaggcaggtgaaaataggggcagattgtagttgaaaatttggaacaaaaatttatttttctcttgcttggtgttttaaataacccccaaattgttttcttctagctatgcttctgtagcttgaaagtaatttttactgattgttttgccaattttctattttcacgatgttttggatttccttgtttgagcgtatctgcagtagcgctgctaacacttctgtgatgtattgatttccatggtaagagttagacctaatgatctttgatgtttgtacttgcaacaggctattaggtgataagtcacccttctctcaacaaa

SEQ ID NO: 27953 - DNA, 189 bp, Medicago truncatula; identical to SEQ ID NO: 27920
  Intron number 2 from transcript AC225519_18.1 (locus AC225 519_18) derived from phytozome v7.0 (chr-ID AC225519; pos 76850 to 77038)

SEQ ID NO: 27954 - DNA, 710 bp, Medicago truncatula
  Intron number 1 from transcript AC202596_6.1 (locus AC2025 96_6) derived from phytozome v7.0 (chr-ID AC202596; pos 30 760 to 31469)
aacgtgttaccgttggatgtgcggatatatataggacggttgaaaggagtgttggagtgtttttgaggacatgctgagtgctgggtttttaccgagtaatgtactttattcacatttgatacatggttatgcgagtacaagtctatgtgtcctggattgtctgtttattcgtcgatgattcagtatttgtgttgtttgggaaagagagatgatgatactatgcagaagggaaatgacgatatatagtatgcatttcagatggcagtgcttgttattatttatgtaaaattgctgttaggtgtttgtttgtctaatgacgactgtggcaatgttcttttttcgttttatctgttaatgtgtcattgattgaattgaaccttgtttgcaatcttacgatcaatatgcatctatttgagattattattttaattcacttgatgcaaattagtgaaagtttttgttaatgagttttgtttttcacatgtgctctgaaaaaacaaagtgttgtatgcatcagagacaatatatgtttgaaacttggcttagaatgtggattgagatgatattttacacatgttatgtaggtgcttgtcaacattttactcgattgaatttttttaatgaaaattgtatcaaaagattatgaagaaattgttaacatctgtcttcatacagatcaagcagggaggttcaaagttgtagatatagcc

SEQ ID NO: 27955 - DNA, 750 bp, Medicago truncatula
  Intron number 1 from transcript Medtr2g041290.1 (locus Med tr2g041290) derived from phytozome v7.0 (chr-ID MtChr2; po s 11315016 to 11315765)
aattcagaaacaaatcgcataggtgagtatttttagaaagaagaaaaaaaagatttacaatagttttcaaacgcatttagcagaagatatttttgactgaacatgtttatattctatctaactatgttcatcaaggttggagaaaatatatcttcatttgcatatgccattttttagggtacatcaattgtgcttattcttcttatatttttcatgtgtgcgtgtgattttatctcgatgtggttgtagttttgtgtcattgcttcttcctaatcctttgttgatgtgtaaaaactactttttgttgttttatttggagtaacaaagtccattttgttttgggactttgagattctatatataattgaactgatattttacaaagattgtgttatgttaccgggttctatttgctttgatgcattttattgacctaatgttctgcttactcaactaatttctaggtgttttttaacaatcctgacgggttactaaattagtccgtatcaccgttcatctgcctatctattatttttgaagaggtaaatttttaaaagtttcatttaatttgctgcagctcctatcatcattggatttctttgcaaggcaactcattgattttctttcaagtgatcatttcatatctaattacttgcgcagacctagactaaccatctctagattgtaaaccgtgatctaaatcttagctaactgtgttttgcagatttagtacagctaattctttaacta

SEQ ID NO: 27956 - DNA, 409 bp, Medicago truncatula
  Intron number 1 from transcript Medtr3g009960.1 (locus Med tr3g009960) derived from phytozome v7.0 (chr-ID MtChr3; po s 1610491 to 1610899)
tgcgtcgcagcaaagtccactccacaccacacgaggtttgattctaccataaatcaatttcatttcaaaattctttataatcaatttctgttaatttcagctcattcaccaaacggttattttgcatcaaaattgttcaacaacccctaaattcaccacatctactttcttacaacctctttcttttcttaccttatgattcttcttcttcttcttcttcttgttagtttattactgtgttgtcaattagcggcaactctatccatcgaacaaactgtttttttcttcgcaatcatttgttagaaacctaagccataatagattcagattctgactatttgtcaattgatacattttttcttgtttgtatcaaggttgtttctacccaatccttactgttatattactc

SEQ ID NO: 27957 - DNA, 515 bp, Medicago truncatula
  Intron number 1 from transcript Medtr3g124360.1 (locus Med tr3g124360) derived from phytozome v7.0 (chr-ID MtChr3; po s 31513820 to 31514334)
gaccacttcacataaaggttgcttcaaaattcaaggttggaaccaaatatttgtctttttatttaagaagcttttgattaagtaatcttcaaatcatgagggacatataatgtaaaaatcacccattctaatcataaaatttccaaagtatgggtttaaacattttacttaaggagacaaaatctctgcattatcgtttggatcaatcaattatttattggtctagttatacatctcgaaaaaataaaatataaaagagtagtggtgggatttatatattggagtgattttaatctacactcctttcacttttacggtgaaactctttaaaattacaataaataaaataattaataaaattattgatccctatagaaatatcaaatattatttttaatttctaacaatgacacttcaaatattttctattagcattttttcttgtttttgagttaattcatgttttttttttttttttttttttaaattgtaagttatatttcagctagtagtgg

SEQ ID NO: 27958 - DNA, 575 bp, Medicago truncatula
  Intron number 1 from transcript Medtr1g042300.1 (locus Med tr1g042300) derived from phytozome v7.0 (chr-ID MtChr1; po s 9650385 to 9650959)
cttcagtattattttcttgccttaactttatatatcaagctttgctagatggtgatttttgataggctttcccccctccctccccgccatccaaacaaacttgagtatgtgtgtttgtgacagaaagaaatattagttctatctgtaatttataatgagtgattggttgatcaaatagggccttcagccaaaattcaaatgggttttcacttgtattcaaccaggtgaaccgaatgttgcacggtggttagtctcaaagtttcttatcttgtatttgtgcgtgtgttagacatgacctaccggcatttaaaacattgacttgttggtgtttctgtatacatgattgactcagtgtactatacttggtgctaaatggctataactgaaaacatataatagaaaatttctaactattttgatttgccaatcagttagctaagtaaaaaaatatcaacatagggatattggattgaaagaataatctctaaattttgttcatggtttcggtccgtgaatcataaaaggaggatctcattatattcattttgtttaaatttttcaggtttgggagaatt

SEQ ID NO: 27959 - DNA, 707 bp, Medicago truncatula
  Intron number 2 from transcript Medtr3g043280.1 (locus Med tr3g043280) derived from phytozome v7.0 (chr-ID MtChr3; po s 11696273 to 11696979 reverse strand)
aaactgtgtacgaacatagtgttgaaagataaaaggtattattttctaatttgtcagcttaagatgataggattttgtataagtttgataatgacttgaaagatgtctttccttatgcagtgagaatatagttgatgtaacactatggaaaaaatattccgtagctttatcatttaccatctatttaccttgagttctttgcttccattttgtagtcaatgacaaccgaaatatatgtaacaattggttaggttcgaggctgctcatcaacctacattatccggttgttgagaagtttaagacttagtaagtttgcattatgatttcacaatatagtgttagagtaaattattatttcacaatttgatttgattgttttttgactacgtttcttgaattgttgtcgtgaccttaacacttctcaagctcagagtcaaagcattagtctgaacttaagtcagagttcggcttcttctcaatgtattcgtacaacaatttttccaatctgtctcaggttaggccaattgttgaatttataaacttagtcaaggtctgctttttttatgcacaaacatgctttgaatttttttacacacaaattaaaaatacatattgcattattctttatttcacgtgcataatttgtgttaggatacatattgcatcactatttggaaagcaactaaattcaatcctaaccagttttg

SEQ ID NO: 27960 - DNA, 747 bp, Medicago truncatula
  Intron number 4 from transcript Medtr3g136510.2 (locus Med tr3g136510) derived from phytozome v7.0 (chr-ID MtChr3; po s 34471840 to 34472586)
gatactagtaagtttcctcttcatttatttaaatgtatctgtgatctcgagtttttgagcaatcttgtggttacctgtttaaccaaattccctgttcggtttatgtaacacttaaatcagatttgtttagatgtttcgtcatttgtttgaatttatgtattgtgttttcaagtggtagttgtagcctgttaaatcaaatgatccatgtggtttatatatcacttaaatcaaatttgaagcagtcctctacttgtatgttgtgagccttcacttcagctatgaatttaaagcttgtctgttgtcagtcatctgttcctgttttttgtgccaatattacatgatgaattgcacatgagattgagtttctttatcatattattgtgctggccgtaaactgactttgccctcttaacgtatactacatatttaaggatcttaaatgtagactttgtttcatgttaataagggtagctgtttcttggttatcacacacttgcatgcatcagtattttgggtactacgtgtaaattacttgctttcgcagccgttatgtacatctaggtgtcttatttacgacatagtaggaatctcctttcttcttgttttacttgcttttgtagtcgttatatacgtatcggtgtcttttttatgacataataggaatctctttcggtcttgtttgtgcctgttttacttgctatatattgtttttaacctgttatctttatattgcagtatccacgggca

SEQ ID NO: 27961 - DNA, 973 bp, Medicago truncatula
  Intron number 1 from transcript Medtr4g005180.1 (locus Med tr4g005180) derived from phytozome v7.0 (chr-ID MtChr4; po s 112466 to 113438 reverse strand)
aaagagctgaacgtgcctaactagagatgaatattagtgcacatatagtctatgattcttccttgtatttaggctttgtttaggtaaaaaccttaattaagcacatatagtctaaacgctttttatattagtgcttatgtataagttattctataacaagataaattcaattcaatttgtttttgtataagctataagttgttttcataaatgattcctaatactgatgccgtacaagacatgtgttgcaagctatcatgtactgactttttgaattctaaattctggaagaagacggaaagtctgcatcaactaataggggatcattacctatcaaagagttttgtatagcctttgcaatttcccaacttacacttttcttaggatgtactatgttttatgtcctatttctttgttctcatagtattaatataccacattacatattgctcctttatatttatcactactacttatgctaatatagtatgtttaaataataattgacattataactgatatcaaatactcgtctgaatattaatttatattattgatgtgttaagtatagattgttttctgataagctaatgaaattcagttgaattgaagagcaaaatgtaacacaatatgcgctacacatttgcagtgaaatatctattagagataaggaaccaatcatgtaacaaattataatagtttcgtatagataggagtttgttatgtggagtagataaggatgcattcagataagaagataagctagttgcaagatttgtggttatgcatatgtaaaaatttgtatccagaaacatatttcaatatgacatccgagcaaggaaatctagaaaactcatacctgcgatgaaggcaaactctcaccgttagctcgcctgtcttggttcctcagataatatgggcacatttgatgtacatagcactttgtgcaaagatcaagctgggattcattgat

SEQ ID NO: 27962 - DNA, 1004 bp, Medicago truncatula
  Intron number 2 from transcript Medtr1g117060.1 (locus Med tr1g117060) derived from phytozome v7.0 (chr-ID MtChr1; po s 24948226 to 24949229 reverse strand)
cgattgaggtattactaactctcttttttgtcagctaactactcaatgggaggtggtcaccttacaccattccaattatagtactgtgtttgtcttttttgacccatcctagctactctctctataaaaataatactacttactttttttttattttttatttagatttaatattgtaaaatttattgattaaatagttaaaattaatttatgcatagtttaagatttatgttacttatgccatccactaaaaaaatagtcaaggcttcattgaaaaaatatgaggggaaatcataatttcattacaatattttcttatttttctcttaccatttttcctgaaatcataggagctattcttatataggtttcaattcatattcaattattactgataaacagtggaagaggcagcaaagtcagatgtatcaggctcagtggactaataatagccaaacactcaaacttatccctctcctctacaatcttccctaattggaaacgaattaataatgaaaaagaaattacttgacatatttttactttctatcattgcagtaatcttgaatttatacaaagatatgaattttatgaaatcaaaataatataatttgtactccctccaaatttaaacaaaaatgagtcaaaaaaaacaagtatttgaaccaaattttgaacaaatacattaattttgtaacagaagactatcttaactgaaactatttttaactaaattttagttatctcttgattgaatattatattacaaagtattcttatatcaaatatcaaaagattaaaacaaaaaagtattaaatgaaattaaattggtcatgtatcatcccattacctttccaaccactagatttaataattctccttaacttagttgttgtccatgcaattgtcaaaaaagtattgtaccataacgatattttctctgttcatggtttatggaaaaaaaaacagggagtacttggagcaatcaagcttctaccttcaaa

SEQ ID NO: 27963 - DNA, 828 bp, Medicago truncatula
  Intron number 1 from transcript Medtr2g073800.1 (locus Med tr2g073800) derived from phytozome v7.0 (chr-ID MtChr2; po s 16721248 to 16722075)
tttacaaaggttttaaagggatcattgttaagattgtaaggtgagatggtttttttgtctttcttctgatgtgattgtaagttgtgatagttttagaaacatgaaatggttttaataacaacttctcttctttttcaatcaaatttgacaacatttcataaatatgagtccaaacatcttgaataaacttttgacttgtgatatagtccatttgagctttttgtatcttttttccattctcaagagatatttctttcatattctttttgtgctcggttgctccattctaaaagttatgattagttttcattcaaaagtaaggcaccaaagaatacttttaaattattttaggctcaaagattggaaactaagagaaaaaattcaacaagcaatgacaccaactataatatcccgcttaataattttatcagattgcattatcttctggtcgagattgagaagaattattttaagtaaggtcataagggtaattatattatgcatgtatatatatgtaccaaaccttctttcatcttctctcattcacatttttcactttctgaagaacaatactccatccatcctccctttcatcccggcatccctctctttctcatttaattcatcaattcatcatcctaaccccaatcaatccaaaatacaatcacactagaaatatccttgaagcatttccccgctcacttggccgagcctttccctcaattcctgatattgagaggttttgcaagttaagcatgattagtggctttgcatgtgtgaattattaaatccttatggtttgattgtgtgcgtagaagcaaggattta

SEQ ID NO: 27964 - DNA, 556 bp, Medicago truncatula
  Intron number 1 from transcript Medtr3g040240.1 (locus Med tr3g040240) derived from phytozome v7.0 (chr-ID MtChr3; po s 10976374 to 10976929 reverse strand)
actaattggctagtgtgtcgcaacaacatgccttaatcttatttgaacatcttttgcattttattgctcctagtggctttttaaaaaggggttggatttctttgaatattggttggttctatacggtttggattatttgaaaatagctaaaaaggtcggatttttccggtataaagaggaaaatttgcatactttatccaagaagatcaagttcaagtgcttttggtagttgaaatcaaaattcgttacctttaattttagttatcatttttagagacttaaccctcgtcaatacttattagtaatctcctagttgctatgttgtaattttggtgttttatttccttagatattgttgactttgtgtatcttttgtaatcttctttagtacgacttgtgctagaaaaattatcgttaatgaaatttcaaatttcactttagtttgttaaaaaatggatgcttataaattaggaatagtaataataaaatagcatagctctagcatccttttcggtttagatctgaatcttttgctaaacatttcagaggaaacaga

SEQ ID NO: 27965 - DNA, 1039 bp, Medicago truncatula
  Intron number 2 from transcript Medtr1g083880.1 (locus Med tr1g083880) derived from phytozome v7.0 (chr-ID MtChr1; po s 16677838 to 16678876 reverse strand)
ttgttaaggtatctctctgttcccttaccttttgttttgggttggagtggggcccttagaaacaattgttgcagtcaatagttgtttgtttcttttaagtgcataatactgactttgttatatatattgcatgtgtatcaagctatcattctattctataatcacaaaactaaatccataatgcttagactcactcacacaaaactaagtctacccgcaagtcaattttggataacatgtttttgttccataataaaataccactactactttcttggtttaatatggaaaacatagtttgcttttgtttaaatttataaacagtaacactactttggattagaggtttttttaacctttgaaacttcaacaaaatcaaggtggcacattgatttttggcaaatttactgtaattctaaacatgaacttgaatatcataaaaatccatttgaaaaatgatatcatttaactagtttttttctcaccaatcaccatgaaaccaaacacaaattttgttcatatcatgcctggaaaagcaaattgtacaccactaatggtctctagtgcttacagattttagtatcacttttattttatcttaccactacctgacaaaaaaaagagctagactagagcctatagttataggttatgactttttttcaattaaattaaattaaattaaaaactgaacattttgaactttgaacataacttttggatgtgactagacattgctgatcaaaatgttaaaagattgatttcctgtcaacttaaacctccctgcttgctgattgttagacatcaggacaaagagtttgactgtccaatgtaccttatcttctgattcacgcaaccaaccttctcattttggcatattttcttgttagctagaaaaagctcactttagcatttaactagaaaaaaaaaaatcacaagaaatactagtatattggttttattgtcagattttttttaatgatatgctttataaattattgcagttttttcgtgcaaacaattccatacaccctttatt

SEQ ID NO: 27966 - DNA, 515 bp, Medicago truncatula
  Intron number 1 from transcript Medtr2g037620.1 (locus Med tr2g037620) derived from phytozome v7.0 (chr-ID MtChr2; po s 10363285 to 10363799)
ctattctcttccataatcgcgctacgtaactcaaggtatgtttttttcgctatgatctagtgattttttggcttaatttgtcaaatttcatcactattcactttgggatttcttcatttctttgtcttaatttttaattcccctttttattatatttttcattagtgtattaattaatttttatgttaattccgcgattttagggtttattgctcaaatgggtcattgaatatgaagttcttgctatgaatatttttttagcggtttatgctcaaatgggttattgaatatgaatttcttgctatgaatattctttagtgttttttactcaaatgggttattcttgctattcatctttctttaatgttttttttgctcaaatgggtcattgaatatgaatttcttgctatgcatattttttctagtgttttatgctgaaatggtttattgaatatgaatatggtgattaaggaatttagtttttggttttcttgtagtgataggtgtgagtgctg

SEQ ID NO: 27967 - DNA, 969 bp, Medicago truncatula
  Intron number 3 from transcript Medtr3g067270.1 (locus Med tr3g067270) derived from phytozome v7.0 (chr-ID MtChr3; po s 15400199 to 15401167 reverse strand)
gaaacttctgtaagatatctatcccgcctggctcataaaattttcatttaatcataatcaattaattatgtctaacaactaattgaactttttaggaatcaatgtgggttatatgatccaagtctcactctttctacaccaccggccaaaagacaacccgataaagacattctatctgaagtcaaagctttttagtgaagacataagcttttcattaaactgattacatatcagtgaaccatagtagtcctaaaaccttatggtttcatatacacattttctctttattgattaggtgggacttgggagatattattatttagcgaggtgctaatcacgaaactttctaacatggtttcttattcttggtgaagagacatatatttgttcataaagtcccccattgtttcagtatttaatcaagcaatccttcaaatatggagttcttctatttgaatttgtatatttaagtttggatgcaaatccatcctaatttactaaatggaatatggtcttaataaagattcttgagaattatattagtagccattagaatagagctagggacacttaaatcttctatctagaatgttcacaacacttgcaggaacatccttcaaactacttattgtagctctaactatggactatatcacaacatcaccggcgtgtgaaattgaatctgaaggtatttttgttcttgtccaccggtgattgagtattttccaaatcaacctctttatcttgcagatcgattggttacatgaagcaaacatcatgacataagagagcaatgaaatttttgaatacattattggtaaacatttttctaactaacaaactaaacctatgatgacattatcatatatactagctggatatacttgaaggtgattctatccttttttatcccatcgcactggatgacactaccatatatacttactactttgtgtttcaatggaaggg

SEQ ID NO: 27968 - DNA, 848 bp, Medicago truncatula
  Intron number 2 from transcript Medtr3g067270.1 (locus Med tr3g067270) derived from phytozome v7.0 (chr-ID MtChr3; po s 15401237 to 15402084 reverse strand)
tgtaagtacatggatatctttttgttattctccatttgtatattcaacatgcatctttttgcctcttctttatctatcttccataggtttctacaaccaaatcaacgaattcttgaaggaaccacaccagcggtatgaaggcattccagaagaatacaataataagaatatttcaccaaattataggttttcataaaatttaagggatatatcttttcatggtactcattaagtttctattatcctcttcattttttcagctagaagcccataatatgaaagcaaatgatagatcttttctaaataaacaagtttaaggtatagcatcttgatgaagcccttaataaaaagttatttatgctgaacacaatgctcgcacatattaactcttactcctttaatttctacaggtttcctcccctcacataaccaaatggcctaagagaacattctaccatcatttctacattgacagctacatctattttattcataacatttatatttataattatacttttaaacctttattgtcttatgcaaagtctcatcattcataacattcttagtacaaaatagggttataaggctaaatatgtgtgtttgtgagtgtttacaaatattattaaatgaaaaaacatgacatacattctgagtcgtcacctgatctacgggatcgttttattttaaataaatttttggatttgcaaacctttttcttttgttcatatttattaggtagacttttgattcatattcatatttttagttgtattgtttgattaattgacgaccgctacaattatttataagcccgtggcatcgacacgggtctcacactagtttta

SEQ ID NO: 27969 - DNA, 769 bp, Medicago truncatula
  Intron number 4 from transcript Medtr3g067320.1 (locus Med tr3g067320) derived from phytozome v7.0 (chr-ID MtChr3; po s 15410811 to 15411579 reverse strand)
ataaacattggaggaatgttaaaaatatcaacttgttgatatatgttgtagtgatacttatcctagaaacaagtttcaatttgttaaaggaacttgctgattttttgtgtgatatgataaagaagactttacaagacatgtttgaatcatctcacaattcaagctaattttttttactcgaggtatgtgcaaattttatatagttgacccacctttatatgaggaaaatacattggtaatattaagtttttgtaacattgatgactttattgtatttaaccgataaaagattggttaaaataaattatttgatgggagataatgattgattatgaaggagatagagacaaaatcactaaaatcatatcaatgtactttccaaacacacgcaaccttttatatgtacatatcaatatttgcgtaaatgaatatgatattttcgtgtaagggaaagattatcacaatctaataaatagttttttggccattcaagttcactaattacactttcgatgtcacacatcgctgaaaaaatagtatctgaaggaacgatgtagatgaaaataaactctaacttttgaggtttttctgtctttattttgatccgtagataaagtgacaaacactattcaaatgtatacaaaagtgtaaaatttcttgttcaatataacaatatcaacatttggggtttgaaacaaatttgattcttgtgggtattttgggttcgaactagatctgattttggaattgttaaggttgcgtctttggt

SEQ ID NO: 27970 - DNA, 532 bp, Medicago truncatula
  Intron number 3 from transcript Medtr3g067320.1 (locus Med tr3g067320) derived from phytozome v7.0 (chr-ID MtChr3; po s 15411659 to 15412190 reverse strand)
agtaacttgcaggtgatcgagtttaagttgctgttgtgagtggattagctctcatgtgtgtctttaggtgctctgatacgtaacgggatgtgaattttaatgttgtctttctattccttacatattgcttaaagaattttcatgaataagatgttgatcgaatttgtatgagatattaatgatgaggccttgtgccaaagactgttttgattattgaataatgtccgctgcgaagtagtaaagactttttagttattgaatttcaaaggataaatagttatttattcagtttatgattttaagaaaagaagtgtgacattccgtttttgttaattactctgattaaataaatgaaattttcacgttgggaaaacggggtgttacactccacctctataaataggagactcacagcagtccccaaggtagaatctatctcttccttctaaaccctcactctctgatctctactgacttgagcgtctgagtgtctgcaggtacacaccctccatccgctcaaagaagcattctg

SEQ ID NO: 27971 - DNA, 940 bp, Medicago truncatula
  Intron number 1 from transcript Medtr1g122020.1 (locus Med tr1g122020) derived from phytozome v7.0 (chr-ID MtChr1; po s 26723087 to 26724026)
tctttggagctagcaacatcattaagttcttgcaggtaacatacattcataattcaccaacaaaaaaaatcatcatgttacaaaccaatttgcacattactaaaatatatttttttcaacatattggacatttatatttatgattttaaaacaaattcttgcgattctattgttgttgccttgtttatgactatgaccagtttattcacaccttcaaggcatgacattatcttgtaaaacaacaaaaaattagttgaattgtctcataacatttttaggggaacaaaatcatgggttttggtcaaaaagtggatggaaaagataacaaaaggagcatacctaattgatgggcatgcatgatgtgttgttttctaacttcctaacacatcaaagctatgcataattctctcttctttacattctacatcaaccaaccactacctttttatcttttacatgaaaataaatgacaagtcaaaataacattttgcatattgcttgtttatcttaatttctttctctctttagtccccctggccatagtgtaaccactatatcttatcacaagtcaaaaataattaggtgcccacattttggaatcttttcattatgtctaacgattatggtcaatggggcatgaacttgatatcaatttcgtagtttaaataaacggaaaaataaagataaaaattactagattgtacgcgcgtgcacacacacatatatatatcacgtaaacaaagtctgcatctgctggtctagggttctggatacatcactagcatgaattaccaggtttccaaagtaaaaaacttgagtgcatatctttactattcgtattgttattaacttataatataacactttttgtttcagttagtaaataacaaaaataaaattccattaatttttcaggaactacctgaacctcagagagcag

SEQ ID NO: 27972 - DNA, 507 bp, Medicago truncatula
  Intron number 1 from transcript Medtr2g125900.1 (locus Med tr2g125900) derived from phytozome v7.0 (chr-ID MtChr2; po s 30421800 to 30422306 reverse strand)
tttgttggtattgttgggaggctttatttttgtgtgtaagaatctttcaaaaaatttatttgtttgttgctgagaaatattgattgtgattcaacatattatgttttttagaaatgttttttttttaagaaagaatggtgtgtttagatggaagatttatgagaggagggcttacttttcctttttaaattacaaacactaaaaatatttattttacaaaattgctaaactgaattcacgacataaaaaaaccaccaaaatgactttttttcaaactttttgtggctttgattaaactgaattaacgacataaaaaaaccaccaaaatgaattttttttcaaactttttgtagctttgattaaagtgtattaaagcggaaactcaatagtagggataaaaaggtgacaaccagggtacccatggaaaaatggtgggtaatttaccccaaccaataaactttcacctttttaggtggtatccataaactatcttgaccccaccaataa

SEQ ID NO: 27973 - DNA, 361 bp, Medicago truncatula
  Intron number 1 from transcript Medtr1g031480.1 (locus Med tr1g031480) derived from phytozome v7.0 (chr-ID MtChr1; po s 7638341 to 7638701 reverse strand)
tcaaggtttgtttctatttctcactttttctctaaaatgattctctcttttttttttttttttcattctttttattgatattgacttctttttgtagtatgtaaagttgtgatctgtaaaaaggatcacaaattgaattctcaatttgaattttgatatattattttagatttttatgtatattgtttcctcactgtttaactaactatagacttctgctaaatagtaaatgtagtaaacagtttttcttcaaagaaatatttttaattaatatgcaaagcatgttctaatattctaaaaatatggcatgtttgttatgatttcaggatcctacatttactcctttggttgagcaagaagc

SEQ ID NO: 27974 - DNA, 1035 bp, Medicago truncatula
  Intron number 2 from transcript Medtr1g010140.1 (locus Med tr1g010140) derived from phytozome v7.0 (chr-ID MtChr1; po s 1604158 to 1605192 reverse strand)
tcgcgtttgaggttgtaggacgcataaccaaacaggtaatatgtacgacatgccaacatactgttaatatcgatgcagaacgttcattgtgtttttgttcagtttgttttttaattttatttatttttcaattttcatgctgtctttgaattgctgctgctgtaactttttttgttttgttttgatatatgttgatggttatatattacctccaaagatatggatttcgttagcatcatgcgagtaattgtttttttcttttttcttttaatcaacaaagtaactgaaaaacaagaaccctattagagaggcaccaaacagcagaacaaaactaacgtcagtaaaaccaaacagcatccataatattttcattgtatttaacatgataattacatttgttgcaggactggtatggcgtcttttgcttcttcttctgattatccatttgcaccaccattcaaatttcgttccatttttgtgaaccttccctccatgttgcgtttggtgcataactcaatgcgatatagattcgagtatgaagcatgagacagacttgagtgttaaagaacaagaacaagcaagagcaaatgatttatttttggaagcgcgaaagctttgtgtagatcccaaactatccaagtccatcattaatctatgtcacgttaatccattctttgagaccattcatggtaggtttctttttatctttctattgtaacctaatctcattttgttgccttaatcaatattcatttttattcttatataatgttaagatattttttttcttcgtaggaaattatgtatgctagaaacaagaattatattgatattttgtggactctacatgatgattttaaaatttgtttttgatgtaacactattttatcataaatcagatgcagctccaaattcagtatgtgaacaatccatccacaatgtttatccaaaaatgtgtataagatgtggaactaggaatgatttgttagctacatcatgtttccatcttttgtgtgtctaacctgtggaagcaga

SEQ ID NO: 27975 - DNA, 758 bp, Medicago truncatula
  Intron number 1 from transcript Medtr1g010140.1 (locus Med tr1g010140) derived from phytozome v7.0 (chr-ID MtChr1; po s 1605241 to 1605998 reverse strand)
tagttatacagtgtgcgatttggtaaagaacttgtaattgcaaatcgtgatttaagattcataaactcaaacaaaaatcaatgttcagaacaaattgtgacccatttggcactcaaaattgaagtaacaaatatagaaagagggtggaatggtagccatgatgctgtgatcttgcaaaatggtaggtggtaggtgagtgatgaaggtgagaagaaaaaaaaatatggtacaaagaagtttatgataaagctatgttccttaccatgttaaactccacctagttcctaacatatagcaacaaaacaaaaacaaatatcctttcagaaggatcctcaaatttatataacattaatgtttttcaaagattttgtgttgttgagggatatgaattggagagagagagaagccgaggaaccttgccttgtttatgctttttgtgaaacaggcagaacagtaaaacattttaaaatgttagtgacgtggaagaattgaagtcaaatcataagaggggtaaagtaggagtttcctatgatttgtaggtgtgaaagtataaatgcaggtggtatggagtaaaatttccctcagaagatatataaataataaaaaaatgggccctcaaaaccccaaatgcccaatactcttatctccagtctatatttatttgctgcaaatttcagaattgtttttttcaaaggactaaattgagagtcgtacataacatagggttcctttgatattaatcgatttgagaagacgtg

SEQ ID NO: 27976 - DNA, 355 bp, Medicago truncatula
  Intron number 1 from transcript Medtr3g133150.1 (locus Med tr3g133150) derived from phytozome v7.0 (chr-ID MtChr3; po s 33662680 to 33663034)
agaaagaggtatgacaccgaacttctgcattccatttttgctatgaggtttttatatctgatgtgtacgctaccagtcagtttcaatgtaatagtgttaactaatttctttaagtcaaacttagattttgcaaatgtcacaagaagatagaaaagtgtgcgtcgagtctgatacttctaagattttaactcccttatgaattttctgcaacctcctaaactcagaaacacaaatgctttccatttgatgttgtgttgttttatgaatttttaactattataagcaatcaatgacattgacaaaatatggagttcatcttttgttcatcttgcaccaattgactttatgcaggtgt

SEQ ID NO: 27977 - DNA, 927 bp, Medicago truncatula
  Intron number 2 from transcript Medtr3g136710.1 (locus Med tr3g136710) derived from phytozome v7.0 (chr-ID MtChr3; po s 34564974 to 34565900)
ctagagcattgaaaactggacgccgcaaactaagtgtaagccttttgaattttctatttttagcctaatttgttgagtttaatcttgacatattgtttgttagcgtaaaaagttgtaccctttaaacaagcatgaacaaatcatatatgtgactttaaaagtagttacgattgaagttaaagatttttaataatctgataattatgattgatttacataggaaaaatatttagaccaattagttatatagtgtgagcttataaacgtgtgtattctttgcaccacaactaagtgtatcagatgataggaataggattacttagttatggtatgaagaggttaagtgctattgtttctcacctacttcaaatacctgtatgatctgcatttgagtaacaccatacaagacacgtgattaagaaaccaaaatgtttgttaaaaaaaaggaaaccgttcgcttaaactttttattcgaaatactgttagtaatatgaaacacattctgatttgcttccttgacttggccttttgtcgtagttgatagaatgaagcttcctatgacctgattcattgataaggagaaggaaaaagtaaatttgatttttttaaacagatgagtgttagtagttagttagtttagttagttcgggaaaacaggaatgctagtaggagggattgaaccctacacctcctgcatagaacttctttggcgttcctatccaaaccactacactactccttcggggacaagaaaaagtaaagttgattgattaaccaggtcggggtcctgattaaaggcaaatatattagttaatatattaaagagtggagaaaatccctaatgttaacttccagactcatttctcagttccgtctttccaatttgttgcagataaaagctcttgctgccgagctctgtcttgatag

SEQ ID NO: 27978 - DNA, 546 bp, Medicago truncatula
  Intron number 2 from transcript Medtr1g132790.1 (locus Med tr1g132790) derived from phytozome v7.0 (chr-ID MtChr1; po s 29751297 to 29751842 reverse strand)
atcaattcatcagatccacttcgctgcttcctcaggtatgcaatcttccatatcctatcatctcatcatcaatttgtttcaattttctgattgtttgatttcataattcacacacaccagtaaaactccatctttgatttatctgtttttttcatcgatcgttatggaatcagatgctgcaattcatgctgaaattgtgtgctttttggtggtaaatttgtggggaatcctaaacattgtataattaggtagatggtttattaattgatatatcaaaaacttagttattttaaatattaattggacttgttatatactgaatctgttacagtgatttttttttttttttttgcccctttcttataatcgatcattggttgttggaggcatatggtgaaattgtaatgtcctgtatttttctgcagcacatgaatgttatttgaatggaaaagttatgtgtgttttcattaacgttatgtaggagagattatagttgtttttaattgtatttataattttgttgggttatatgattttgcaggaatt

SEQ ID NO: 27979 - DNA, 560 bp, Medicago truncatula
  Intron number 1 from transcript Medtr3g103000.1 (locus Med tr3g103000) derived from phytozome v7.0 (chr-ID MtChr3; po s 25262548 to 25263107 reverse strand)
aggtttgttttcgtttcaaaatctaaactttaacccgaatttgttgtgcccatttgttcaattttaatgggtcgattttgatttgttaaattggtatcttctatgtttagatttagcggttttagtgtctgtaactgctttgtttcgattttagattttgtttttctattatcttctgatgcaacttaaggcgttaataaaactatgattattattattatataaatgtgtttgtttatagagtgatcttttaatgtttttttaacattcatatttttcaatatcactttatgtgttcccttgccaattttcctataattccaccgcacgttcgccttattgaagatgggatgttttcattctctctggtaaatccattaattattgttattctgataaggatgttttgttttttattttttttattatcaacgttcatagcttgaaatttctttcaaatttcccagtttttagcatgtaatgttttgttaaattaatattaattggtaatttttgtaatttcagggtaaccctcttcgtgctcttggagaatctatatc

SEQ ID NO: 27980 - DNA, 461 bp, Medicago truncatula
  Intron number 2 from transcript Medtr3g039850.2 (locus Med tr3g039850) derived from phytozome v7.0 (chr-ID MtChr3; po s 10673015 to 10673475 reverse strand)
taacagacatatacaactggtagattcacttgtcctcaatacctaatattattattttcttggacaatttacttccaagttgattttcttttcttctatatcaatttgtcacttttcttttgattgccattttatcttatactccccctggaatgagatataagcaaaagtggtagttgaaaagtcaatgtatgtggttaagaatttagtccatatacatcaacttttgaactatcctttttgcttatatttcatttcagagggagtatgatgtacttgtttataatttaaactcggcatgttcacttgtttattaactttattggcctcaaccatacacgtacactatttttaactggattaaagggagtttctattttgtattactcttggttgctaacatacatattatattgttgactgtagtgacacatttaacgaaaactccccgcctaccagtg

SEQ ID NO: 27981 - DNA, 552 bp, Medicago truncatula
  Intron number 1 from transcript Medtr2g107540.1 (locus Med tr2g107540) derived from phytozome v7.0 (chr-ID MtChr2; po s 25328178 to 25328729 reverse strand)
aggtacaaatttatttttttatagatgctttgaatttctttctattaattatttttgtatatgctatgtaatcttttattttgataacattcatatgtgaaacaatggtcttgaaagtattttaagatgatttctagttgtataattgtgtgtgggggttgtacttgtatcaaatctaccaagggaaaaaaaaatccttatgttaaactagttaatgcagtgaaaaggacggaattgggaaaaacatgcgattcctcggatacgtgttcttcaatatgaaattgtttttcattaatttaataatgtaatgacaaatctacccttccacttacaacatgtttgagaagttataaatatgttttttgataaataactagtgggcgtagtttgctaacttgcaccttagtgtttttaagtggatgcaagttagcagccccatctttatatatatatatatgcaaaacaatagtcaatccttaattatgtcattctttgatttttagggttctaccattcttgtgcagggacaacaaaccggtcttgggctagcat

SEQ ID NO: 27982 - DNA, 564 bp, Medicago truncatula
  Intron number 5 from transcript Medtr1g039680.1 (locus Med tr1g039680) derived from phytozome v7.0 (chr-ID MtChr1; po s 9123455 to 9124018 reverse strand)
tattcggtgcgaggtatagaagccacaatgattcctcttatcttgtggtgtttcttataaagcttcttctgagcaggagtatgtattcttctgtctatagcagctccttcttcatccaaatccagatcatcaactccatcttccagtatgtcccataactcttcatccaatcccatgataaagctgtacatattagttttccaccatgaaaactcttctgcatctccattaaactttggagcttttccagagtctgttttcttgtcagcagtatcatagtcatgcttgacacttgtgtattttgtagtaactgattcctcatctccagacatgtttttctaatagatcttgaactgtaacacggttaagtgctgtgataacagagcaggctctgataccaattgaaggtgaaaaacacaagaaggggggttgaattgtgttttctttttctcttaaaaaatacttcttctgataaaacttcagaagcagtttgattgtttctgatgaaatgatcagagtcagattgcagcggaaaagaacagagcagagaaaagaaagacaaag

SEQ ID NO: 27983 - DNA, 171 bp, Medicago truncatula
  Intron number 2 from transcript Medtr2g132320.2 (locus Med tr2g132320) derived from phytozome v7.0 (chr-ID MtChr2; po s 31939497 to 31939667)
aagagggacctgaagaatcagattcacaagtaggggtatgactcaccagtagtagtttagcttctattgcatttggttttttgatattaatttgttttctttgcttcacctgaaactgtaattacatgctttatttttttcttatctatctatatctatatcactatgcag

SEQ ID NO: 27984 - DNA, 171 bp, Medicago truncatula
  Intron number 3 from transcript Medtr2g132320.2 (locus Med tr2g132320) derived from phytozome v7.0 (chr-ID MtChr2; po s 31939777 to 31939947)
aagagggacctgaagaatcagattcacaagtaggggtatgactcactagtagtagtttagcttctattgcatttggttttttgatattaatttgttttctttgcttcacctgaaactgtaattacatgctttatttttttcttatctatctatatctatatcactatgcag

SEQ ID NO: 27985 - DNA, 173 bp, Medicago truncatula
  Intron number 4 from transcript Medtr2g132320.2 (locus Med tr2g132320) derived from phytozome v7.0 (chr-ID MtChr2; po s 31940057 to 31940229)
aagagggacctgaagaatcagattcacaagtaggggtatgactcactagtaggagtttagcttctattgcatttggttttttgatattaatttgttttctttgcttcacctgaaactgtaattacatgctttatttttttcttatctatctatatatctatatcactatgcag

SEQ ID NO: 27986 - DNA, 583 bp, Medicago truncatula
  Intron number 1 from transcript Medtr3g138300.1 (locus Med tr3g138300) derived from phytozome v7.0 (chr-ID MtChr3; po s 35348174 to 35348756)
tattttggtgggtgttgtcttcaggggtgtttttaaagtgtttattttcggatgttcctcttatatacggcatcgtttgtttgtattctcagtttcatctgtctttgttcgtcttgagcagggatctagttgtttaataaaatttattgtcaaaaaaaaatactgtagtaaatttttgtgtaaattactaaactttgcgtgaagtgaaaattgaaatgtttgacagtaatttttaaataagattattcgaagagtacttttaaaagactcgtgagcatgaccacgtaatgaaattaacaaaattttcaaaattaaaatgtccttgattttgattcaattttgaaaaacaaaattgagcaaagatttatattagaaaatattttcgattttaaaaatcgtcacaatattacaacttaattttttcgtacaacaacttaatttagtgacacctaaaatttttatattcaataaactggtgatttactttattatatctacgtcaataagttatttatgttgattgctttgaaatattatttgttagtcaggaagatacatcaacccagaagaaaatccttataaa

SEQ ID NO: 27987 - DNA, 372 bp, Medicago truncatula
  Intron number 4 from transcript Medtr3g102930.1 (locus Med tr3g102930) derived from phytozome v7.0 (chr-ID MtChr3; po s 25233157 to 25233528 reverse strand)
ctaccgcaagtggtaattaatcacatttgtctctatcttatattaggcttgtgtggattaacttatttattgaaataaacatttgtgtgactgtttgagagagcttataggaacagtttatgacatatccataagaccataagctatattcaacttatttccataagctctctaggttattttgtgaaaacaacttatagcttatatgataagcgcttataccataagcgcttgattaagttatttatccaaacaaggtcattgtcaacttgcatagatgctttattagtttatcagtctgacaatctttcttctgctggacctatttgatttgcaggaacagaaagtcagagtcgtgtcctttttgtcgcg

SEQ ID NO: 27988 - DNA, 727 bp, Medicago truncatula
  Intron number 1 from transcript Medtr4g018880.1 (locus Med tr4g018880) derived from phytozome v7.0 (chr-ID MtChr4; po s 3729778 to 3730504)
cacgctagggttcttatcagacagaggcacatcaggtatattcattttttatgttcatattgaattaatctgttttatatttatatccaacttaatctcacttgttgatctgtttgtttgtctggtaatttatttgaaagaatattttagatttgtcattttcagtttatatacaagcttgcataagctattttttgtagcttaatttgattttgtaattgctataagctgtcttcgtaagctgcagtgaagattagcttattcttcttctgcttgtgtgttacttaatgtttttgtatgatgtaggttatgtttagatcattgattgtctctaacaatgttgtgtttgctgtgcacatattaatttattgtttgtattcgtctagtgatggaaaaacaggtaatcttatctagtaggagtatacaggcttaacaagtctttgcttgttccctttgattcaatacatgttttgtggcttttaccccatatctgcttttaactttaacttttgatgttctcatatctaatgctactgcatttccggctatcaatatactctttgtatgaagagaaatagagagaatgtgcttattggtccctgatgtttttttctttttcttttcctctttctatttagtcttgttcaaatatgtctgggcatggatgataatgttattttttggtttcatagagttgggaggcaggttgttaacatcccatccttca

SEQ ID NO: 27989 - DNA, 634 bp, Medicago truncatula
  Intron number 1 from transcript Medtr3g111410.1 (locus Med tr3g111410) derived from phytozome v7.0 (chr-ID MtChr3; po s 28273792 to 28274425)
ttcgagtacgtatctcttccgttttctatcattactttctctctattttctatttaatcctatcgatttacttcaaagcctttgtaggaaagtgaatcggttgatttttttttgtttgtttgaaattcctagtaacagcttatagcataagtgatttcatatatgcttgcgtaagctatttttctagctaaagataaaataaccttacattgtctttgtataagcagcttattaaaataagttgaaaaaagcttattaaattgttaaattttttataagctgttttcaaaagttctaccaaactgtctcaagtgtcaatatataagctcaaataagtcaatccaaacagatactaattagaattgggaagtaaatttttcaatagctatagttttcatctatgaagcacagacacccctcggattaggcttttgctacataggttttcattttgttgcactttgtagttcattttccaacatttgcctcacgtgttcattaatatgtctttacccattactcagtaattttactgtatcagcatgtttcatctaatatgaaatagtcggataccatttgtttgtgtaattgaaattatgttctgtgtatctatggatgcagacaaaggctgagt

SEQ ID NO: 27990 - DNA, 713 bp, Medicago truncatula
  Intron number 2 from transcript Medtr2g043310.1 (locus Med tr2g043310) derived from phytozome v7.0 (chr-ID MtChr2; po s 12364247 to 12364959)
caggttgaagtttggttccagaacagaagagcaaggtatgattcttgaatcattggttgttttcaattttcaatcttttatgatttttttttttctttcatggctcaatattggtttgatcttaatccaacatatttctcttcatcaacttttcacttttgatcacttagatttcttcttcttcttcttgttttttttttttttttttactaatgtgttccatcatttttaccttgactactatgcctgatattcttgacaaaattatcttttcaagaaataatttgtgttggtaaatcatccaatttattatttgttgactatttcaaagagatatttctcgtttttgcaaaaataatttatctcaaaaaagagttatttttaattttcaatgtaattttaatattatgtatatcactcaaattataaaattttatgttgtatttatgatattaaaaaatacatcaataattaataataaaagttttataaaaatacttatcattttcttattttgtgtgaagtgaacaaagttgacagttattatggaatagaggataaaaaaatatttttgttgattagattgttgaacactaaaattttgagactaaaaattgaatatttttttgtttgacttgactatactttctaagcaattatatacaattgacttttcaggactaagctgaaacaaacagaggtgaactgtatat

SEQ ID NO: 27991 - DNA, 543 bp, Medicago truncatula
  Intron number 1 from transcript Medtr1g117270.1 (locus Med tr1g117270) derived from phytozome v7.0 (chr-ID MtChr1; po s 25085001 to 25085543 reverse strand)
ggaaaaatactccgtagatttatcatttaccatctatttaccttgagttccttgcttccattttgtagtcaatgcaacccaaatatatgtaacaattggtcaggtttgaggttgctcatcaacctacatcatccagtgtttgagaagtttaagacttagtaagtttgcattatgatttcacaatacagtgttagagtaacttattatttcacaatccgatttgattgttttttgaccatgtttcttgaattgttgtcgtgactttaacacttctcaagctcagagtcaaacttcagttagaacttaagtcagagttcaacttcttctcaacgtacttcgtacaacgatttttccaaactgtcacatgttaggccaattgctgaatttataaacttaatcaatgtctgcttttttttttttatgcacaaacatgctttgagtttttttacgcacaaattaaaaatacatattgcattattctttatttcatgtgcataatttgtgttaggaaacattattgcatcactgtttggaaaacaacta

SEQ ID NO: 27992 - DNA, 882 bp, Medicago truncatula
  Intron number 3 from transcript Medtr3g076920.2 (locus Med tr3g076920) derived from phytozome v7.0 (chr-ID MtChr3; po s 17966188 to 17967069)
ccatacttaccatcagaaaattaccttacttgcaggtgatccaccgccattgtttaacagtttgttctatttgaagataacaagatatagttgtactagagatagaaagacatttgatttggtaatacaagtatacaactagtgcaccatacaaaagatcatggtgaagctctgtcgtaatactaataagaaaactgtgctttgctctgtcatatgtcattaatcctttatttaatcaaagtatcgtactctctttagacctctgttccaacacagggttattactactagtgtatgaaaaaatgtgtcattcacgctccaataagatctaggggtgtacacagatttggattgaaccgattaatccaatgactcaactcaacccaaactatactttactcgaacccgattaaattcaagtgtggttcaggtgacggacttagaattgtaaaccagttaacccgacccaattattttttctgtcaatttgagtatgttttctggaagaatattacttgtgcttcataattttgcttgaaattgtggtttttgtaatgtttaaagtgttttgatgtagttacaatattttagaataaaaaagttagtttttttccctctaagacttgtcagcccaacctgactcaacctgtttgtcaccatgttagtttggtttcgttttgtcgtaaaacctacgggggggtatccaaccccaaccaaaggatgggtatgaggtttggccaaatttgaccttatccgacccgtgtacactactaacaggatggtatttttttacattcaaataggagactgagaggatccaaaatatacttgactgctattaactatttcgatttaagttcaggtttttctctgcaaggaagc

SEQ ID NO: 27993 - DNA, 538 bp, Medicago truncatula
  Intron number 1 from transcript Medtr3g029760.1 (locus Med tr3g029760) derived from phytozome v7.0 (chr-ID MtChr3; po s 7871144 to 7871681 reverse strand)
gtgtaataataatgttctgtagaatatattgccagagactatggaataaataagaattaattctttaagtttgtgcctaatttactttgttggtccatctgctatgcttgtttttgtctactattttttgtttgttcttttgatacttttcatgggtcatgataatttttatcatctttaatcaatgataaataccaatatgtttgatttttcttctgtctagttatgcatagctgatatgatggcacaagggtgtgtgtctagaattatcagcataggcagcaaaataattagtagtcagaaatttaaaatcaaacacagtgaatggtttactgttggaactctatccattgaatttactgtctgatttcatgccaacaataaaatccacctattatattaatagttggtgatatagaacactcatataatatgctactctctgacattaattataaataaaaatagatctaaaaaaatttatgtatttgatttaaaatttgaaccaaatacatccattttcctctaagcttggtcc

SEQ ID NO: 27994 - DNA, 1017 bp, Medicago truncatula
  Intron number 1 from transcript Medtr3g151340.1 (locus Med tr3g151340) derived from phytozome v7.0 (chr-ID MtChr3; po s 40110517 to 40111533)
tattgaacaatctcagccaccacagcaagatcaaggtagttaagtgcactcactctcacacctttctacgattattcttttttttttttccttttgttttaattaatacgtgtaatacacattaatatattgcgttcatcaaattggatttgaagacttgatgattaatcaattagcacttttagcttttaaggttgtgtcaaaaagatatttgtttttaaatgttcatgaaatgacaactcttctcccagtcaaagtgttcacaaatcatctttgatatttttatttaacctcttttttttttatagacgcatattagtattagtaagttaaaagttataatgttagttttctgcgatcgaaccctaaaatcacccgtctatatttccttctttttagggaccgtttgtatttcctttggtgtccaatagcttatcaaatcagagatacgtagttgggacaacatctttgatattttattatgtcatatacttaaatatggaaagagatcctctgaaccactaattcactattgttcgggtgagtcacaaatttttagaaccaaaatcaccattgaacactctgtccaatctagtgaaaaactcatcggagaggatctgtttacactcaaatacataccataaggagtgatttgaccggtcaatgaattcaacacattcatttaaattgttccatagagatcatatgatttatattgtaactttataaaatatgaaaatgcaaatgactatggtgcatatacgtacccttcaatcttttcaacaattaaatgtaattatttgtcccactttttccctaacacatatatataattgaacatatatattggtctcaaataggtagttcaattgaaaagtaaagagaaatcaaagaagtttgaagcattgcgtccaaagttttaaacgcgaaaactaatgtagcaaactaacttactactagcattcatctataaaaaaatgtgtatatattgatttatttgctattgatatgaaggga

SEQ ID NO: 27995 - DNA, 821 bp, Medicago truncatula
  Intron number 2 from transcript Medtr1g043680.1 (locus Med tr1g043680) derived from phytozome v7.0 (chr-ID MtChr1; po s 10322922 to 10323742)
gcgcagcatctgcgcatacgacaggtatgtatgtgtatatctatctatttatctatatatctttctatgcaaatcagtcgttcaaacttataaaatactgttagttttttacaaatgggagtaatacactttgtagtggtataagatagctagcttgtggcttgctctaaaatggatcaaggaagaagttggctatatctttttacagaggtctaggaagaagtttcgacagttatgtattttacattattttaggaatatctactaggtgtaggctttagtagaataatctagtaataactagaatagtctagaaaattgtagcacatttcaacattcctccttcatacaaatttcagaaatttggagcatagtccgcaacacctcaaacatgactcttggtaatgccttcatcttcacaaaatttatcaaactcattggagttgtactctttgccacgttcactgattagagctttaatacattttccactttgtttttcaacaaaggtcttaaacttttttatatacctttgatcgaaaggtattttcaattgtgtcatcatcatgcctactcaatattttctcataagcttctaatgagcctattaattatgtcactgacaaagtagacaaatcttcggttggctcaattgtagcaacaattgcatcatacttatgaggaatagcaacaattcttttttcgagaatattatattactagatttttagtctcttaaattcaaaaagttaattagtttaatgattaacttcacacttaatttgtaactcatacagacaagggagattgtattagacagc

SEQ ID NO: 27996 - DNA, 786 bp, Medicago truncatula
  Intron number 2 from transcript Medtr3g093370.1 (locus Med tr3g093370) derived from phytozome v7.0 (chr-ID MtChr3; po s 22174683 to 22175468 reverse strand)
actggtatgtcgtacctttcaattgccataatacatattttgttcatcatatttatctcaacagtgtgtttattagagcaatgactaatggaggttttgctcttttgaccggataaacaattgtagatttataggttacggttcctagaacaatttttcatgtagaagtcatttttctgttgatggtagtagatggttattgaacattgaagttgtcatacgaataaagcattcctttctcttgttctggttcttaactccctaggtttcattttctaacttgatacacacgcaccattttcgtattggtcagactcgtatcattcctcatgtccctcgcttctgtttccatattaaactagctgatgtttcatatataagccaagaacccgtgaaatgaattaccttaaataaaactattaaagatagccagaaaatggaaatatttgatgtttcatttatatgcaaagaactcgtaatatgaatacctaaaattaaaatatcacatttagccagaagatgccaacattaatatttttcttgaaattacaagaataacctggcaaacaaatatttccctttctgctgttcctgcatcacattagttttagttattgcagataatttagttttttgtcatcctacactatttgcgtgactggcatcgttttgttaatgcttgtaagtgatgtaaagccagtacgaatgattgttgttcaaattgatattcagtatgattaatgtttttcaggcttctaactcctcccggtactcctctttttcctt

SEQ ID NO: 27997 - DNA, 668 bp, Medicago truncatula
  Intron number 1 from transcript Medtr3g093370.1 (locus Med tr3g093370) derived from phytozome v7.0 (chr-ID MtChr3; po s 22175551 to 22176218 reverse strand)
gcttcatacctcggaggagtttgattcagctttgggtataaattcgctctcaaaaagtttctatttttggagttgtgtgggtacttgggtttttgttgattttattcttttcagtgttttcgtgtttagttgttgacttatgcttgtttgggtaaatagattagttaagctataagcaatttctatgacaaaaagatgtaataagtcaaattgactttgagcttgtttggattgacttgtttgagcttacctactagcatgaacacttgtgacactttgggagaacttgtggaaacagcttataatatgttcattagtcttttttcagcttatttacataagctctagagggtagcttatgaaaatagcctatagattatacatcacataagctgtttcgataagctcttccgaaaatcatcacaagtgcttatatctgtatataataacatcaaataagcaaatccaaacagctctaagattaattatcgcatcaatttgtcttattttaagaagtggtgaaaagttgcaaaatgattgtgttattttgacaaaatgcacttttatgaatatggggtcttcctaattttggtgggatttccctttgtgacgtggtatctttcatgattgcagggtcaaatccgggcacttctcccttatttaacatt

SEQ ID NO: 27998 - DNA, 958 bp, Medicago truncatula
  Intron number 1 from transcript Medtr3g087510.1 (locus Med tr3g087510) derived from phytozome v7.0 (chr-ID MtChr3; po s 20859386 to 20860343)
gattgaaggaagtaatggttgggttgaaaaattgaaagatgaaaacacaaattaagttgaatgagagagtttcgtcggatagatgaatcaatttttgttcccaaattatgaatggattgaaggaagaaatggttggattgaaaaactaaaagaaaacgtagaagaagaaagcagttatttgatattggagaagaaaacagttatgcagagaagaagaaaataatctggaaatttctttttaaaaattaattaatgggtcaatctgctaataacaaaagtataccgggtcaatatatcaaacccatctcctcgtccattttatattgtggattactgttgtccatgttatagtgatgtcacgtcaagataggcagtttacccacctctttcccaaggtaatttagaaaaaacctaaaactaattaatttgatgataaaactaatcaactacgtctttgttgagacaaaattaatttgagataaaattgcaatacttttcattttggaaataatagaatgtgatgaaatacttttcgttactcttgattgttttcgacttatgagccatttacttgttgtatttttaaagatacatggtaaaaaataattattttaggaggcctaaagcctttccttcaccggcttgcctcttgggtcggccgtgtattaatatgtgctatattgcaaccacaatttgaactttagatttcctagtttcggtattaaaaaaagtcgtttctttgggtatcactactatgctagggttagttttctccattgagtggagagtgtgattcttccactaggaatcattaacacgtttctctccttcccaaaggtcccctttgcctccatttgcatctattcccttcaatctttgagtcctaagaatgaaccatttctttgatttttttgccttttaaggtttgtgcttcaatccttattggtctcttactctc

SEQ ID NO: 27999 - DNA, 777 bp, Medicago truncatula
  Intron number 1 from transcript Medtr1g099740.1 (locus Med tr1g099740) derived from phytozome v7.0 (chr-ID MtChr1; po s 20500928 to 20501704)
gttctttgcttcaagaggtagatttgaattttttgcattttcatattctgatgctacatatatctaaaaatttgtttttttagtttgtttagtagtttagtttatttttcagaatttgtttgttagttttgttactaggatttgaaatactgctagaaatataggttgattgttttgaaatgttggttatgttgttgttagtccgacctcataaaatgctatggcagtacagcggacagtgggatagatagccgttattgcaaagactaaaaaatcagtgtacaaagtaggcataaatactcaaaagatacacagaattaaagaaccttaggttcagagcaataaaacatataaacagagaagaacataaaactgaacaaaacaagagcaagaacacgacagaatgaagaatagaacatttttacacttgaaagggtttgaattgacatttacaccctttaaaaacaacgattttaaaaaaaggatttgaggaatttcagtccaaaaccctaatagtggctgcgatagcggtttgggccgcaatttgcggctgccacaaccactattgtttgacaccatatcgcaggccaaaagcgttgtgctgaatccagcacggctacgctattccgctatagcgtgatattgacagcatggatgttggttggtttttttttttccttctgttttgtgtatatgatgagttcaattgtttttgaagtttgaatgggaatgatgatttcaggtacggagaggtgctgaccgagccgagatatatag

SEQ ID NO: 28000 - DNA, 742 bp, Medicago truncatula
  Intron number 2 from transcript Medtr3g133160.1 (locus Med tr3g133160) derived from phytozome v7.0 (chr-ID MtChr3; po s 33668703 to 33669444 reverse strand)
tcctagatctttttgctgcattgccacttccccaggtactatatcagcaactgaagatactgattttgatatgatttatgtataggaaatttaagactatcaatattttgtttatgcttagagacacttcatcgtggcgtgaattgtgaaacagttcaagttttaataccccatgagtaaatttaatgatgaaatagatttttttttcttattctaattaatggtattaacagaatgccaaagttatgtaacttatctattccttttttggagacaataaccaatctattcttctattcttatatatacaaatggaatacaagattttgctgtaatatttttttaacaaattttatcttatcaatggttacaaattataaataaaaaacaaatgaatgcaatagttagaaatttgcgcacaattcattagtttcgacttccgatgatagtttcattagttaccaaaatcttttgcttttattttttgttgatattttaaattgaaacgaatattatacaatgaatgtcataaaatagacacactaaacacaatagaaatgcagataaacctgaatgtgagtgacagttaggctagagctttatgcaacaagcaattcatacacattttttgagtctatttgcttggttttgtatggtctttatattttgtcccttaaagagatgttatatgatattgttaacgcttgcttttctttgttggcagattgtgatttggtttatt

SEQ ID NO: 28001 - DNA, 893 bp, Medicago truncatula
  Intron number 2 from transcript Medtr3g110680.1 (locus Med tr3g110680) derived from phytozome v7.0 (chr-ID MtChr3; po s 27936815 to 27937707 reverse strand)
gaaggtagttattgttttcttctttttttgatccatgtgaaaaatttcctttttctttaatcaagaactgttttttactgttttctcagcttttgtttgatgtaattaaattgcttcaaaagatcccattcccccgtgttacaacatagtttttggattgtgaagacatttatgtggaatcagggttcgagcccgggtcaccacatttcatctgcttgtatgcgtgaatgcattggccaccaggccaatatagcaacaacaataaacaaccaagccctatcccactaagtggggccggctacatatcaaattacgctatagtgtttaatcataggccatattttgatccaattcattaatttttaaatctttcctaatagttttccagtagcaaaataaaaaaagaattgcttgaaaagttgtttatgtgttattgcttgattttaaaaaataatacagagaggagggtgtttgaggtgtgcgaaaacttggctttagaattttaatttgcgggtttcatggtatcacattttgaatgaagaaaaattcttcagtgaaggtgcttttggatcaattttaacacaaaatcagcttgttggttaaggtttacagaataatcttaagtccaaattaatgtccagttgttgattgctttgcattttggaatttgtcgaatttcaacgtctctgttgattgtgcaattaattatattgcctgtcagtttagtcatactatattgtaagctattggagggtgtagttaagcaatgccatactacccgctttatagtcttatgttttatgataattacaaacatgatgggtaattgttcattttgtttgttgtgatgatcattagttgtagctcaacctgaaactgccaataccgtggag

SEQ ID NO: 28002 - DNA, 445 bp, Medicago truncatula
  Intron number 4 from transcript Medtr3g020230.1 (locus Med tr3g020230) derived from phytozome v7.0 (chr-ID MtChr3; po s 4531923 to 4532367 reverse strand)
ccaatctcatcaatttttttcgtgtaagtacttcttgtgatataaatataaatttgatttagaatttgtttgatacacctgatatgatataatttaatattataagatattctatttatcaacaaaataaatattacaagacatgctattaggggtggcttttaggtacacaatctattgaatgtatgtatcatgcacatatatgaagatgaccattgatttattattaactaatttaatgatttgtatttaagaagagatacctctttagtaatttttgtgacacatttatgacattttcaaagtggatactaactataggatttagtctcttaaatactcagtttcagatctagagaaatttcaattgcctttataaagagataattcaatttttagtttgtttacatttattgatacttgatattgtttcaatacattcagg

SEQ ID NO: 28003 - DNA, 533 bp, Medicago truncatula
  Intron number 1 from transcript Medtr3g068230.1 (locus Med tr3g068230) derived from phytozome v7.0 (chr-ID MtChr3; po s 15828698 to 15829230)
ttctttggttaatttgcttgatttacttcacccaggtttcacttcttcatcttttgtcaatttttttgataaatattaaatctttgtgtgaaattattgatgggcttttgtttttctttgagatctgatagttttatttattgggtgttgtttaattcatgtttttagtcccattttaatttttatattcaaagttgctatgaatgaagtttttttgttgtgttattctttattttttagtaaattttatgattctatgtgttgatctatgagatactgacgctagatatcagacacgatactgacataattaaaagtgacataattgaatgtgatcacacgtgtcagtgttgtttcggtgcatgacactaacatatgtcggacaccggacaagtaattagaagttttggtgctattgttgttgtgttgtatacttgtattgtgtcttgtctttttgtttttttctttgtctttttggttttttcttttacctaattaagaacactattgatgcagggttttaggtcatttgt

SEQ ID NO: 28004 - DNA, 472 bp, Medicago truncatula
  Intron number 2 from transcript Medtr1g107010.1 (locus Med tr1g107010) derived from phytozome v7.0 (chr-ID MtChr1; po s 22483528 to 22483999)
aaggatattggaggtaaaaaaataaatttactactaactttcattgatttttgtaatctttttactgtctatggattttttgaatttttttttttttttttactttttggagttcagtttttatttaatgagttctgagattagatcggagtccccaatatcatggggtttgaattaatgcatatgccagcttgtaatgaaaatttccccacacttgcttttaaatctcctatcaaattcaatgcacattaaaaggtataacaaggaagaccaatcaatatttaatgcattattataaagtagcgtaatttggttcacatatttcaactgttttggtttggtaacagacttgttctatttttaacaggttacagtactttgttttgattaagttaatgttaatggattaatttattggattttgattaaattttgttaatgtaaatttcagatacttggttttgggcaaagc

SEQ ID NO: 28005 - DNA, 984 bp, Medicago truncatula
  Intron number 1 from transcript Medtr2g005800.1 (locus Med tr2g005800) derived from phytozome v7.0 (chr-ID MtChr2; po s 418837 to 419820 reverse strand)
tgacgtggagttggtatggtaattaattgatcatgattggtcattttactttcataacgccattgtacaattttttcgtaatatttggctttgctgattttggtatttcgtatttagtacttttatacgcttaaaaaaaataagtagcatgaaatacgatttgaatgaaaaataaataaatccaaaagacctgtagaattgtgccatttttgtgtacattctatttcccgttagaaatctccatgacacggtgcttgcttttgaaagttcactgcacacttcaaatgtagagttctgtttggcagtagtgacccgactgactattctttccctcttcccttcacctgcaacagttcaacaaaaacaataacctgtgacaatttatttgctatgaggggagggttgtttggattcaattgcagttaatgttttggggtcgcacaaattgttattgaattagccagccacatgcatacgcagaagaacaagaaccttacatgtacctgtccttccttgtagcaccaatgttgttgtactagcttttctatttatgtttttagcattaggtgtttaaaagctccgtaaatacttgctcgcactagcactagtttttgtgagaaagaggtgaagagttagattgaaagacgaaaaggagggtttgcaagatttatatgatcaagaacaaattcagtactatgattaattttgaaatatattttgggtgtaaccggattatttggagtgttcctagaaaaaaacatactcccctaataatgctgatattcttgcctggttatcaacttgtacctaggattaggaagaatagagttttatcacctgctatcctaaattgttaatatagctttatttgcaatcaaatcgttgttcagatttatttttggaaggaaaacgacgttcagattgtcatgcttggtcttgatttttccagaaaacaactatattgtacaagctccacattggaga

SEQ ID NO: 28006 - DNA, 744 bp, Medicago truncatula
  Intron number 3 from transcript Medtr3g140280.1 (locus Med tr3g140280) derived from phytozome v7.0 (chr-ID MtChr3; po s 36264375 to 36265118)
atactatagtgatcacggcggtcctggagtgctgggttagtgattattaacatgtcgggtttattttatgtttttgtttttgcttgattatgactatgtttagtgtaatatattttcctcaaacttgagcttgtgattgtagatactttcctagctaaattgtctttagttgttgtgaatcttgtgataaagacaatcaaccaaaagctttgaactcaaaaatgggggtgaggttgattgtttgaaaaaaatgtatttcaaatttttatgcaagtattctcaagatttttggatttctgggattgtcctaagttttgaatttggattgttatttgaagatggatatgtggagcttagtattatgcagcatagctgtgaaactatgttaatatttacgtgttgatttcaatatttgattatatgttatcttatgttggaaaatgtacttgttgaattcggaaacatttgtttgtttgttaaaaaggatgaagttgcaccctaagaaaaagagagggaatggaaaacacacacacaaaagtagaatatatggtcatcagtatccttattgttgaatatgtgttgattattttggtgattgacactattatccgtgaatcttatattaacattttggttttatcttcatccaccaagtgtttcttcacaccaaatatatgtcttttctatttcttacgtggtcctttatttcggggtgggggtattactggggtttggatttcaggg

SEQ ID NO: 28007 - DNA, 907 bp, Medicago truncatula
  Intron number 1 from transcript Medtr1g106350.1 (locus Med tr1g106350) derived from phytozome v7.0 (chr-ID MtChr1; po s 22154967 to 22155873 reverse strand)
ttgttggtgaaactggtagtggaaaaaccactcaggtttgtttctatattttagtttgtttgagtcgtatgttgtttttatatttgtttcttaggttttgatcatgtgggaaataattgattaatgaataaaccatagatttagtcccttaaataatggctgcagtttttacaaggctctcattacggtttacatgtttttgaatttgggttagtttggattggcttatttttgagttatgcaaataaatatgcttttatgttaattcataagttctcactaaccaaaattgtggcttcataagctgatttttcataaactacttctacatcgacaagcttttgaatgatacataaaacttatttatttgcataagctcaaaaataagccaatcaaaatgggctcttagtgtgatatgttgagtagtagttcctaaagtatatgaaatccgttaattttgttcttaaaggagataaagtcatatataaacactaactaaaaattatatgaacactaattggcagcgtgtttaaaatgcagtcattattatgtagtcgtttcatgataagtgatgatatatttagctcaatttggcactaaaattgaagttaatgaagcaaaaagataatggtaggattgggacttggagtgaatactagattatggggataagattggttatataagtgtgcgggtttctaatattgatcatacattcagctgaaattggcactagaaattagagtggaattgtatataaaaaaaagagtagaattttgtagctatccgttgtccttttatgggtgaagattgattatctaagtctgtagtttgctaatttaattgctttgttgtataattttgggtgacagatccctcagttcgttttagaagctgttgaattaga

SEQ ID NO: 28008 - DNA, 436 bp, Medicago truncatula
  Intron number 1 from transcript Medtr3g026430.1 (locus Med tr3g026430) derived from phytozome v7.0 (chr-ID MtChr3; po s 7125800 to 7126235)
catcaaggaacagatagatcggtttaataggaatatttcgctcttaaaaactaaagcaaacaaagagaccagctcccttcgatcgatatattctttagtttatacaaataaataagttttgatgttaattgataagttcttattaacaaaaattgtatcttcatcatgtgttttttcataaactacatcgataaatttatgaatactagtgcataaaattaaaaattgttttgtataagctcaaatagtagcaaattcaatctggcactgtataaaaacaacatatgacacatatataaacaatttaagatagaaaaggagaggacaagactggtcacggaaatgatgaagccaatgttctcatagatctcccattgcgctcgtggatttacttgatactgtggtgatggtgtatatagttagatcgtttcttgtt

SEQ ID NO: 28009 - DNA, 447 bp, Medicago truncatula
  Intron number 1 from transcript Medtr3g028750.1 (locus Med tr3g028750) derived from phytozome v7.0 (chr-ID MtChr3; po s 7462515 to 7462961 reverse strand)
ccggagtggatcctcaaaatctgaactcttacagagtatgttatcttctattgaaaagtttccaatttgatagtgattgatagtgcattattgtgcttagtttatgttgttagattggataaaccttttgactattacttagaagaatttgagatgttacattgactataagtatctacacttctgatttttcaggaactcgattcatttttttataactgcagctagttttttcagaaatctgaatgtatttgatgaattttgtttttaggggtagcttatgtgataaaatgtataaatatatgaatatctgtagtacataaccatgacaagttggtgttgttgttgttgttgttgttattacttattattatgaactttctaaactagatgtaacaatgttgttgggtttgattatcttctttcattgttacttttgcagactat

SEQ ID NO: 28010 - DNA, 891 bp, Medicago truncatula
  Intron number 1 from transcript Medtr2g092890.1 (locus Med tr2g092890) derived from phytozome v7.0 (chr-ID MtChr2; po s 21415642 to 21416532)
ggtggaatcggtaaacaggtagtgaatctatctctgcattttattcatcacttgctcttgctttctcttcttaacttgctatatgtaaaattttctcttctctttattgcatacattttttttcaccctatcttttccttaataaattttagttttgacctcctccttaattaatactttagatgaaataatgttacagcattttgttgattaaaattaagattgaaaccacctttcatccatgatggtttatgcaactgaaacaacatacactcattatacatcatcatatataccttttttgatctcttgccctgttaaaaattcactaattgcatctcagctgaaatcccttctctgcgtttagagacattcaatacaaaatgtgtcaaacatatagtatatgtcagttgtagcagcgagttatttaactcatattaatcatgcgaaacatgtataacaattaatcttccgttcaacacttgaaatccaaatcaatacatatgcgaaacatgtataacaattaatcgttccgttcaacactattatttttgtttctaaatgtgatggaattgcacaagcttgtttgaaaacaacatccttgagaggatatatgcaagtgttctcggcatctcgttttacatggaaatgacacatgcttaaatactaaccctgcaaggagatatagaagagggttgcagatgggcaggtagtatatataatctcctttacaagttaaatagatatattttattgaagcattaaatttaataaattactttttttcaatttattaattatgttttattgtctagtatatttaattatattttgttagttttaatactatttcttgcttaaaaaataatatgtttctttggtgcagacgaa

SEQ ID NO: 28011 - DNA, 618 bp, Medicago truncatula
  Intron number 1 from transcript Medtr1g111480.1 (locus Med tr1g111480) derived from phytozome v7.0 (chr-ID MtChr1; po s 23771650 to 23772267)
agctggtttcgtgcttccttcgttgcttctaacaggtacgagtacgatacactgcaatttgtgtttttgaaaagaagtaacagagtctgtttactaggttcaattattcagttttaattgttaaatcttatcatatattgaattgatactttccttatagtattagttgttcgtagttactgattatactttccttatagtattagttgttcgtagttactgattaatttgagtttatatttctattaatttcaaactaagaataagaaatttatggcataataaaaaactagaatcatcataaaatattgtaatttgtaagttagtaattgattttaatgtgtgattttatttactagagacttcaattttattttaaaattgttttcgattgccttttttatatttctgtttgaacaaactgctactgttctgttgcgctatacagctatagtgtagcagaattttaacaatccggtgttttctgctatatgtgattgacaatattggtagaaacatgtatggatattacttcattttgttgctgtttgttgctgattatattcaccctgttttcttgcagcttctttgatcaactggagtttgatctctcttatt

SEQ ID NO: 28012 - DNA, 632 bp, Medicago truncatula
  Intron number 2 from transcript Medtr1g111480.1 (locus Med tr1g111480) derived from phytozome v7.0 (chr-ID MtChr1; po s 23772302 to 23772933)
tatcacaattcggtaagcttcttagttctttctgtttggttttaagttatttttgagtaaagcattgtactatatgcgggttcaagagttgagaggatacagatagtgtttatgatttatgaactgttgatcatgtagcgagctaacagaactaactaactgactaactgggcttgttagcctaactacaataacattactattcccatacacctctgaacaagcttaagttgggtcagaagctgaaggaagttcgaccacattaagcttgtctcgcagaagaggatttctcgatggtggcaatgccatggtggtcagatcagcccactggtcctgagctggaacatagacaacaacaagctttcaagaataaaaacccaacttttttgtaaaaaaaaaaaagaataaaaatccaacttcgtgtccttcgtgtgtgcatgcataactagattgcgagccaaagaagtggcgttttgattgtcataaagcgttttattaatggagaagttgatatagtaatatttgaatccttagaagttattcatatggattgacttttcttcattctccactattactaaggttgtttttcttgctgtaggatttcatttccgaaggaggttgttgttgct

SEQ ID NO: 28013 - DNA, 692 bp, Medicago truncatula
  Intron number 1 from transcript Medtr2g029640.1 (locus Med tr2g029640) derived from phytozome v7.0 (chr-ID MtChr2; po s 7940499 to 7941190)
ttctggcagggtctttagggttggagaccaaatatgtatgtctctttctttaccaatttttatttttattttgttaattcttcttctattttcatgagtcctttcataaaatatgctcttttatttattgttatttttctcacaagagctagattcaaaatggaatggttgggggaaaatgatatatttgttttatagaaaaaatttaggatgagaaatggtttaaggctaggcagagagaaccttagagcacctccaaagttttttttttttttttgaaacggcaaatattatttaaaccgaaactctcgcaagatgcagagaggtggagaaaaaatacaaggatgccacctataggtgtaacatcacaaaaactccacaagaaccttaaccaagggggaaaaaaaacaaaccagatgaaactatgatagagctatgacgctgaaatctggttaaaaccactagaattcaaccccatagcccccacagcccccaaaaacagcacaatcagatgatgacaactcccccaaaaccagcaggagcacgctgtcagacacacaggcagcaagtgaaagctgctacaacccaaagaacaaccagcaggcagactcattcattttattttttagtaatgacaaacattttatttatgggcagggtttgcgtactcagcagcacaaggattagttgca

SEQ ID NO: 28014 - DNA, 395 bp, Medicago truncatula
  Intron number 2 from transcript Medtr4g012800.1 (locus Med tr4g012800) derived from phytozome v7.0 (chr-ID MtChr4; po s 2326566 to 2326960 reverse strand)
gttttgtttttggtactggctcctccaattaccaggtacattttgtaacattgtgtgtgttggtgtgcatgaggtgtatgttactatacatgtggaaatatgaataatcattgtttcacagttttatatttgattatgctaaaggctaagacagctctctctccagcttcattctcttttgatttttgtaatggtcatgcaaagaaaaaaatatgctcaatgcctaatgctataatatttgacccaagaaaaacaggtcttaaaaactatcaaaaaaagaaaaacaggtcttaaaaagaatgcttgaaagaccagaaatttagagaaacggaaagtaatattgatatgtatcaagggtgtaatttttttcatgcttttcgtgttgataatatagt

SEQ ID NO: 28015 - DNA, 753 bp, Medicago truncatula
  Intron number 1 from transcript Medtr1g008120.1 (locus Med tr1g008120) derived from phytozome v7.0 (chr-ID MtChr1; po s 588739 to 589491)
gtgggccagttcttgcctatacttctgctatccaggtaagcttacacattgcaatgtaattaaagaggcgaaccattgcaatgatatcattaatattcatggtctctcattttgggttagcttgcttgtgagcaattttgttatgaattatgcaactactttaaaaaaagtttagtcttatatttaaatgaatacaaaagatctcagaggtccgtcaaagctttcaaggatttttgtgatgaattatggaactcctttaaaaaagagtttgtagtcttttgaatttaaatgaatacaaaagatctcagaggtcctttgaagctttcaaggaccccagctgatattcaaagcaagaccatattcaagctctcttctatgtgttaatatcaggatgtggttcaagtttatagattcatgtcaccttactatatttagtttgtagtataattttctggtccaatattttcttgactgttcgcttattgtagattttatttaaatttgaagactcaaaatatgaaaaaggaggttcacagtgtaaatttaattagtgtttgtatgtaatacaatgaaggaaagcttagtattgtgatttttgattcatttactgaactgtttgacagttatctacgtacatggtggattaaatgattattaaagttgattttgttttactggatatataaattgatgttaattacgattggtgtggtttcaggactgtgttgccttgactaggcaaagagtgaagga

SEQ ID NO: 28016 - DNA, 769 bp, Medicago truncatula
  Intron number 1 from transcript Medtr3g123700.1 (locus Med tr3g123700) derived from phytozome v7.0 (chr-ID MtChr3; po s 31171852 to 31172620)
agaagtggtgagagctttcaatctttttttctaaattgggatttaagacagcgacattaaacacttttcgtttatggaagtgcatttctgcttaatgttgaaagtattggtaatttcgtaaatttaattaacattggtatattgatatgctggtgttttggtatattggttttcggaatcggatcctctccttcagaattctctccatctctctccttcatctattcctagccattggatcaatcaaatggtggaaatattaaaaaacaaataacataaataaataaataaataaataaataacctaaaacttctacactctgaaacaatttgggtgggattttgataatccaacacacaattcttcaacttcccttctttaggtctccagtctccactctcaacctaagaaaatggtggtcacaatatctcaatttctatgattgctcacctctatgctctcctcatcgctgcaaaaattctcacctaagtttctaaatagcttgaattttgaatgaattttattgtgtattttataatttgtctcttattactacgatcaaatatattgattttatgaacatggaatgattgaatggctttaggaatatttgattttcaatctgtgatgtcatggttccttactaaaaaccaacatgttcctctgttttcagtttactgtatattttttctagcaaatggaatgactttatttgtttgttttttcttaagaggatttatttgtttcatataaacaaccaccgtaagt

SEQ ID NO: 28017 - DNA, 694 bp, Medicago truncatula
  Intron number 1 from transcript Medtr1g100530.1 (locus Med tr1g100530) derived from phytozome v7.0 (chr-ID MtChr1; po s 20900133 to 20900826)
ttaggttgaagatcatcaatcagctcaaagccaatgtagtttctaccctccttttttccaattttattgttctctatttttctggtgctaattagtttgtgatttttgtaaattataataggtttaaatatacttttagtcttgtgcaattataacgttttctttggtggtgtaagtttttttattttgataaaattagtcttgtatattaaaaaattgttggttttagtctgacatgtcccaataaaatcacgccacatgtccacatgtcgaaaaagcattttttttttctttccaatttgtgaatttgaaaaaaaaaaaacatacaacacaataacactatagttgtagggactaaaattatatttaaaccgttataattaagaggggtttggtgttcgacacgtggaagctacagttaaattcaattactttagctaagttggcaaggtccggggtttaaatcccggccaccaaaaaaaaaaaaattcaattacattcactttctcaaattattatcagagtagtgtttgtttcttaggcttgacatgtctactaattttcttccatttattttgaattttggtataattggtttacaagttgtgagatgtcttaaagtttattgtgataagttttgtgctgttttttttttttttttttgtaggaggaactcaagagtactactataaag

SEQ ID NO: 28018 - DNA, 960 bp, Medicago truncatula
  Intron number 2 from transcript Medtr3g123220.1 (locus Med tr3g123220) derived from phytozome v7.0 (chr-ID MtChr3; po s 30859621 to 30860580 reverse strand)
tttttgggttgtatctcttagcttataataatctatgttgttttttcagttaattaatttggtattgtaattaattgtttgtacttttgatttttatcattgcatttcttgtgttgggtagaactctttgtttagttaatatcttttatttttgtttgtacaaaaaagttgaaatatataatattataggcctcgtttggataaacagcttatatagatgcttatagcattatggcttataacagagcttatatcataagctcttatatttgataagctatttatgtttggatatgtacactaaaaagtacttacataaattgaagtgtttggatgtgacattacataaacaattatcgaattttaaatatttttaatttaacaaaaaaaatcaaaaaatcgaaccacaattatcaagatttttttgataaaaaataaagatgtaaaaaacaaattagagagatgctatttggtacggcaattacccaacgaaatttcacggacgcgtgaatactttcactttccacgcgctacactttgtgaatttttttaattaaaaaaaaaaaaaaaaaaaccagcttgcttgcttatgtggaaatttgtgtagactgtagagaacaacaaccctggtcgtttcccccaaagaaaacaaacctgttccttctcttgcaaacccaaatctccttccttaacaaatttatgtagatttgctaaaacagaaagtgtggtaaggaatgagtgcaagcaccgatagatgcggctgattttggaattgcagtaatgttgaacacaaaggccttgcaataatttcaatctcaactgatgaagatttgcttgaaatgacttcagaatttcctaaaatcacatgatatggagggtgattcttatgttgaatctcacacttgatatctactcattcatttaccatgatgactatatgggtttttgaggttcctggaa

SEQ ID NO: 28019 - DNA, 724 bp, Medicago truncatula
  Intron number 1 from transcript Medtr3g114140.1 (locus Med tr3g114140) derived from phytozome v7.0 (chr-ID MtChr3; po s 28818141 to 28818864)
gaggagaaattttattgtactacactcagtaagttttcattttttcttttattttgttttaatatttggtatcttttggaagaacattatgaatgaggcctatgtatatatacattaattataatttgttttaagattttaacacatgaattaagaaatgtgattaatattttaggtttcatacaaaatattgtataattttctacactttcatattagttagaagagttgaagatgggatattgataaatgattaagaatataatagaaaaaaatattaattaatatttcattgctattatgaaaagatatttaaaatgagatagtttttgttgttatactataatatgagatgaaaggagtaaatagttaactataatgtagcttgctagctgaagggacactatatattattgcaattactccctcactgcttttgaagttaaggcttttgtgatcaatcaatatgatgctaatttgttagttagaagtctattttaattttccttttaagaaagttattgccttacatcattcatgaagctaatttgagcaataaccatttatagccagacaatatttcaactcttgcagtattaattaaccaccatatactcagattatttttttagcatttaatttgattttgattttgattttttttttttttttatggtttctgaaacaaggtggacatttgcttcaatcactttttactttgggg

SEQ ID NO: 28020 - DNA, 913 bp, Medicago truncatula
  Intron number 3 from transcript Medtr3g114420.1 (locus Med tr3g114420) derived from phytozome v7.0 (chr-ID MtChr3; po s 28953563 to 28954475)
atttggaaggtgagaattaatactttattcaattcaacaataatcaaggagaaaaatgcaatcaactcttctctttacttaagccacaaggtttatataatggtttataattatgattagggaaatgttaaccggtgcaccggggcactagttaagggctttaaatagtaacttatcatggaaatatatgtaatcaatgcatcaggagtcgaaatatttcacttttttataaaataattacttctttttgaatccttaaagagtgccccggaggcactcgttaacaagacccttgtgaatatgaactacaacattgaatctaattaaaatagttactgcattatttcttattttacctttttatgttatattaatatttttgcttcattttttgatgcctttgttgaattttttggtgggggaccttagtggagtttactttatttatgtcctttctgtttcttttttaaagcagtggttcacgcttaacttttatgctggtcttactgtatatggtttcttcatactcaaaagctgaacttcaccaataaccatgatgtttatttttctaatttctactttcatccaataataatactaaaaagaatgttgaacaagcagttcaaagtaacaatttaaattactgtgaagccttttctaacacatatttccaatcataaaactactattttaagacaaaataaccacaagtgtatttgccatgattaatcttactacttttgtggtggttgtttgccggtgtggattttcctaaaatgtcttttggtcaatgtgtctctagtggtccactcaatgaccaagttgaatggtactgaagtatatatgcatgcttatacattagtacaatgcaaagtatgctgaaaaatcattgtaaacacacaggatccaaagc

SEQ ID NO: 28021 - DNA, 898 bp, Medicago truncatula
  Intron number 1 from transcript Medtr3g136080.1 (locus Med tr3g136080) derived from phytozome v7.0 (chr-ID MtChr3; po s 34229794 to 34230691 reverse strand)
cccatattcaagccttagctactggactgcaaaaggtgttgctgattcagttttagctgacaaatcgtcactggtaacttgtcgctcctttctaatgtatttttgggctcatgctattcttacggcaaaagaagttatacttatcggagcaattctaaccccaagcaatagctactgtttctcccaagtattttttgaaattcaaatatttagtcatcacccatcaatcactagtgattatctctatttagaaactaatgaaatgatcgcataaatactggatgacagggaaaactttttaagagaagggaattgtagaacctgaaaaattaatagcaaaaatgttttttttttctctttttctaaacccatgtgatatgtcattttgatgaggtatcaaaagtagacggtttattttttccaacatttactattgatcgaatgactttggtacctcagtaaaatttcacctccaattctcaattactactaggataatatggaaagatgaaattttcaatgcttgcagtcattttctggtagtaattgagcagtagactagactgcatttctatttttatttatttatttacacttggagtcttttgctacgattaatgtgagattttgattcttcaatattattttttcatttttttaaattttgactcatttcatttcaataacttttttcatcaatatattgttatctaaaatctccaagtttttattttctactgaaattttacaaattgtaaacatcagactatttcaaatcatcttcagatcaaaatatcattcaaatgatcacacttcatttgaaattaacgaatttattatttatttatttttctattcttttttctgaaacattaacattctaatattttttatgcag

SEQ ID NO: 28022 - DNA, 1007 bp, Medicago truncatula
  Intron number 1 from transcript Medtr2g034360.4 (locus Med tr2g034360) derived from phytozome v7.0 (chr-ID MtChr2; po s 9551611 to 9552617)
tctccttccaaactcgtaatctctctctctctctcgacttcaatttcaatctttttcattttcaattctctcaactccgatttcgtcttcaacatttgcacgatcaccacgattatcattttttttttgttttattcagcagatctagttttgctgatttattgctattgaattgttattgcaattgaattttatcatctaatttgtatgtcaatttttgtgtgattttgattttggtataaaattgtagcatgcagcagtatttagcttagacctcttttttcgtttgatccaacattttatgtttcttgctggtagatcacaattttgatatacaatatggtatttgatttgtgatttatgggagcttgaattgaattagagttttttttttttttttttgacaaaatgttctaataatagttagtaatagctctaaattttggtcctcaatcacaattgtggccgtaatatgcggtttttagttctttgcaatgacattgcaaccacaattgtggccgcatttgcccacatttttagaatcgtttttataaccgtttaaaggtttgcgttttagaacctttttttttaatagaagaaagtttagctgagttaggttccagaggctcactagggcttagggaagacctcaaggcttatagagcgttgatatagatacttacagattgcccgccaatgaagtcgtaatgtgggcagcgggagttgaacctacactcttgcagggtatgagtcaactccccaccaactggactgacctcagttgactaagttttagaaccgctagttgtgtggaagttggggtattttaatctttttgttgaacctttcttgattttgtgctaaaaattgagtgaagttggttgaaatgaattattgtgatagttgaagataagaggttttgtgaggtgtttttgaggaaaattatgattttgtattgtgtgttattgttaggagttgaacccttctgtgaagaacatccttctctt

SEQ ID NO: 28023 - DNA, 507 bp, Medicago truncatula
  Intron number 1 from transcript CU651566_7.1 (locus CU6515 66_7) derived from phytozome v7.0 (chr-ID CU651566; pos 30 899 to 31405)
cgtttttctcgccacactcacgttttataaatcaggtatatataatatcaatttttcttcatattttctctttttcattctctcgctattttctttcattatttgcatccaaggtaattttgattaatttgtatccattattttagacttaatgtttattgatgaaaattactaatacatagatctgcaatcactttatttgtttaggtgagttttgcattgaacattcttattggtaaaactagtatgcgttcacatcatgaaactcatttaaactttatcatgaattcacgacgctatgttggattgacttatttgagtttatctactgacataagttttgggagaacttatgatatgttcataaactgttttcggcttaactttcataagttcttcaagatagcttatgaaaacagcttatagcttatatgaaaacaaattaactttattttaccttttgctatagaaatagtttttcataaactgtttggaatctttcagata

SEQ ID NO: 28024 - DNA, 706 bp, Medicago truncatula
  Intron number 1 from transcript Medtr1g090570.1 (locus Med tr1g090570) derived from phytozome v7.0 (chr-ID MtChr1; po s 18390050 to 18390755 reverse strand)
gtggtgtaaatctaatgttaactctgacattggatcctccgtgcatctctagactagtttatttaatgcaaaagttggacagaatgcaagtattttgcatcataacaacttattactactattagggtataatatatggttccattttcttctccctaaatctttgctttgttattagttatgttcaaattgagttgttactatccagcaaccaagagaactatgattaatgtaatgaaaaattgatgaatgcagatgctaataattatacaaattccaatttttaatttggatagctcctgtttttggctttcatttatcatatgttcacatttaatttgagtcatgcatatgcatacaatgtttaacatggtccaatccagttaaaaattacatgtttgtttgcaagtgtaggacacgtgtggtgtggcacttgtgtcttccttcgtagtttagcttgatgcctttgatattcttgcatgatcgatcttgcttaatgttttggcataatctgatatacatgttttttttttattttttattttttttttatatatattagattgttatattataaataaatgataaaatgttcaaagcaataaaaacaggtaagtttccgtactcatatggaaggaaaatcagcctctacaatgcaatctttgttgtgaactgtcatgtgttcaaagtaggaggctttttcgat

SEQ ID NO: 28025 - DNA, 704 bp, Medicago truncatula
  Intron number 2 from transcript Medtr2g034820.1 (locus Med tr2g034820) derived from phytozome v7.0 (chr-ID MtChr2; po s 9778228 to 9778931)
aggagagtgttgagtctcgatcttctaaggtgagtttgaatttgtataggtattagtgttcttggtttaaagaagttacgtttgttgcaagagccagcattgagagggcaatgtaaataaacatgaattgtattcccattgtgaatgactctgctattgaacattatcaaatttcttcgtttttaaatctgattgatccgggacaaaatgaattttagggtttgttgtatatttcaattaattttaatcttttaattcttttattttcttttaaattaaattgttttttttttttattattatctaattcaaactaattttataaatgacatgaaaatgatattaatgacatggaaaatgaatcatcaaactataataatgagttaggatccgcagacatcgagcaaattaaatttatgtaatcgttgaatcattttataataatagatatttactatgttttatattatatgctaaaataagatgatgtgatggaatgtcatgtattctatgaatttttataggttcaatccacttaatgtgaattttcaatccagcggttggattaatttagtttgccttctagaaatagctagtgaaggtttaagtatgttaagtttgaaacataataacagatcctgactcataatatatagaaagatgtgtgtgtgtacatgttaattattttattgagtgaaggatct

SEQ ID NO: 28026 - DNA, 705 bp, Medicago truncatula
  Intron number 1 from transcript Medtr3g028870.1 (locus Med tr3g028870) derived from phytozome v7.0 (chr-ID MtChr3; po s 7499012 to 7499716 reverse strand)
tggtaagaatagaaaattgctggtggagagtgagggtgagttgttgttactggacattcatcagacattttttcaattcagtatgaagatttttaagcttgatgagaacaggaagaagtgggagaagttgaagaaattaggggataggattttgtttgtggggagtggatgttcgtttcctgcttctgcttgggatctgtgtcttcccaaaggaaattgtgtcatctttattgacatttccgtcctctctacttacaatatggcacacgggaaccatgtttttcacttggatcgaggtcagctttcgcatgtgtctgaatatcccgaatgtgagaacttgttccttccaccggaatggatcctcaaaatctgaattcataatagagtatgttatcttgtacatattaaaagctggtttctaatgtgatagtgattgatagtgcgttaatgtgtttagattggttacacattttgattattacatacagattttttttttaacttttacattgactattagtatctaaatttctgatttttcaggaactcaattcattttttttaaatgcagcttatgtgataagtaggaatatatgtagtacattgccatgacaagttaatattattattattaaatttctaacatagatgtaaaaatgttgttgggtttgattatatttttttattgttaggtttgcagactat

SEQ ID NO: 28027 - DNA, 790 bp, Medicago truncatula
  Intron number 1 from transcript Medtr1g121760.1 (locus Med tr1g121760) derived from phytozome v7.0 (chr-ID MtChr1; po s 26619282 to 26620071 reverse strand)
acttcaagggaaaaaaccttgtgcagcagtattctataataagtcttatccattgatgtttatggaaatcttcaattttgcacttttttatgcagcgatagacagattttacagtgaactcccccttttatttggtccccaagtgatgccaccagcatgtccataggatgataagggtaattggatgtattgcttcaaatggtaaaaaatctcattaatgagttggaaattccaaagcaccagtgtcaggatatataagatgagagatcaaacttaacttgtaataaaaataaatattgaagaagatttgatatagagtataaaatgaaaataataaatttcattactgataagaaatcctctaaaaaaagttactgagagaagagaagtgagagaaaaagggacatgtagagggagaaacaattttatataactagaacacttgactctaagttttgaatttcctatttatttgttcattgtcccaagcttattgagtttaccaagagacaaataaatgtagtggtccatcagttgggagcttcgaaaataatttctcttccaaaataatccttgatcctattattatacatatgattatgaatttttttttttttgaggaatcatatgattatgattataatttactaaaatgtaattgtttgaattgaaccaaagttttgcggatggccacaaagtttagatagcaggttcgcttgtttcttgttgcatgagtttggtttgatatacaatagggtgaacgatcaggacattgtgcaattgacattca

SEQ ID NO: 28028 - DNA, 972 bp, Medicago truncatula
  Intron number 1 from transcript Medtr2g025600.1 (locus Med tr2g025600) derived from phytozome v7.0 (chr-ID MtChr2; po s 6820271 to 6821242 reverse strand)
aagctcccaagatttcccatcaggttcttctcttagcattcacatcttaaacactacaaagttctctgcttttcaatcttattttcagtcccttttggtgggtttgtagtataaactaattggtatttgattttaatgctttttgttaatgtttgatctatttgatgtaaagggttttctatatttagcatagtaagtgcttacttaagaagattttttaatttttctgaattttgtttgtttctatttttagaatgttgatgtgaatctaattatggagtgtgagagtgaggatgaatttagacacgtgtgatgtttcaatttcaatgcctgaatggctaacttgcttgtgagcatttcatggtcatgcatgtcctgcaaattacaacatggttttgtagatctgttgttggcagtggcagtgaaagttacaattaggaaaaagaagggggaaaaatcatgcatgcggttgttttattatgcagtgatgattttaatcttgaattgatggtgaggaatttttaattttagtttatggacattgcaattgtatgtatttttgaaagtcattgaagttaataaggttgtaagatagaacattatggcgtcgtttgatccgtgtagtctattttttttctttttattaactgcaccgtctccagagttggtggaaagaaatttatagatgtttctgttgttattgtctttaatggttgtttacttgaggatttctgataatgattagcttgttaaggagaggatggccagtcattcatcacggaatcgtgtttgtatgcgatcttttgaagtacttgcattgtatttttcacttttcgtttactgattgatatatttatgtggtgctttgacacattatggaaaattgttgggactaatattttttgtgttgttgttcaactgtctttgttttacccagactgagaccgggctaaacaaagaaatatcagacag

SEQ ID NO: 28029 - DNA, 861 bp, Medicago truncatula
  Intron number 2 from transcript Medtr1g105960.3 (locus Med tr1g105960) derived from phytozome v7.0 (chr-ID MtChr1; po s 21968336 to 21969196 reverse strand)
caacacaacaatttcgctctctcgtttcattttcggtaaagttcttaacgatctattataattttcattttcaactactttaccttttgcttctgcttattacaaaaatctacatgtgattgaatttcttaggttaatacttttttcatggatgaacatttttttgcagctaaattgattttgctttagatcgatctgtaactactttcttgaattttgatagaatatttgtgtgattgttgtaaattgattggatccgctttcatcagcttcacttgattgatatttgagttttgtgtaacgctgtcgaattttcatgcatcatttgctggagtttgttgttcaaggataattatgttatctaaatagtttagaattgcatttcatttttaattttgataacattgatttacgagatgtaggcaattatcgcaaattttagctaatataatatgtaaatagtggaagcttcctatgaagtacatatacaaacacttctgatgaaaggcgtgtgtggtgtctgacaccaacacaacacacgtgattatgttcaattaattcattttaaagaaaaatataattctggtgtggatgtgtctgtgttagtgcttcatatgttgacgacaataataatttgagaaaatgtaatcattgaacgtagttgcatatgtcggtgttgtgtagtaactcatgtgagacactggacatgtcttccatcactaggatgtatctattttcttgcaatgtgaatctacatggaagtgttatttttttcgaatgtactatatcttcaagcttaaaagtgaattattgttagtatgatctgactggcttataaattggttttattaggaaagaatc

SEQ ID NO: 28030 - DNA, 150 bp, Medicago truncatula
  Intron number 3 from transcript Medtr3g102650.1 (locus Med tr3g102650) derived from phytozome v7.0 (chr-ID MtChr3; po s 25054678 to 25054827 reverse strand)
tattatttggggaggattgtgagtatcttccgccttttttcctttttgtttcaagtttcttgctaagtaatcattttttcaagctttaagaaaaagactcttgcaaaaacatgttcataatatttgaaatttactatatgcaggtctctg

SEQ ID NO: 28031 - DNA, 947 bp, Medicago truncatula
  Intron number 1 from transcript Medtr1g025700.1 (locus Med tr1g025700) derived from phytozome v7.0 (chr-ID MtChr1; po s 6413098 to 6414044 reverse strand)
tcctccatttgcagaaaacactacttcctctccaggtatttaccatattaaacttatgaaaagatcatagaaagttttacttacagcattgaccgtttctttaagttttaaaataattttgatgtaaattagttagagtattttgtttaaagatttttaagaaaaatatgtgattttgtgtttgtttaaaattatatacaaaaatttctcgtgagcttaactcaaatggtatgaacaatgcattgtcatatacaatggtcggagttcgaacctcgacaccccatttatacaaaaattcatcgtgaatttttaaccgatagactacttgtacttgataaaaaaaattatatacaataaaagtctatgttatgtttataatggttttcttctaaaagctaatggaaataccttttcattatcaacacaattatttatttgaaacataataattttttaaaaagttacacacaaacataactaaaacataaaaaataattttttgataatcttaaacaaacaaacattatatttgtttgtaaaaaaaaaaagcattatatttgttaaaaagatttcaaaatcaagtttatggtggtctcccaaaaaaaaaattatggtggtctttctccgtgttttacaaaaactcttaaaactcttttctctgcctaaatcatctttctctcatttttttaatggatgatattttaatgtttcctcatgtcacatgatcaatttccgtgcttgactatccttgatacattaaattttctcttagtgagtatagttatttattttgaacaacgaatattaaaaaaaaatagaaaaaaacaattaattttgttaggttttttgaggaaataaattttgttagttgttaattgtttttgttaaaggaaagtttctttgcttgtgcaggaaaaagcaacaacagtactaccataggtatcgct

SEQ ID NO: 28032 - DNA, 559 bp, Medicago truncatula
  Intron number 1 from transcript Medtr2g010760.1 (locus Med tr2g010760) derived from phytozome v7.0 (chr-ID MtChr2; po s 2667178 to 2667736 reverse strand)
tatccactcttcaaagtggtgagtcctttgacttttgattagttctttttcaaaatatgctatttatcagttataattgcctatcctaccgatttgacattcaccacgacacagtgttgtctatcctcaactgaaatattcactcctctcgacttaaatataagcaaaaaaatacacgtatcttgtccatgtttagacaagttacatggtgaaccagatacatgtactttttgcgtttatttaagttgagaggagtatgtatttaacttataagaaagtctttgttggagaataagtatttataaagaagctaaccacggacgtttaggagataaaatgttaacttatataacaagctactgtttaaagacttgaaatattattggatgatcatttttttttcttctatctaaagattcttgttgaagggtagctaagatatatagtaatattgctagacttagtttccttgtaattatgtaataaggaagacagtctaatataagatttgctttgtggtacagttgcttggaagccttcttgcagaagcttagtagca

SEQ ID NO: 28033 - DNA, 761 bp, Medicago truncatula
  Intron number 3 from transcript Medtr2g026190.1 (locus Med tr2g026190) derived from phytozome v7.0 (chr-ID MtChr2; po s 7117775 to 7118535 reverse strand)
caggttggttgcatttcttgtcatttattttgtatcattgattgataactggttgttggctgttttttttactttagttttatacgtttcaatatgaatgaatgtgaggttttctgtgtgtgttgtttatatatgaatgttaatgttaggatggataagtagtcacgcaggataacataggatatgattaagaatggaattactagagaaaaaatgagtagctaccattgtagaaaatatggtagaaatcactagcacaattcggaattgcgttgaaatcacattgacatttgaagctatgtattggaagtaagtttgaacctatacgacgctaaaccaaacatgacctagtccaagtctaggtggtctatgaatgtatggagaagattcatagaagcacttataaggaggatagatgagataaaattcaattcaatgtttagaattaaagggagactggtgtatctaaacctcagtgaatggtgaactgttgttgattccgagactcctagagacagtttttcgtattatatgttttgataccacggtttcaaacacactgatatttgaattttaaattggtttttgttttccattaggtggtgtgtgattcataataagacattttgaaattgttgtattcatgtggttgcatcacctaatgaaaaaagtcttagctatagatacacacatgaaattattgtacatagattatgcttgcagcttttctgttgctcaagactagattttctttggtacag

SEQ ID NO: 28034 - DNA, 536 bp, Medicago truncatula
  Intron number 1 from transcript Medtr2g013880.1 (locus Med tr2g013880) derived from phytozome v7.0 (chr-ID MtChr2; po s 3320627 to 3321162)
tttgacatatttgttctgtgcaatctcaggttcatcaattcctctctttgtcagctttgttccccaatataagagatgttctattttctatttgttaactggttgctctgtattgaaatttttgtttttaatgaaatgggtttgtaatctcaggttcatcaattcctctctttgtcagctttattctttccctttcatgatattaatttttactttgatgggttgctcaggacataatttgaggatatagactgcatttgtgtttgtggacgaacagtggctggtttttggtgttttagtggcagcttagcagttttaagttttctgctgttatagctctcgacttgcttttgatgcttcttctgtttggccttttggtgtttcagttttgtgctattaggttgttttgctgttacaagataatcctacgagataatataatattttgtgataggataatttttatatattctaactttctctcttttttgtagcagaatgagctagcattcgatgaaaaaagctgtaaagaagca

SEQ ID NO: 28035 - DNA, 288 bp, Medicago truncatula
  Intron number 1 from transcript Medtr3g067100.1 (locus Med tr3g067100) derived from phytozome v7.0 (chr-ID MtChr3; po s 15292015 to 15292302)
cattgcgttggttctaactttaggtaagaaacatatgaactttgaaccttaattttcaaaaaaaattaattatttcttgatccgaaaaaaatttgatataatcttttacattgtttttttttagagaataatcttttacattgttgtaatgtagttaacatatataaatataaatctatagcttaattcttcaaaagaaaaaactataacttaaatatgcgttttgaatatgtgaattttatttttgtggcaggaccaacaccaagtttgagcaactgcatttatcct

SEQ ID NO: 28036 - DNA, 628 bp, Medicago truncatula
  Intron number 2 from transcript Medtr2g117530.1 (locus Med tr2g117530) derived from phytozome v7.0 (chr-ID MtChr2; po s 27641242 to 27641869 reverse strand)
aatacttgtggtgctgtgaaatgtgtggatgatgatgatattcaaattttggacaaagggtgggactgctctttgggggaagtagctaggttgtcttgggtgggtgggaattttatttttggtttttttctcatggcttggatgttggagatgatggtagttatttttgtgtggttccctccctatatttttatctggatatgaatatcttcgattgttatttgatttggctagtttgttctttgattttttgcttgatttggttagtttgaccatttggcttgagttgctaagttcattgcctctttttttggtgaagtgctaagtttgtgtttgaaagaattctgatttgtattttggattgctaagttggtttgtacttttcagttgtagttatattatggtttgtgataattggagccaatatagagctctggaaaaattgcaattttccacattccgaaccaaaccatcctgtatatcatttgggtagtttggtttgtgtacggtcacaataattacatataccctatcacccgtgacacccttgtataccctcatctccattacactattcttcatcttcttgctaacatttttttttgtgtgttttccagttccatttacc

SEQ ID NO: 28037 - DNA, 896 bp, Medicago truncatula
  Intron number 1 from transcript Medtr3g081060.1 (locus Med tr3g081060) derived from phytozome v7.0 (chr-ID MtChr3; po s 19273028 to 19273923 reverse strand)
caccaataaaacatccacctccctacctaaaaaacgtctaccaccccacttaatcagctcccgttcatcaatgttcaaacaccagatcaagtccttattatacacgaccaccccatctgctgattatgaatggttatgttgacattaaacatattatgtaaagctttctccagaacatcatccgatgtttgtaaaaaataactactttgagtgtgacatttcctataacggattcaagctgttttgacccaaacaatttctgcacaattttgtagttgctgcaccccctctgaaaaagaattacttctatgttcctggaaaaaaaaattgttttttatttttgttttatgtatctttactgattttaatgttatgcgaggtttcattgttcctcatttatttttgggaagcctcaaattttgtcctcaaatggtttcagcacttctatttgaaaatcttattttgatgtccttatccattcttccttggtggataaaaaaactttcttctaagttctaatagtagcagtagcactgaaggataatgaaattcaaagttttttattttattttatggaattatgaatttgtaacattatctctgatcaaagttgttacttagcatttgaaccaagtgaccgaaaccttgaaccgtttttgggtcctttttggctgtttttccttttaaaggttcacaaattgaatctgtatttttacacaataagtcactttttatttatacaagcttcggaagaaacagaaatctgatttttgagtttctaaatttaatggattttgattgtcatgtttaaattatatggactccatgaaaaaaagtgatccatggttcctctttttgcaggtgtatctcaacattagctatactcccaaactttg

SEQ ID NO: 28038 - DNA, 512 bp, Medicago truncatula
  Intron number 2 from transcript Medtr3g142740.1 (locus Med tr3g142740) derived from phytozome v7.0 (chr-ID MtChr3; po s 36657078 to 36657589)
atcaacaaagaaacctcctgcttttggatttcacggtaagtacaatacttgcatgcaactattctcttctatcttcattcttctcaaattcattggataatcatttctactaggtggtgtcaatatgagtcctttactgttgattatcaaatctttttttatctttgtctatagtaccactatttaagtcaaaacaaaatttatccattttttgaaagaattattgacaaatctcgctgttacaaacaaatttgattgcctataatattaccctatactaatggaccgtccatttcgtaccgaaaaagtataccgttcaatttatttattttttgtgcaaagcagatattccatccaatttgactttattattattattttggttacaaatttgaccaattcttattattgtataataaaaataaataaatattgtccgcagttggttgtaaaaatctcttttgtttctttggtgccgtgttctcagatctctgtgagtgtgtgtgtgtgaa

SEQ ID NO: 28039 - DNA, 1029 bp, Medicago truncatula
  Intron number 1 from transcript Medtr3g114770.1 (locus Med tr3g114770) derived from phytozome v7.0 (chr-ID MtChr3; po s 29129658 to 29130686 reverse strand)
taaccaactggcctacttgctccaccaaaggttatctattttgctcaccacattcattattggttttttttataagattacttgctttggtcttgatgaaaagtatttgaaaattgtttataattatactattttatacagttttgttcataataaaaaaagttttttgttcataataaaaaaagtttagtgtgttgaattctagacactaagaatcagagtaagtctcaatagtaaaaaagaacattcatagatctttctacggtagcacaagttaaacgcacacttctgcaaaactaaactactatctccatctttaattatgtgactctttagcatgtaagtttagtttttaacggtggtatattcctaaataaataattagtgtagttgaaaatgttaaaaaaaccttataaaaatgaacaaaatatttctcaaaagatcttataattaaggctaaaatatggcattggtccctgcaaatatgtccagttttggttttagtccctgcaaattttttttatagtttttagtccctgtaaaattaattttttttggaaatggtccctgtccccaattatgtgatgatttgtcacttttgtgcatatgtgtcatatgatgattgtgcttacttgtccagttggcatccacgtggcaagacactcattttaaaatcatttttaatcatttttaataaaaacaatattattttttataattcaaaaacaataattattttttaatttaaaaataataataaaatagatacaaaaggggaaaaacgttagagttcctccctttcttctgtcgatctcaatcgccatcctttctgcttctgcttcttcaaaatcaatcgtgtaagtgttattcttctattcattcgatcctgttatggttgttattcgtcttgactgtttggttcatttcgtttcctttccattcgtttcattttttggactgttgcggtttcgtaatcgacggctttgatttgcaggtttgcctgggttttgggttaagcaacaatcgacg

SEQ ID NO: 28040 - DNA, 916 bp, Medicago truncatula
  Intron number 1 from transcript Medtr1g025440.1 (locus Med tr1g025440) derived from phytozome v7.0 (chr-ID MtChr1; po s 6299450 to 6300365)
aatttcttcgcaacactgattttcaacaacaacttgttagtattcccttcattcttctttcattacatgttctaaagtgttcatatttgagtattcattacatgcacttcatttcatgttcatactattttcaacttcttttatttatttattctttttcattattttaacttgcccacttttttatttttgtatctttttacaattcctttaactgcagttagtttttttgaagaaagttttgagcttttgattttttgatatgttcttgaagtttttttttttttgccatgattattatatttatacacctagatatacttgcttgtgtatatactatgaagcacggacacggcacggacactgacacgccaacaccgctaataatttgagaaaatcacataattcaatgtaattatatgtgttggtgtcgtgtcagggttggatgtatgaagcatggatacggacacgacactgacatgccgacacaactaataatttgaaaaaaaaatcacataattcaatgtaactacaagtgtcagtgtcgtgtaggcgtcggacacgacacgtgtccgacaccgggacacgcctaatctgatgagtgtccgtgcttcataggacacgacacgtgtccgataccgggacacgcctaatccgatccgaggagtgtctatgcttcatagtgtgtatatataatggcttgggaactttgtagatctgttgttttttcttttgagacaatatgttcatggattcaccaacaagcatggttttgtggattaaatgaaaataaaaggaagtgaataaggagattaaaaatgagtagtgtaaattatgtacttgtgatgattattgattaatgtttatacatttatttgcaggcacttcctaaaacattttcagacaatttaaaaaa

SEQ ID NO: 28041 - DNA, 366 bp, Medicago truncatula
  Intron number 1 from transcript Medtr2g033950.1 (locus Med tr2g033950) derived from phytozome v7.0 (chr-ID MtChr2; po s 9405296 to 9405661 reverse strand)
ctgatctcactttcttcaactggaggaaacataaggtactaataatcataatctataatcacatatttttctcactttcttgcatgcattgcattattcatggatgaaatggtagtagcagtaacagtagtaaaccgattttggattaacttttttgagcttatctactgctataagctcttcagtctgtttgggagaactagcttataaaaacaatttaaggttatgtttagctataaaaatatcttttgtaagcttatacataagcgtttttgtgcaataagctgtttatccaaacatgcccatattcttcagttaatgttttttatattatttaatttctttaaaatttgtaccttcttgcag

SEQ ID NO: 28042 - DNA, 881 bp, Medicago truncatula
  Intron number 2 from transcript CU179634_5.1 (locus CU1796 34_5) derived from phytozome v7.0 (chr-ID CU179634; pos 17 530 to 18410 reverse strand)
tctgtatctgtccaaccagagaattggctattcaggtatgatataagatgcgaataccctttttcttcttctttttgttgttgatttttgttttcgcctgcgcctggatcttgttactggtaaacaatttccttaaacttagtatggcttaggcagatggaaagaaatcaagttatctgcttaggcagatggaaagtaatcaagttctccttgttggcaaccaggggtgtggccaagttattaatcaagtggttgagagcgcgacatcttaggttcaaaacactaggtgactcttcttatctgtggtgagaggttaaattagtcgaggtagtctcctagatctttgatcaacaccattgacctaggcctatctttgggtgtaacaataatgttggcattggagagttaatttcttgcaggatcaattacttcacaacccaatgcgtagctaaatagaaagttttgcgcaacattatgagtgtcagattatgcatgtgttttagttttctatatgcttcactagatatctatttccagaaaggtatatgctgcacgacatatctatgttatagaaactttacctacattgcttgtatataatgttgcctgtatggttatgttttatgtgttcatgcatatagtttttgagatggccagacatacgcgaagtattcatatttgatttgattgtttgccatctgcagtggtggtttaagctgtttttatgggaaattgtagaatcaaaaaggaacttgtggaaagaatgatattttttagcgtttttacattttaaagaagaattaagacttttcttcattattcaacaaacaaaaaaatactttagaaggtttagttttaaatggttgataatgttacagaat

SEQ ID NO: 28043 - DNA, 619 bp, Medicago truncatula
  Intron number 1 from transcript Medtr3g036680.1 (locus Med tr3g036680) derived from phytozome v7.0 (chr-ID MtChr3; po s 9745738 to 9746356 reverse strand)
atttcatttcacggatactaaggaattctcaaaaagtaagctttttcttttcttttctattattttcaatttttttttagtttttttccccctttttttcttcaatgtcagaaaattagtaggaagaaagatcatttttttatgtgttattgtaagaagaaaatgttgggttattagttttgattgtttttggcaaatgggtttttctcagaaaagggttttgtagtgaggtttctactttcatagtgaaatttggttcctttgagtagttttagttttttggggtgtttttgtttttagttcttaattcattaagttgattgtttgttgttcttggaatgtttgtgtctggcattgttgatttcatcttctgaaattggcaagaatttgttttttttttttttttttttttaatccagagttccatcggaaggtaagtgaagtccgaccacaaattattctaattgaggatcgaactcgggttctcccgatggaaagaatttatgtttttgatttcttcctgtttcttatttatggaggttattcttagttgtttgattatttttttatattctttttttcaggttttgttggttctttttgctgccacttgaagagt

SEQ ID NO: 28044 - DNA, 722 bp, Medicago truncatula
  Intron number 1 from transcript Medtr3g147190.1 (locus Med tr3g147190) derived from phytozome v7.0 (chr-ID MtChr3; po s 38022482 to 38023203 reverse strand)
gcgaggaagttaggtagaagtatgctaaaatattattttgattgtccccgtgagtttagctcaattgctaagaacagcgcataatatatataaggtccaggattcatactccagacaacaaattttttttttgatagactcaatccaaaggcggtccttactagttttagtatatttgaataaaatacttttttttaaggagaataaaatacttttgttttctatttttttatgataataaaacaatttttcttttactacaaatgataagatctacctttggggtcatatataagaggttcatattagttttttttttgtttgttgaaggaagaggttcatattagatattatcatggtttttagctttgggctcatatttaagaggttcatattaaatctttttttttttttgaaggaagaggttcattttttagttttgggtttatatttaagagattcatattatatatttttttttgtagaaggaagaggttgatatttagatattatcatggtttttggcttgatgcctttccactaagttatttatcctggtttattttttgtttttttaaagttatttattgggcgtgtttaatatggttctccaaaaaatggttcaaagacgaattttataataataaaaaataagtataaaaataatattttattaaaatttattaggtatagcaggtaggttggggaggtgcctttgtgag

SEQ ID NO: 28045 - DNA, 561 bp, Medicago truncatula
  Intron number 2 from transcript Medtr2g071190.2 (locus Med tr2g071190) derived from phytozome v7.0 (chr-ID MtChr2; po s 16340575 to 16341135 reverse strand)
taagcttatttgattcaaaaaaatgtaagcatatcttcaacttctagcatgcctagatgagctaatcttcctctatttttgatagtgtttggtttttctgtatatgactagcatgttctagcaacttgtcatgaaaagtagcaacattcatggcattttccatcagaaagatctatcaaacctggctcaacttttgaatttagctatcatcgtcttctgtttatgaaaatcaagtgaaattggttcattttgaaatcatttatgttatttcaatgaaattgaaaccggctattgttatgaaatttgaatgttattagaattgatgcaacattgaaaccatgtattgttagttgattttgaaactgttttaacaggaaaagttaagatgaaaagtcgggatgcgtaaagtatcactttgaatatgatgatcggtttttagtattattttgttgaaattttttatgaacgacaccgaaatgggtcgtattgtatattatatgatttatatattttagtttatttttaaagctgccaccccaaaattttaggtctggctccgcc

SEQ ID NO: 28046 - DNA, 725 bp, Medicago truncatula
  Intron number 1 from transcript Medtr3g009910.1 (locus Med tr3g009910) derived from phytozome v7.0 (chr-ID MtChr3; po s 1594376 to 1595100)
aacacgcaagactgaggtggaagcgtgttactgttgtgtatgactatacatccttaaaattattattaaactattatatttaacattcatatattttaaaatttctcctaaaaaacatttattgtaaaattggattaaaagcaaaaagttttaaataaaataaatatatcatatacaaatttaggtagggaccgttcatataatagaagagatagtcaaaaataagttatgtatgaaatattaatacactttcaggaacaccgaagaaatctataatataagagtgagtatgtggatcatcgcattaaattaaggattatgctagttaacaaatgttttaatgatgtttgttaatgattttaaaaaaataaacaattgataacttttatgtacaatcaaaagttgttttataatgtttcaatatgatgaatacataacttttaagataaatttttcactttacatttcgtgtcataatgatacatgttagcatttcctttaaattaaaagtaaccatataattgagttctagacaaatcattattactcaaaatcttaagacaatatgcttatatacgagtcttctcacttatacgttgctcaacatgtaatctttcatctaatatgaatttttaactcaccataaacattctctccctatagtattaagactctgtgtcgttgattaaggaatcattcccgctcctccacaaagtcgaatcaga

SEQ ID NO: 28047 - DNA, 383 bp, Medicago truncatula
  Intron number 4 from transcript Medtr3g132970.2 (locus Med tr3g132970) derived from phytozome v7.0 (chr-ID MtChr3; po s 33564482 to 33564864)
caggtaaaactattttttccctatacaattctaaacttaaactagttctctagcctataataagtttatattttttcccattctgatcgatccaatatttctttaacataattccatctatgagtttctaggtaatgacattccatttgtgattttaggctaggggctcgtttggattgccttattttttagctttgaaaactagcttatgtaaatcatattttcttatgctaccttgacaagctcgtgaagaataatacataaaagctgattaatttgcataagctcaaaataaaaataaaaatcccacaggcccaagttatgtgtgtgctttctggcttcaatatttttatcatttgtttgtagtatttggagcggcgaga

SEQ ID NO: 28048 - DNA, 715 bp, Medicago truncatula
  Intron number 1 from transcript Medtr2g037060.1 (locus Med tr2g037060) derived from phytozome v7.0 (chr-ID MtChr2; po s 9975941 to 9976655 reverse strand)
acaaagattcatcaacttgttttcaaattcctcaggtatattataattagtttggatcctaagagatagtttttttttttctttctattttcttgttgtcgttgctctctatactccaatactggttctattacttgttgtcgttgttgtctatagtagttttattacttgttgcactgaccttctttctattttctagttgtcgttgctatcaatttgattattttttctgttttgttcttttttattggctgcaccgttgtggtatttacttgttttatttttctttctgtttacttgagaaataagctcagtaggttccatgattttctttgtttggaatgcttatcagaaagagtgttagtgttatattaatgtaatgtagaagatctctacacttgtttttagtacttgatagtattccatctatttatagtcgacaaagaggaataagaatgtaggtactatataatagggagtgacttcataattgccaataattaccatctgacacaggtatgggaccacttcagcctgaagaggagccagtttatgtagttagttttttagaattaataatagaaacattacttagtaactctctgttttcttcttttttgggaccatttttgttggctgcagagttgtgttcattttaggaatacacactctttgtttattctttgtttgactttttattgttaattctaggaat

SEQ ID NO: 28049 - DNA, 538 bp, Medicago truncatula
  Intron number 1 from transcript Medtr2g121160.1 (locus Med tr2g121160) derived from phytozome v7.0 (chr-ID MtChr2; po s 28680882 to 28681419)
agctaagaaaagaagaaaccttcctggcaatccaggttcattttcttaagttctaccatcttttgttttcatcttaattgttataaattgcggatatagttgcggttatgattacgctatgaaccatgatattgtggtaaaatatggaggcaaatatggtcgatgcagcggcaataattgcagttgtgatgccactgcaatgacctctaattaaaccggtatatttcagctgcaattgcagatgcaaatggcaatttagaactacacgtgtgtttaacatgttatgcttgtttggaatcacggtatttgacgttaccaccgtgattttgtcgaagctcaagagcgtatcttctgcaaactcacggtgactggtacaataatttcaccaaattcctagtgaatccaaacatgcgcccattcttgttttatttatctaaattggatttttttttttttttttttatttgttttgtgtttgttttttatttgattattcattttagacccacaagctgaagttatagccttatcgccaaaa

SEQ ID NO: 28050 - DNA, 727 bp, Medicago truncatula
  Intron number 1 from transcript Medtr2g096430.1 (locus Med tr2g096430) derived from phytozome v7.0 (chr-ID MtChr2; po s 22353636 to 22354362)
gcaaggtacatttactaactatagatttacattgggatatatatctttaaatgtgtgactttttaaattgtttgtgcccctccctctgtaacttataatatttggatatgtatgtcataatgcatagattcaattttgagttggtaagagaaaagttaactttgatagtttggaatgatctgcataattattatcttaaatggttagagtgaaatatcaattgagattttatatattattagttttgtatacacctatcaattttttggattaatttggcctattattgttactattgcctattaatattataatcctgagatgagtttttttgtttattgtgccagcatctggtgtatgtattaatctaacataagtgattagaattttttttgtaaaatagaagaattcttattttgtgttatacataaatactcctataaattataaaagtagtgatacatatattgaaatgcagttttgttagattagaaacttttatgaaagctcttttgtagtgcatctttagtttttgtagtgcttattatgttggttttattatgtttctagttagtttgacatatcaattaatcttatcttttgttaacagaatgaatttacacacaaatgggatactttgacacaagaagcatcttcgcaaggaatgcctccaccaaatcagctagaggtgtggtttgatgttgcagaaataaagaaaggataatat

SEQ ID NO: 28051 - DNA, 897 bp, Medicago truncatula
  Intron number 2 from transcript Medtr2g104190.2 (locus Med tr2g104190) derived from phytozome v7.0 (chr-ID MtChr2; po s 24505299 to 24506195)
ggctaagagttccttcaaattggaacacccccttggttcgttcttttcacccttttgccaatttttgttttattaggttatattggatgatgcaattaatcgattttatgttttggttattagacattttatttgtttaattttatggtttggaatttgaaaaattgggttttgtcctattatgatcgttatgtgaattttgttccttaaagttgaaaatttggctaaaaaacatttgtaatatgaatccgatttttgtctgtccagcaaaagaatgattaaacggttattttggttcctaaatgtttgatgctccgtggttattgtccttgattgaatgtagattacaaatacatatagagagtgcccttgttgttaaattgttggtaattttatcgaccaaagtgactaatgaaagatacattccaggactaaactaaatatcgaaggaatggaaaatcagagaataaaaaagatacatttaggcatatttttgtaattttgatacgtttaaggactattgtgatagcgcctcacattggaggatgaaaatgattgtttacttgcaaaagatgaagttttgcaaaattaggtgcaaattgttgtgctttttctctatttagtttagttgtaagcaatgaattaaggtatattgcttgaatgcatatatactattttgtattgctttttcagttctgctatttggtttatctgatttgaatttcttatcaatgagagttagctgttgatgtatgaattatagcattggttttgtctttgtggggtgatatgattgtgtatccatcactaccaagttaccaacttatgctctctgatttgtactataaactttatgattcagagaggagacaggctgaagctgctcgcataagggag

SEQ ID NO: 28052 - DNA, 923 bp, Medicago truncatula
  Intron number 1 from transcript Medtr1g094110.1 (locus Med tr1g094110) derived from phytozome v7.0 (chr-ID MtChr1; po s 19390596 to 19391518)
gtacgtacgtaatttctcttattcttctattagtttggattcaaattcatcatgtcgtgttattctttgtaatgccgccgatcctccacgatcaatgtgaattctttggaatttccaaaaagtaaaagaaaaagaggttttcgaatagtaattgttttgcttgtgccaccccggattctttgcatacaaatcaaattagtcctacccgttgccagaggatttcattattacgattcttgatagaactcataaatgtgagaaaagtgatgaattatctcactgtttttttggttacatttagggaaaaggggatttttcctacttttcttttactgatagttagaacaagtattgatttagatgggacattaagattgaaatcaatattgaggttacgattctgaattgtgactcgtggtggtatttatttaaacatgaacttacactttttattaccatttttagactagtagtttctgatttcaggtggtagtacatgaatatttgtgggtttttctagattggaaaactcaaatcatctcctaataatacgccaaaatgcgaaataaatatcttctcgtactgccggtagctggccataaaactgacttttctatcaatgcagtatccagttggttattaggctacaccgtttgtggtaattatggcataagattcttatatatttttttttttgttttgatgttagtatcagggtcctttctaaccaggtgatagaaaatacaagacatgtttgatacatattctagtttagtttggaatttataaatctttattagcttttcttactgacaaggtggtgtaaaaaatcattatttagaacttaaatgagatcttagaataaatgatgattcctcatcttcatctgcaggggactccagtgaatattattgtgggttctc

SEQ ID NO: 28053 - DNA, 666 bp, Medicago truncatula
  Intron number 1 from transcript Medtr3g012730.1 (locus Med tr3g012730) derived from phytozome v7.0 (chr-ID MtChr3; po s 2203684 to 2204349)
cattcgagatctgatcattccaaacgaggcaaaaggtacgtacgtatatgaaattagtctttatgcttggtgtctctaatactagagagatacaaattatgttttctttttatgttgctatttcaactttttgagcttatgaaatttatgttttcagaaaagatatttgtttgttgtgttattataaaattaaaaatgaacctaaatcgtagaagagtttagaggatgattgtgatgaattaaactaatgaaatgaaatggatgaattacatgaaaatatgaatcatgatacaaagttcatgacacgattacgaaatccaactaactgcctcaataaactaactaactccactgacttgttcaacaagtcactagcatactaactaaaacagctaattgcacaatatgaatcaattcacgaatcgattcactgcttacttgtattacaagtaaaagtaattattcataaacaagaattatctcacaacagttacatggaacttgttagattcattagaatttaattttggtcgacgccaacatgagtgaaagatgatgaagagcaaaagaaaaactagctattattgtgtataatgattgaatccatgttttttggggcaatacaatatagaaattcaggtcaacaacaccgggcaaggaaggctc

SEQ ID NO: 28054 - DNA, 548 bp, Medicago truncatula
  Intron number 1 from transcript Medtr3g148390.1 (locus Med tr3g148390) derived from phytozome v7.0 (chr-ID MtChr3; po s 38624898 to 38625445 reverse strand)
ctgccgccttacctttttccaggtgatcatttaatttcttctatttaattatttgtttagttaatttagttatttcagttaaggtgctaattaactaggattatgtatgtaatctccttatgaaactagtgtatcccgtgaaagatttcacggtgtagagaaataaatgattaggtgtgaaattctgacacggcacttgctactaattaggattgtgttcaactacctttttttaatatgcgtaatttgatcattttttcttagagaaatgctaggaacactcactttctagcacaaacgcttttatttgatgtagatctcgcactttagaaatagtttttatatagagtggtgagactcactggagtttcatcaaataaaagactgtgttaaaaagagtgtgttcctacttactaacattcctcttttgcttaccattcgttcatgattgattatttatataaactatgagttagttgtgttgcataggatgtagttttgttgtgttaattttgtttttcactcaaatatcagaaagtcggcggatc

SEQ ID NO: 28055 - DNA, 723 bp, Medicago truncatula
  Intron number 1 from transcript Medtr3g127850.1 (locus Med tr3g127850) derived from phytozome v7.0 (chr-ID MtChr3; po s 32509082 to 32509804 reverse strand)
tcttcggaaccgttggcacaattgtactcacagtatgtttattatatgttctcatatcttccgggaaggaaatgtctgtgttgatggtctaacagccatggggcatgatttgcaagacatgatgtggttctctcttttgcctccatctttaggggcggattttgctaccaaactatagattcccctagctatttcagtttctagttttctgtatatatttattttctttcgagagtattggcttagtcccccctctttgtaatttttttcccactttttaataaaattaatgtattgaaaggtggcagaggatgggtgtgtctgtttggtgccaacctagttgggatgcttcagattctccaagatgcccaacctttctcttagccttataaaaaaaaaaaaaaaatcaaaaactaatttttcctttgaataaaactgcagggactaattaatgtgtgtattattttttgttagagactaaaataaactaggaaaaaaaatgtgagagaccaaattaaatttttactctacttattaaaatacatataccgattttgtgtgatatatcgcttgaatcttttataactttgcaacttaagaaattactttaattttttttttttttgtgagtagttctaatataaaaaaattattttataacaaaattgacttttgatgttaatgaaagttgattcgtttgataaggagttgaccgatatcctg

SEQ ID NO: 28056 - DNA, 810 bp, Medicago truncatula
  Intron number 1 from transcript Medtr2g041810.1 (locus Med tr2g041810) derived from phytozome v7.0 (chr-ID MtChr2; po s 11598232 to 11599041)
cagctatatcagcgtgagtaaatatattgcagtgaataaaaaagttaaattagttgctgaaagatatagtgtaaattatgttagtcctttgtttagggatgagagttacacttaaatccttaaagtatatttatttgatcaaattaattacatattttgaacttagggggactagtttagctgcttaggtataacttatatttcaggaactgtgttcaagagttcacacaatcattgcacgtggttcatttggacggttgaatagaaatcacatggctcacatatagtaatttgacttctctaagacgagaaacaccttagaagataacataagtaatcttaaccgttgaggagaaatcatataaatggtggagtactggagttgtgtaaatttcgtactttatcctgtaaagtgtgttgctcatattagaggagctaaatcctacattttgacttcagtagatcaggttcaaaacagaaatttagaatgtgagccatctgatctttcttccaatagtttcaatttgctaaacgcagtgaatctgcgaaccaaattgcaaatttactacgtacttaaactctttcttgatcttaaccaaattaattactatattctttatctttgtacgagcaccattgtatatagtattttttatatatatggatatgcataaggagttagaaaatatattttataatcctttgttcgttttcatattgttttctatgtgactttatcttaaattggttttcctacaatctcaaagttttttttaattaattttcgtaatttatacatgcattacagat

SEQ ID NO: 28057 - DNA, 633 bp, Medicago truncatula
  Intron number 2 from transcript Medtr1g117430.2 (locus Med tr1g117430) derived from phytozome v7.0 (chr-ID MtChr1; po s 25161405 to 25162037 reverse strand)
aaactccggagaaggaaggctattgttctctccaggtgtgttctgcttcattctcgggatcaaattcaatatccctaatgagtttcatgtggattaactcagttcagagttacttattgaataacttaagttactgcgacagtaccttttagtttagttactccgcattattcattataaacattgaatttccgaaatccaatcaactacacaaattttcgaaagaaattaaaactatttgaaagttcattaaagaacttcaaatgaacgtatagttatatttttttttaaatgcatgtaaacatcgtctgctagattgcatagatacaaattctaattatatgaaactatgtgtacttgatctttaacatagtatggcgataatatctggttagattggtgaaataatacagaaaaaaaagcataatatggtgatagtatccgattagattggtgaaattcaatgtttataatgagttattaaatggaataattcagctttgagttactcctggagtacctagatatgtcttctatatatatgtatataaagttaaatgtgtatctaattatagacatgtttgatgctttgttttagttagattggttgtggacagaagaaggaaaaacact

SEQ ID NO: 28058 - DNA, 688 bp, Medicago truncatula
  Intron number 3 from transcript Medtr2g014380.1 (locus Med tr2g014380) derived from phytozome v7.0 (chr-ID MtChr2; po s 3659586 to 3660273 reverse strand)
ggcagtaatttggattttccatcaattatagacatgtaagtgtgccaattttcaaggtgatggtacatgttgccgttgttttttatacacttttaataatttattgtttttcataatcactcttgtcgggataaaaaacttaattgagcacttatagcataaacacttatcatatataagtgcttatgtattagctatttttataacaaatgaaaaataaagtcaaactgtttcatataaactataagctgttttcatatactatcttgaaaagtttatggaaataagctgaaaacagcttatgaacctgtcgctagttgtttccataagctcttcgtaacaacttcacgaatgcttatgttagtagataaactcaaataagggcaagccctaataaattcagcgatatttttgtccactacgatttaaaatgcgttgatttaccatattgcatttgtttcccattaacaattgaaatactgaaggtatgtaatatgtatattggctcgtatttgttcaaagccaccggtgattagaggagtcaattttgttttgactaattgggaaaacataagtattgaccggtaattgtgtaactatagtattcttactagagtaaaaactcatgaagttttctgttttgcattgcacagtgatcttagcaacaaccacattggaggtgctattt

SEQ ID NO: 28059 - DNA, 999 bp, Medicago truncatula
  Intron number 2 from transcript Medtr1g087440.1 (locus Med tr1g087440) derived from phytozome v7.0 (chr-ID MtChr1; po s 17630360 to 17631358)
tgtgtcggtttctttagcttccaacaacccctcttgtgagttttatcagtatgtcaatgcattcgtcatgatgaatctgtgttagaattttgattagattatgtggcactcacacttcaaattgaaggttgtctggtgtccaacatgtatcagacatcgattagttcaattttctgaaattattatccatgtctagtgtcagtgttgtgtcccgtgttcatgtttgtatcagactttcggtgtttcattgcttttgactgttgattaagtaatagcaagcattgatgaataaatcgtatattatacgattgcattcagtttcagttagttgaatctaattgcaattaattagttagttattccaactgttagaagtctgttataccatctgtctagttacttaatcactcttcagttatgtctctcattttgaggagtgcaggcgagctagaaacactctttccaactttcaccctggcactcactaactcgttaggtggaactcctacgagtaagagtgggacctacattcatttcactcaatgagagagtgagttttgaaaaaagagtgtccctaacactacttctctcattgtagataaggtctcgtgcctatctttgtaattcattctgaatattcaatactaaaacggattagaacacattgttctctacaccgaaatttatctcttactcttgcattttcctttcatggattgtgtagattaagaggttcaataattcaatagttaatattacatacatatgcataacaaagaatatggtgttgatgtatcaactctttattttcttattaatgattgaggttgaggttgttgactttagaggacccaaatttacctagtactatatactagtagtggcttggttgttgtgttatttcgtcttcatttcttctttattctctcaatttatgtctgtgattcttttttgtcccttgaaggggccctgacggaagagaatctcctctttctggag

SEQ ID NO: 28060 - DNA, 758 bp, Medicago truncatula
  Intron number 1 from transcript Medtr3g039810.1 (locus Med tr3g039810) derived from phytozome v7.0 (chr-ID MtChr3; po s 10652494 to 10653251)
gagggtactaaattgtgtgaataaggtaaaatctgtgtttaaggggataggataactagatgcaacaaaagttttttctttatttttaaaaagttatttttaaaaagtaaaaaatgtttgttgtgtaaatatacttctgcattcttctttcattttattttttttattttagtgtttacttccacaactaaaaacaccttgtaactttaattttttgtgacaatttctttctttcttttattattgttttatttttcaaaaaacttccacactttattatctccagtacttctcatagatgggatttagattattagggagaaccaagagaatttaaacaaggactccaaccgaatcagattgaaattctcaggtggcagcagttgcaggcggtttttccgtttgacctctggttcggttgaggtgatatccataggaatgtgagggttacaaccggttgagcacatgacttcaattgtgaaacatgaaaaatattgtgaatatttgctgcaagaggtaattcaatcgggtaaaaaacttgacgtatacgatcaagaattttgtaaggactaaggatcatagaactttttggacagagtttgtgaaactgagtgtggcacatacaagttgagattcacaacattacgaatataaaatccaagtgtatattagcttgtttagacattctgttttgagctattagtagtaatgatacactaatattgttcagtgcttgtaggcaggcattgctcgtattt

SEQ ID NO: 28061 - DNA, 924 bp, Medicago truncatula
  Intron number 2 from transcript Medtr2g122680.1 (locus Med tr2g122680) derived from phytozome v7.0 (chr-ID MtChr2; po s 29537074 to 29537997)
ttgctattggtttaggttcaattctcagttttctggtaccatcctttctctttatttatttattttgatgagttcctatttatttaaatgtgaacaaaatcttatattgtcttagatttttacatttggtctaactcgtccttatcaagatacttatttacctctattttttaatacatcttcaatcaatttataaagcgaaacgtgtcacttattataaatttttatcaagagacctatcttacctatatttttttacgtggaacttagatttttctctcaaatatattgattaatattttttactccacttttttttttaaagaaagtactccacttgctattattttgtattgaaaactagcacactcgagagtgatgtgtataataatatgttggaatacttccaaaacatataaaatttggaaaattacatttgataaaatctatgtaatggtcccctcaaacaaaaacaaaaaaatgtaatgatcactttcaagttgatctcaagaatattctcaagtgtttttgtaaggtaagatatagaatacgtttgcttaagataattaattcgaaaaataatgttttatataaaacactttataggattaaacttattatgtaccaaaaataaataaataaataaaggattaaacttgattttatgctaagagcttgatcaacgaccttggaagcaatttatttgctatagtgttcatatgaattgtgcaactttgcctagctagttacttttactttgtcattgtgatttaaaatgtaaatttttaattaatcatccatcctatgatctataatacgattcgattcacaattcaaaaaataagtctttgcattcatgatttgaatctcgatttgataaataagaatacgcgtcaaaaatgagataaatttttgctacaggga

SEQ ID NO: 28062 - DNA, 978 bp, Medicago truncatula
  Intron number 2 from transcript Medtr1g116730.1 (locus Med tr1g116730) derived from phytozome v7.0 (chr-ID MtChr1; po s 24739154 to 24740131)
aacaccctcctaggctcaaaaagcagaagaaacaggtttctatctattcattctccaattcatacgagggttttgatttgtttaccttttttgttccttttctcttgtggggtgtcttcaatctatttaaattttttatttttattaaaatcttaatcatgggtttcacttttcaatcatgatcattatgtatgcctctgattttccagtttctgatttaaagttattaattttgctgatgcatattgttactgctcctttgttttttgttgttgcttcatgtgagctttgttagtactagaataggtctaccaatagtatgtcctgatcgcaacattgctagttttggttatataatgaaatagtggttttgcctgtgaagccccagtactccaaaaatggtgaagaatcgtgcctgacccgtatccaataccgaaacgccccaatacgcgtatcggagaagtatcgggcagttaaccttttcgatatgttgtttatggtttagggtttaaatttaggctgttgtatgatgggaatatgaatgattttaaaaacttatcagggctgtgatttttactgcaacattaggtttttgatgtatgcagccgcgatcacaattgcggtagcatactagcatcaaccctaattaaggatcatggctgcaactgcaactgtagaggaactagaccgcaattgtagtggcatcaaccctggttaaggaactagactacaattgtagtagcattaaccctaattaaagtatatttttacagtttgaggaggtttgttttggttttcgaagtagaggggattgaacttggaggtttccttgttgttatgaagctactggtacctttagtaataaggggctataagttccattttattttatctctgttttatagttgtttctgaaattcttatctttttctttacaaacaaataatcattgtttgttacttttgtagtccattgtcc

SEQ ID NO: 28063 - DNA, 400 bp, Medicago truncatula
  Intron number 4 from transcript Medtr3g016230.1 (locus Med tr3g016230) derived from phytozome v7.0 (chr-ID MtChr3; po s 3086986 to 3087385 reverse strand)
agaaaacctgtggcaattttagggattatctcggtgtaagtatatatgtcattgaggttttttttccgaatagacatatttgagtttatctacacgcataacacttgtaggactgtttgagagatcttatggaaacaacttatgacatgtgtgtcagttcttttcagctaacttccataagttgttcatgatagcttatgcaaatattttgactttattttatattttgttatagaaaattcttgtacacaagtatttatatatcaagtgtctatggtataagtgctaaactaagttgtttattcaatagagggagaatatggttttccattagagcattgatgatgatgattacttgatttcagtatcatcttcaacacactatttggccttagcacga

SEQ ID NO: 28064 - DNA, 529 bp, Medicago truncatula
  Intron number 3 from transcript Medtr3g029550.1 (locus Med tr3g029550) derived from phytozome v7.0 (chr-ID MtChr3; po s 7786108 to 7786636)
aaagccttgtatgatattaactctaattccttttaattcattcatttaatctatgcattaattttggatttgttaaattaaggaaaaatatattattttcattttttgtttcttgtttacttttcagtaacaactaaaaatcgtatactatttatacacttcattttttttcttttcaaaaaattatttggatattttttgtttatacagacataaagaaaataacttataattgaccttttttcaacatttttataattggtcacaatattttttttaatctttaaaaattaattaaaaaaatataaaattggtgcataagaaaaatagaaacacaaatgaaattgaagtgacccccatctcttaatatagtgtatatcttaataacaatttattattacttaattttcaattattgatttcaattttaattaatgaataattatatagactttttttcttatcattttaatttgattcaaattttaaatactgaccacaatttctttactcattttatttcacagcc

SEQ ID NO: 28065 - DNA, 566 bp, Medicago truncatula
  Intron number 1 from transcript Medtr1g009120.1 (locus Med tr1g009120) derived from phytozome v7.0 (chr-ID MtChr1; po s 1071496 to 1072061)
ccgatcttgtaggtcaaagctttgtggcaattttcttgtggtgtttttccccttctatagttctagtttacatcgttttttatcacacaaatgtttacttggtgtttttaatatacatatgattgcttgatttgttagttaaatagtaataaaaaagaaaaggcaagtgtgtgtaggcatatccaaacatcaatttttttaagaaaaaaatctgaagttgtgtaggtataccatttatgaaattttgaatctctaatacttttgtaagtacatatttccttttataaatttaaatttgattgctaagtatttcattttcactcgcattcttcctttaatcattatgtactcatggaaaacaatttggtttggttgatcttaataaaattgttcctatgtttttttaattctttgtatggacaattacatgctaatatctatgtaaaactacaaacacactcacagccacatatttgtgtttctaactttgtcaaattaagtttctgtaacatttgcataacccaatatttctatttgacatatttgattgtatttttattatccag

SEQ ID NO: 28066 - DNA, 930 bp, Medicago truncatula
  Intron number 2 from transcript Medtr3g033860.1 (locus Med tr3g033860) derived from phytozome v7.0 (chr-ID MtChr3; po s 9200935 to 9201864)
tggtcgcctcacggtaaaggtgcggtttttgcatttatacttttgaattaagtcaagtttagataaacaacttaatgaagtgcgtaaacacttatcttataagtgcttatgtatatattatatgggaatgtttggattgacttatttgagcttatctactgacataggctttgcgatattgtttgggagaactaataaaacagcatatgatactgttaggtagaaactagacttaggtgggtggggcatgtagagagaagacatgtggatgttgtattgtatttaggagagtagattggtcggaggggagtcaaatcactcgaggtaggggaagacctagaaaaactattagagaaactatcaagaaggatctagagatcaatgagttggagaaagacatgtttttttgatagaaacacgatgttgtttgattcacgtagccgaccccacttagtgagataaggcttggttgttgtacattttacgtaagcttttttcagcttattttcataagttctccgagatagcttaggaaaacaacttgtagcatgtacaacaattttattttatcttttgctaaagaaataactttaagcttattcataagtgcttatcattgtaagtgcttgtgttataagttgcatataagttgttgatccaaacagggtatatttctataacaaaagataaaataaagtcaaattcttttcatatataagctatacactgtttttataagctctaccaagaagtctcacaagtgcttatatcagttggcaaactcaaataagccaatccaaacaggccttactcgattatattcaatgtttatgtatacatattggcgtgtttggaaaattcattttgagactcgacttgaatcttcttaaaaaaattcaggggtcaaagttaggaagcaagttgttttag

SEQ ID NO: 28067 - DNA, 553 bp, Medicago truncatula
  Intron number 1 from transcript Medtr4g005600.1 (locus Med tr4g005600) derived from phytozome v7.0 (chr-ID MtChr4; po s 326473 to 327025 reverse strand)
atttctttgcttattgtggagttcttgctcttcaggtagagtttttgtttcttcaaagtttctttttttgcattcaattttgtgtctgttgttggaattcgttggagattattaaatgtagttgaagttggttaggattacaatgagtgtgagatagactttatatagtgtcccaaccgcatttagaatctccacggttgggattttctagcattcatggagacaggacattggtggtcgtttgatcaagatcatacgattcaaattcaaactttatattttaaattgtaaaattaaagtcttgcttttgtttggaccgtttaatctagatcgaactatcacactatcactgatgtcttgaatgtgagatccccgggtggcagggaatccaaattcaatcctaacttagttttaactatctttaataatctcctactaattctaacatctttttttattcttcatagttttcttattgaagggaatatatgaaatgttgttttgattttgatgtgcagggaaatccaattgattgggtgagtactcataggta

SEQ ID NO: 28068 - DNA, 879 bp, Medicago truncatula
  Intron number 3 from transcript Medtr1g092720.1 (locus Med tr1g092720) derived from phytozome v7.0 (chr-ID MtChr1; po s 18655154 to 18656032)
tctcgaaatatttggactcttacgccagattccaggttagctcttaagtttttttatttcttttgttttattatttcctattaccacccaatatgttttgataagattaagacatagctcttaagatttaatttagttagtttcaaataaagtgtgacaatgcactcaataatctcagagttaactattagtctccaaaatgtttttaagttttagaaaataaagtgtgacgagtagaatacatactggacaatttctggacacaattggctagggtaatttcatccttacactatcaggcctatgtggacagtgaatacacattgaagatgcactaaatgaaaccatgttttcttttggattttacttttgtcatggaatcctagaaatttagtgtcagaagttcatttgttctgaatagtatgtgtccttagcagccgtggccagcgaattaccttggctattatatgtttgcatattgttgtcatttgtcagtccaactccaacccttattttgtgacaatatcaagcagttgtgcttacatccacacttatcatgagaaagtgaggcatgtagaaaagcggacgtcgtttaagtgagggtgaacttaaatgctggatttcctataacagaatatataacattaactgagatatctgtcataatcagtttgaacttgaaatactaagttatatttggtaacagcctcaaatttttagttgatgaacctgtactgttaatttatcgacacctatatagatactccatttgtcatttaatgaaccactttcaacttttctcccagttcctatattataatctttgcaacttttttgtactacttttggataggttcactgaagtcgctgcgcgtgctg

SEQ ID NO: 28069 - DNA, 594 bp, Medicago truncatula
  Intron number 6 from transcript Medtr1g135210.1 (locus Med tr1g135210) derived from phytozome v7.0 (chr-ID MtChr1; po s 30155818 to 30156411 reverse strand)
caacaggttagagacacatgatcctttttttcattttatttcattttagagagatttttatgataatgaatttgtgaaattttagagacacttctaaacaaattttatgataatgaatttgcgaatttttcgtcacctccaagcttctcgcgcgttttacttttggattgtaaaatccaaaaaaaatgtgcggagagggagtatcttgtgcttttcataaaataaaatctgaaattcaatagtgtatttgaaagagataagagtgccataagaaaacaccaatgaatttttttgcttgatattgaagaattttgagtgaagacctaatttgatccatgacactcttctcacagtctaataaaaattgcattagatttaatccaatcggtttgggtttatggatttgttgttttgtgattatgagtttgttggtttgttttgttgttttgtgattttgtgtgttggaataaggttataatgtgaccctttctcatgcatgcatgttgattatggtgatttggtgtgatgtttaaatggtttttgcctaattcgttgttttattccatgttataggaaagttctttgttacgtgat

SEQ ID NO: 28070 - DNA, 616 bp, Medicago truncatula
  Intron number 5 from transcript Medtr1g135210.1 (locus Med tr1g135210) derived from phytozome v7.0 (chr-ID MtChr1; po s 30156593 to 30157208 reverse strand)
tgtgattaaggtaaattgtttccgaaactgttcaaagaatgtgagatttatacttttcttgacaaagatgtcaaatatgattaaatggatttaactgtgagaataattctttcctctgtttacggagaattttatttttggtttctaatgagggagataatccagttttggaagttttgatttcgaaataatccatgttgtttttgtctttgttggatgtttctaaaagaagttgttttgattttctggattttgcttatgttttggttattttttcgattgtgtttggattttcatgtaatcaccttttaaaaggataaatttcgtgaataattggttctgatagatagaatgtagaaggtatgatcattgtatggtttttgttgtagcttttttaacctaaaagggattattttttcagttctctggatttgattttggtatttttttttttcctacattttttggatcatagggttaacatctttggattggtggtgtcttttttcagtttcacttcttgaatatggatattttcttctagcttactttgtttctttgatggataatttgattctaaggataaaagtgattattactataaaaattcttggtt

SEQ ID NO: 28071 - DNA, 515 bp, Medicago truncatula
  Intron number 3 from transcript Medtr3g103180.1 (locus Med tr3g103180) derived from phytozome v7.0 (chr-ID MtChr3; po s 25335846 to 25336360 reverse strand)
gtcctttataaccaatttaactgctcagctttctggtaactaacaaccctaaccctactttgtttctttctattattattgttgttgttgttgttactgttgttgttgttgttctatggttctctatttagtcatgtgcagagattgaaacagatttattgttgtgacaaatgacctttgtagcacctctgtagcaccgacacttctgatcgaagacgagtttccacgttaacacgacgccgacacatgcgatacataaaattaattcttttttttaaattacttttgatgttgacatgttagtgttgtgtatggtgtgtccgtgcttcattacttatgatttatgaaaaattgggaatcttaaatatgaatagatgttaagattactgtttaccattcatttccttattcttcttggggatttcaatacctattaaaatttgagaatcagcggttgttttgtgattttatcatggaccattgctgattatcaaactgtttgaatattgaaaaga

SEQ ID NO: 28072 - DNA, 506 bp, Medicago truncatula
  Intron number 1 from transcript Medtr3g067530.1 (locus Med tr3g067530) derived from phytozome v7.0 (chr-ID MtChr3; po s 15502980 to 15503485)
tttcaggtaaccccaacaaatatgctaaagaagttggactattcatcctatgtttcttaatttttactttaaactaattattacacttgagaccgaaaatatagtctattcactatgaatattttacctgaaactaattattacacttgagactgaaaatgttgtatagaatgagggtgaagtacaatatatatacattaatctgacctaaccactccctcaagataagggaaaagaatcaataagaaaggaaagattcctgtaaaatacaattgccataatatctcgtctcacagatagtaataaaattcgcagttttcaatatcttacaatatctcaaccattacaaaatgactaaatacacattgatgcatctttgatccttcgtatttctattgtgtgctcatcttgtttataatgctggaagtctgttcatttacctatagatttttagatgaggtagaagatgacgatgtaactaaagaataatcagaggggtcaaatag

SEQ ID NO: 28073 - DNA, 921 bp, Medicago truncatula
  Intron number 1 from transcript Medtr4g005460.1 (locus Med tr4g005460) derived from phytozome v7.0 (chr-ID MtChr4; po s 239562 to 240482)
ttgatcgtgactttcttcctgctccttttggtatttttctccctctttctttctttttgttttcttttatatatgtagttatgttaatcatttgattctttgagaaaatgttattcataatttagagttcggttgacagataaataaaacttggacaaacattattttgatcggggattgattagggtaattttttaatacttgcctattttatgttgattaaattttaactaaaggtgattaatcattggattcaaccattggttctttgttttctagtttaatctcatttgaagaacaacatccactttaacttttaagctagcggtagcaaaggagattaaattatctcgtaagtacaactaatatgattgaagaatgtatgaatatttgatatgttggtgcgtgaatttaaacatacaatttccaaattctcttgaaaatgaaaaggaggtcaaatttcaatttcaaagctaaaggaaatcaactttaaatctttcaaacattgtttttagaaatcaaattcctctactcaatagaacaaaaattgaaaacctaattctttgacaattgggagctttattttcttcttaccatatgttttcttttgacaattaggagtaactaatcttatcataaatttttagaataagataaattttcccaatcccaaacttgttccacatgcataaaaatttcttgtctttcctccacgtatgttcacattagtcaaaggaattaatttacattgattattgaattctaaaatatttgagttgaaaccatggtcattttggtatctgcatcatttgaattgaaaccatgagttgaaaccatggtcccactgaagagtacatgaaacacaaccttacattatattttgtgttaatttttcagagttatttccatcaggtcttggaa

SEQ ID NO: 28074 - DNA, 414 bp, Medicago truncatula
  Intron number 3 from transcript Medtr1g068120.1 (locus Med tr1g068120) derived from phytozome v7.0 (chr-ID MtChr1; po s 13499470 to 13499883)
ctgtgttacgtctttatgcttcattatgcaggtccgtatcttaactcatgattagtttttagccggaaaattttaataattatttatttttcaataagaagtttttttcatttttttgttgttttgaccttttcctaaggattcttcatatagcaagtacccttcttggtcgatggatcgagatctgacgatccaaatttcaatacatatttcgatttctttaaacaagaaaatacaaagtttaaaatctagatcgtctggtttttatccaatcattatggatgtactgaatgcttgccatcgcaggcaatactggcaccaatttttgacgttggaaactattacaactctgatatcttggttgtaattggaaattcaggcatcgactctaaaaagataccctgctcaattatc

SEQ ID NO: 28075 - DNA, 507 bp, Medicago truncatula
  Intron number 1 from transcript Medtr3g020250.1 (locus Med tr3g020250) derived from phytozome v7.0 (chr-ID MtChr3; po s 4545533 to 4546039)
gctgttaatcaaacattaccaaagagagaagggaggtaaagttgataacctaaatgacaccattgtatgcttttatgtattagtttagcttatgtgatggttagtcaaactataagaatatgtgtctaaaggaataatgagtatctcgactttttatcaaactattagaccctagattttttgtagttagcaaataaataaacttctattttaatttataaaagttttcacctttttgagaatttcgttttttcataaagtacattgacaagcttatgaataatacattaaaacttatttatttgcataaaaaaaaattctaccttgtcacaagcttatggataatacacaaaatcttatttgtttgcataatttgttttgcataagcttaaaaataagtcaattcaaacgcaaccttatattagcatgtttccaatagttttctatggttttcttcacaatcgtgaacttaatttttacacacttcaattgtgatatacagaggta

SEQ ID NO: 28076 - DNA, 580 bp, Medicago truncatula
  Intron number 1 from transcript Medtr3g020550.1 (locus Med tr3g020550) derived from phytozome v7.0 (chr-ID MtChr3; po s 4708305 to 4708884 reverse strand)
ctcactcgccgccaccattgttgacggttccacaggtaagacttctctctcttcttctcacgtttttctctctgagcaaaccgaggtttcaatttgactaaaatagttatcgtttttcataaatactggtattggggttcaatttgtttttttgattgtgaaactcagcactcacactgtttgaggaaatgtctcaataagcgaacacaatgttaaattagatatcgagtttagggtgaatgtattaggataaataacttaattaaattcttatggtaaaaattagtgttaacgtgttagctatttttacagcaaaatatcaaattgatttcatataaaattataagctatatgctttttatatagcatattatggagagcttatggaaataagctgaaaacaacttatagcgttttcataagttttttccttaaactctcccatataatctcacaagtgcttatatcactagataaactcaattgtaaggctggaaattgaagatcatgcaaactgacgcaatttgtttcttgttttccaatagccattgataccttctgccggaagctacaagtggtt

SEQ ID NO: 28077 - DNA, 851 bp, Medicago truncatula
  Intron number 1 from transcript Medtr1g147250.1 (locus Med tr1g147250) derived from phytozome v7.0 (chr-ID MtChr1; po s 32765731 to 32766581 reverse strand)
gttatctccatctctctccaaaaaccctaatttaggtaatgtgaaaattgaaattgaatgtatcttcctttaaatctgattcttctctgatgattatatgttctttaattgattgattgccatcagttttttcatctattgttgttaaacctagttgattacattaaaagaatgtcagtataaatatgtatatgctttttttttaacacacttcatgtgggtttcagaagactttataatctgaagatgctagtctgtttatcttgaactagaacaaaggtattgataataagatgtccagaaaagaatccctgataaaaagggggaaaatctagaaatgatagtacatattgcaatgaaatgtataatagaaggtagtcgtaaatcacttgtgcgaagattaccaagtagctactagttgttaagttctattttccaaataaagaatcaatctcaaggcaccaagtagctacatgtcttgtttgtggagataaatagacaatggaacatagtagcgctgtttgttttataatgttgttttacggttactaatgttgttttataatgtttaatgttctttaacttctcatggaaatggaagatgtacaaataaatggttaaattatggcctatgctattctaactatcattgttgtctcaggtggcttatgcttttctaactatttatggcttatgcttttctaaataaatggttcaattttgttatgtttttcgaataattgttgtctctcatgttggtaaatatattttgcttattttgcatacctactctttctgatcttgttgttggtttgattcttgcaattaacaggtgagcatactattggctt

SEQ ID NO: 28078 - DNA, 914 bp, Medicago truncatula
  Intron number 1 from transcript Medtr3g026520.1 (locus Med tr3g026520) derived from phytozome v7.0 (chr-ID MtChr3; po s 7156800 to 7157713 reverse strand)
ggttagcaagttttgtaaaattatttctcccaatttattgttgcgattctgtgtttttctttttcttagttctgcgattattatcctagttatttcgaattcaattttgttttgatcaggccaattagatttctaggtttgttgtatgttcttctccatatgatgattatcaattttagatttttttactgcttcatattttctgttgcacgatacctgttcttttttgttttaagggatgctggttcaccatattttagcaaaatagaagacttattttaaggttcctaggttctcatggcattagacatattttaacaaaatcatatatttgtaaatcgccttaaaaatcatattttagacaaaagtagtaacataaagtattaactatttgtaaatcaccttaaaaatgaaaaagaggctagttttagtatatgtagtagtgactagctttggaaatgttatcgttgaaaccaaaaacatgaaaatacagggaaatctcaaaagaatgtcttctatccaaaagcacaaacattagtgttggctatcttgtattgtagcaaatagaagatatctatagttaaatcaaataaccatggtactattattatgattcaagagagttttaaacatggcagaaaaaattacaaaagaatgttcagaagctggtcatttttagcacaatattaatagaaccaaatgctatctttgacaagtatagattcaccccattggtggagttgctttgtttactcaatggactactcttctaaaagctttatgaaagtggtaataacaagatgctttgaaagtaacttttcgactatgaattgagtaggcatggtgcggacatttactataatagaaaaagatcatgccaatatcttacttgaacttgtacttaatgtttaggc

SEQ ID NO: 28079 - DNA, 862 bp, Medicago truncatula
  Intron number 1 from transcript Medtr4g015610.1 (locus Med tr4g015610) derived from phytozome v7.0 (chr-ID MtChr4; po s 2931474 to 2932335 reverse strand)
taggaaagaagctgagaattgtgattgcttgcagggtatgattttctttctttcttttttttacttgtttttgaaatttagggttttgttgattttgaagtgtttgtggatttgcttgtgggtatttttgttcttatgaaaatgaaattgtcgaagtgtttgattggtttttacaggattttgtggggtaatttgtgatgggtatgtgttaattttgataccggtgggttattttgcatgatttgtggctgattgtcaattagttctgtgaaaatttaatttgttttcttaaatgaaatgtagtctacatggatttgttgactatgaagcacggtcattgggcaccgacacgatgacacttataataattttgaaaatgacataattcattgtatttgtatcatatgtgtcggtgtctgtctgttgtctgtgtcgttgtccgacactgggacacgcctaatctgaggagtgtctctgcttcatattttatagagagttttgtggtggctttgtgttaattttgatatggagtggatcttttgcctgctttatggctgattgcgcatttggtgcatgaattttttttctcttcaattaaatgggtgcctttttttgttggaattgaatgactgcttgttgttgtatgttttgcatctgattttgaattgggtgtttgtgtgtgagctttttttcaggaattgaataactgggacttgttttgatttgtattgctatcatgaaatgttaactatataatatgggtgtttttttttatgtaatagggtaaattttgattggtatgtgtctgattttgaaagggatgtggtgtgttttattcttatgtctgtgcaggtttccaagt

SEQ ID NO: 28080 - DNA, 274 bp, Medicago truncatula
  Intron number 2 from transcript Medtr3g123080.1 (locus Med tr3g123080) derived from phytozome v7.0 (chr-ID MtChr3; po s 30780298 to 30780571 reverse strand)
ggcttcacttcctgttccttctcatcttctttcatgtatggcccttttctctcttcttccttaatttcatattttgatgtacagacaaagaaaataacatagcccattaactttttctacttttttaagtccattttgagtcaaaagtttgtattttttttaccacttttcattctatttaccttttgtcattgaatcaatgtgtggcctttttcatcatgtgttgctttctgttcttactgtttcttgaaatttgaacttgttgaagcagtgg

SEQ ID NO: 28081 - DNA, 624 bp, Medicago truncatula
  Intron number 1 from transcript Medtr3g043910.1 (locus Med tr3g043910) derived from phytozome v7.0 (chr-ID MtChr3; po s 12101730 to 12102353)
tcgttataagaacaagagttgctggcaacataaatgtatgtcacaaagcttcagtttcagtttgtagttacttatctattttgatttcttttctccatattttgattagttttcttttaatgaagaagctaaattagattaccgaaattggcatcggggagaatcgaacctcggatcttgaggaggaacgcactctaaggtcctaagtcaacatcacccgtcaatccaagtgggttatatttttcttagtttatctgtgtatttttgttcagtacagtttttatagatttaattcataagcactaactgtgacaatatttaccttattaatcaatcataactatttgatgattaaacaaattttactttcatctgaagtgcatatgattagttggtatttggttagccttttgttgaaagcatataacttaaaagttgtgaagcaccgatacaaacacggacacgtcgacattgtgtcggtgctacagaacttaaaagtccttaatgtacaaattacaataaagcagtacgtagaaattcagtttcacaatctgacataagtttttgctgtaaataaattttaattatgaagtgatgaactttcttacttcgcgcaggtaattc

SEQ ID NO: 28082 - DNA, 1000 bp, Medicago truncatula
  Intron number 2 from transcript Medtr4g013250.1 (locus Med tr4g013250) derived from phytozome v7.0 (chr-ID MtChr4; po s 2522511 to 2523510 reverse strand)
aatcaattcatcaaggtacatgcctcccgtgaatagattcacttgccctagaaatcaattcacaactcattttatgtgtaatttatgaaccatcagaatccctaatcacatttatgcaaactagcccccacagccatttaatataataactatattttttaggttctccaacagataatattataaaccatattataaggaatcatcacctgcaagacccattattgttaaaggaaagaccagatgtattttttattctctttttggatcattgtacttatcgtgtgtccttttcttgttcatttgctttataatagtgttgataaatagcagcgctctacccttgtagcgtagcggcatttggacaaaccgttattgctccgcaatacgctatttagtacaaaatgttgtcaaatagccgttatagtggcaccatagcacaatttcattgcagaattttaacgatccgcgcttgacaacataatatttatttattttttcatcaattaatctttctgatccaagggttccaaattttgttgaaagatgtaaactcattttcctgcaattttatctatcatgaatttagtttctgattactgaatgaaaacttttcacacaagaaaccccaaatggttttgtccaccattcaattttttattcttattgtacttctatttgttactgatatatttttattctttcgtctgtcattcaatgttgttagttgcagatagtggaaaatagtgaattgttaaaattccgctacgcaatagtgctgttatttgacaacattttgaactaaaaagcatattgcggaataatagcagttgtaaaaaattcgatacgttatagccgtatagcactgctatagctctatttaacaacactgatgtcatttgactgctacatgtttttttctttcatagcagcaatgtattttgttttcttctgtcaaatgctgctgaacttgttaattatgtaattttctcaacaggac

SEQ ID NO: 28083 - DNA, 847 bp, Medicago truncatula
  Intron number 2 from transcript Medtr3g030690.2 (locus Med tr3g030690) derived from phytozome v7.0 (chr-ID MtChr3; po s 8373183 to 8374029)
aaagtatgaattttatcttatttgcaaactgttatagattttactatgtgctttttcccctatggtagtaattaaggtctgtttggattagcttattgggcttatccactaacatacacacttattatcagactatttgggcgagcttatgacatgtctttaagtttttccatcttatttccttaagctctcctagatagcttagaaaaacagcttataggaaaacaaatttgactttattctatcttttattgtaggaatagtttatacataaagagttataaagagtttatttcctaaaactcttatgccataagtctttatccaaacagggcttaatgttttcatataattgaaagataaatgttatgatttaaattgaaatacttctcttgtatgaaaccaaaaaaaaacaaatgaacaattggaccaatgtttgttggtccaagtagttaggagcttgattcatcattaggaagatctcgggtttgagtcttgtaaatataaaatataagcgttgaaggagttttctcccttgtatgaatggctaggatcatctttgttaaactatgaaaatgttgaaaattaacatataaagtactgacatgggataggacacttgacatgacaataacactgatgaacgtgattgaatgtaagcacatgtgttggcatcgtgtcagtatgagatattgacatgtgtcagtgctacacatgaattaactacactttgaaagttacttagcattaaatcaaatcaaaccaaattgtttgacttattttggtattgtgaatatttttattaattgaaggttttgcaacattgacattgagagaggtagaaagc

SEQ ID NO: 28084 - DNA, 584 bp, Medicago truncatula
  Intron number 2 from transcript Medtr3g020380.1 (locus Med tr3g020380) derived from phytozome v7.0 (chr-ID MtChr3; po s 4600281 to 4600864)
aacgccttgagtctgagctttctggtgattttgaggtacatacatggtaaagtgaataaatgaaaatgaagagtctggagttcgaaccgacctttgtatatatattaatgtccgcattaattgagctaaactcacaaagacatacatcaatgtattttattatgtctattgttgatatatacacacgattgccagtaaaagaaaaatttggttaccaaattgatctctaaaatatgtggcttaatcagtctctaaaactaatctccaatcaatttctaaaacctaaacgaaaaaccgatctcttaaaaccggtttataaaatcaacgacttatatatgcatttaatgtggttgctttaaactcaacgtgacaatcatcggatttctttcataatccaatatgaaagaatatttatttatatagagaaaaaatatatttaataaaaccgatcccatttagtttttccaatgacattctaaaaaaaaaaatgcttcttattatgaaaacttttttattcctttatgaaaaaattgtgttttaattatagtgaatttgacttgttggtatgtacaaaacagagagca

SEQ ID NO: 28085 - DNA, 546 bp, Medicago truncatula
  Intron number 1 from transcript Medtr2g014130.2 (locus Med tr2g014130) derived from phytozome v7.0 (chr-ID MtChr2; po s 3491962 to 3492507 reverse strand)
gtataaacgtttccaagtggaaaattggtgatcaggtatatagctttttcattcattcttttttttttctttttcccaattgtgttttctttatattcaataattgaatttgtgggtctctaaaaaattttaagcttttccagttctataataactagaacatcatatatatagtatatacctttgacttgaattagcttgattattaaacatgaataattacaatctctaaaatatcactctttatttctagaataaggttctgtttggataaacaacttgattaagtgatgataagtgctttggtatgggctatttttatattaaaagataaaatatgttaaactgttttcataagctatcttgaagagtttatgaaaataagctaaaaacggcttatatacatattataagctgttttcataagctctcccgaacggtctcagaagtgcttatgtcagttgataacttaaaaagccaatccaaacaaccctatgcgagtgtgtttccttgtgattatgaatggaggtgtgtggtttcacaggt

SEQ ID NO: 28086 - DNA, 869 bp, Medicago truncatula
  Intron number 3 from transcript Medtr1g111640.1 (locus Med tr1g111640) derived from phytozome v7.0 (chr-ID MtChr1; po s 23850796 to 23851664 reverse strand)
cttgttccacacttcagtaggtatgtacatatgtggaaccgtttaaattcaattgatcacatgaaaattgaaatccttctgtttgggttactttgagttactttgtcataatagaaaagaataatcaggtactacttggttaagttatgactgttaatctattgataaacaccagatttaatatttttaacttggccaaagttgcattttaaatgtgtttgttttctattgtattgtttgataccggaggctttacaacctgcatgataaagctttaacattgttgactctaccgtgttgcattcatgacaagtagttgaagaattatatccataagtgtgcgaacagtgggctacggtgcacgatctaataaatttgtcgtacatattttggtcactttgaaaaattactagcttgtgttactcctgttttgccaggagtgctgtgttagtttgggtcattgggatactctcatttaagatagctgtaaatttgatcattgggacaacagacttcttttttctcctgatccctccatatgcatgtgactctgtttttcttatttgaatttttatattaatttatcgaataattttatctaacccggcaacaaatacaaaaattaggatgcatatatgataagtttaactactataagttaaagcagtaaaattcaatgacttgccttgttcttgcatagtgagtccctacctgaactaattttccgacaaacctttgaagttacgcatactgcatacatgcttcagttatagataatacacatactttctgattctccatattcaatattctatttttatcaatcaactgacttttgctgaaaatctacatggacaggctgaatataa

SEQ ID NO: 28087 - DNA, 227 bp, Medicago truncatula
  Intron number 2 from transcript Medtr1g111640.1 (locus Med tr1g111640) derived from phytozome v7.0 (chr-ID MtChr1; po s 23852025 to 23852251 reverse strand)
tacaaggtgtgtagccaatttattgaattgatgcaatattttgattatacaatgttgatatttttagtttatttgttttctttccatgtattagtaggatgcttgaattgaaagatactttttttccatgttgtatatttttttaccagcaatatagcagtaactgaaattattcttgtcttttggttgcagcaacttgtccaagcactgtacttttcagctttggc

SEQ ID NO: 28088 - DNA, 763 bp, Medicago truncatula
  Intron number 2 from transcript Medtr3g143530.1 (locus Med tr3g143530) derived from phytozome v7.0 (chr-ID MtChr3; po s 37041189 to 37041951)
ttgcaggtaatataaatgttagctcctgttgcactcctcgtgtcatcgaatatatatcctgcctatgttacggtctttcattgcctggttgtgattagttcctatatttcatagcagaacaacagcctgtgttatggtcttttttttttttttactgttggcccaaacctgtcagctacttttatatcttcctttgaaatcgtaatttttaattcttagaaacattttgtttgctaatctaggaaatcgactatattcttcagaagcttgcgattagactgtctttgcattttaagatggttacgataatatcttagttataaattctgccaagaattaatcaacaaacttgtaggatccattaaaggcatagtgattagtagacaggtaagtttggtgttgagtttttttttttttttttttaacttatttttaagaatgacaatcctaactagcaattcttagcaaatggtgtatctttaaattttaaacaaggaaaaggtggatgggaagtatccagcatgacttttaactagtttaaaagttgtagttgttttagataacaggctggggccagggtatgacaaattggtgaggtggttggtttttttagaacacggctggaatagaaattttgatgcgttttcagccgaaactcaaccaaagaaaagcaaactctttttcttctgtttaacagaaattcatgcaacaaggttacactgtgtttgattggaagtttcgtcttttcctcaccttgtagacg

SEQ ID NO: 28089 - DNA, 842 bp, Medicago truncatula
  Intron number 1 from transcript Medtr3g110770.1 (locus Med tr3g110770) derived from phytozome v7.0 (chr-ID MtChr3; po s 27972835 to 27973676 reverse strand)
tccggcggaacctttcaccgtaagaaaatccgcaggtaactctaacttttgctgaggtttttatcctgcggaatgttttggtcacttttcctgcggaatttcctactgaattatttttttttttttaatttcttcatgaaattttaaaaaatgaaagattttgggtatcttattttttttctctttacatagtgaacatggaacctataattttaaatttaagttggaatgaaatatcaaactatttttgtcgattgtaattatttttttatacatattaatgttaaaataatttaaaattaataaatattttaactcaaatttgagaaataatactagaacacaaatttcaatcaaaaaattattttaagatcttagaatgtgtttatctcaaggtttggatcttattttttgttggtatgaatcttacctttttgttgattttccttttccttgtgatattgacttgcattggtgatcctatatttcattgttttttattacttctcttaaagaacacctcagacatattttgaataaaaggaaagcttcaactttatggaattataaacattgaagaggtacttgagttgtgtttaagaggacttcttgttttgaaggaaagtgtcatggtagttcactcttcttttccttagttatacataactgatttttttaaataattaaattacttcgttcattgatttttaaggtcatgtgaacatcttatgttagagaatcaattcatgttaaaaaaagagataaatttgcaatgttttcctcttctcagatgctctcggtttctttatttgtcctgttcaggatctctgtattctgtattc

SEQ ID NO: 28090 - DNA, 1006 bp, Medicago truncatula
  Intron number 1 from transcript Medtr3g148180.1 (locus Med tr3g148180) derived from phytozome v7.0 (chr-ID MtChr3; po s 38523426 to 38524431)
attatctccaccgttgtttcgcttccaccggcgaggttttccctttttctttctttctttctttctttctttcacttgattttatttatcaacattaaatcgtttttttttttgttttgttacttctatgttttctgattgtaagttattatggaaaatggataatacagtttgtcgtttctacttaagattcggttatgcttcatttgggttttgtgtctttttgtttgtttgggttttttttgttatgaagttaattttttgggttttgagttatcccccagaaaaaaggattttttttttttactaattgtgtatgtaattatagtacaattgaaaagaaattaaaggcatgtgtattaatagttttttggattaaagagaagattgaaatgtttgcacttctgacatgggtttaaggtgcagtttttgcagatggctagatttaaccaaaaaagtgacattattgcaatgttttttttttgtcacttttgtttggtgaaaaaataatatgaattttgaaagcttagtgcggtgtattggaatgggattttaatgcattttaaaagagtttttaagcatgtatttgaaactgggtttgcaagccatttttcgcatcctgagatattttcaccgtgaaaatacaaaactaaagcttctgggttgacgtagtaaccggtttcttatggtgatttctcaaaatgtgccgctgttccaaacacatgctgatgatagaaaaaagtttccaaacacatgtttacgataaaaaagtcttatgatattcaatcaagattattatttaatccaaataaatgttgtggtatttaattaggagaatcgactttcctcattttggtagtagaaatggtggttgagattctcatttggtttgagatggataaacttttgtatctaattttttgttttttttaacagcaacttttgtatctaattgacatgcatttttgcagattttctccattaaggttattcgcaataagcagac

SEQ ID NO: 28091 - DNA, 529 bp, Medicago truncatula
  Intron number 1 from transcript Medtr3g123480.1 (locus Med tr3g123480) derived from phytozome v7.0 (chr-ID MtChr3; po s 31021372 to 31021900)
acgtagtttttctttgcctttttcttttgtttttttcttcttctctatgttaccataaaagacattcaaaaaggtcgtataaattaatgacaaaaaaataagtctatgataaataaacatgtcaagtataaaccttgaatttttttaacaaaataatttaagaacaatttgaacttaggttgttcagaacgtttcttctctaaaactcgttaaccactcaaggtcaatgagattgcttataatagtgttcgtgatggaccgtacatgcctacctcaacgaaaattgaatcaacaaatcaactcctttttagaaaatgctaacaagtggccttatggtattgtttaaggagtcaaaagaagaaacttttccatataaaattgtgtatttgtgactataacaagtttttgtactttgtaaaaaaacgtatgtttatttctaaaacacaattttattttaaagattccttaaacaatctccttgttgattgttgaagctctgtcgtcgaccatcgtgaggccaccaaagctc

SEQ ID NO: 28092 - DNA, 813 bp, Medicago truncatula
  Intron number 2 from transcript Medtr1g106510.1 (locus Med tr1g106510) derived from phytozome v7.0 (chr-ID MtChr1; po s 22240875 to 22241687)
ggtaagatgtgtgtgtcatgcagagaaaactgaatctagttctaatccatgagtttgatttattgagcttagttagtgatagtttagtttaagtttgatttttcggtaatcatgttatccgtgtgaagtatacaccgatttgatgactaatctttgtcgggaaactccttactggccacctttcgtggggtcttcccgcttaaccacgttttttctatccacaagtttcgaacttgtgaccttgctttagggatccgagtccagtattgggttcaagagtgattagtctcacatcgattatgagtgataaaaatgttggatatataaagaggtgaccggtatatttagtgtcttaagattttgggaagagatgttgcgtctttcttgtggtcttggagcattaacccgttgctaccgactcccaataatattcgttgttgataagcgtctcaatgattgatattgtttggttattcataacaaatcacgagtggttaaaatatcaactcttgattttctcactttgctaattaatcattactcattttagcataatcaattttgtttcgttctactcggatcaatataatagtggtttgaactttaagttgtttgattactgaattagcttgatttatttatgttgacaacgttataagtaatgatatttttgttgagggtccaacatgatgggatataagattagatatatagacaaaaaaacaaaatataactttctcatattactatatgatacacttttaataagttggtgcattttttgtttttgtgatgatgcagtgaaagcaagaa

SEQ ID NO: 28093 - DNA, 714 bp, Medicago truncatula
  Intron number 1 from transcript Medtr4g005800.1 (locus Med tr4g005800) derived from phytozome v7.0 (chr-ID MtChr4; po s 456192 to 456905 reverse strand)
caggttgaattcactcagttctatccacaagcagggtaattttcattatcatcacctcgtttttcttttgtaattatggatgcccccggccccatgtttgttttgtcgtaaagttttgttttttcattcaaaattttgatgggttggtaagtatggtcacactccatttttgttttcattggagtgatcggtcattttgattcttgaatgtgtgagacgattttactatgatccatgaatgtatcagatttacaaaaacatgcctaaatttgtcttttgatcctcgaatgtgtctattgttagttagttcggtccataaaagacacccttgaagatgcttatgtaatctgagaacctagttgcaatgctgtaaaaagattccacatttaaacgctgtatttgatttcacccatcgatttgagattggttggttcagattacaccttcactaacgagcccgatcattgattcaagatcgagcggttgaaatcaataacagtggcacgtgcgtgtaatccaaatgacacgttcgtggactataatgatagtgcgctaaaatgactatttactcttttcattgtaatatttcgttattttgttgaaaatattgatggatcggtaattatggcagcatcctatctttgttttaatggtaaagttttgttcttttgttgaaaattttgacaggtttgtgtttgtttgttgatttaacag

SEQ ID NO: 28094 - DNA, 910 bp, Medicago truncatula
  Intron number 1 from transcript Medtr2g009910.1 (locus Med tr2g009910) derived from phytozome v7.0 (chr-ID MtChr2; po s 2269452 to 2270361)
accatcgtttctaccttcgcttcgcaataattaaggtattcactactcaaatccttcttcattacaattaattcaattttaatttcaagcttttcacatgattctatttattagttattgttactcgtgatttattttatgaatcattatgctacccatttctcattcaaagttttttcattttagtgttctgttagttggatttgttgctgtcttagggtctgtttggatttacttatttcagtttatctagctgtataagctctttttgtgaccgtttggggtgaacttatgaatacagcttatgatatggtcataagctgttttcagcttattttatgaaaacaccttataacttgcatgaaaacaattttattaatttaattttatctttattggagagatagcttatacttaagtgttcattatgataagagcttatgatataatgcccgtttgttttggatttttttgaaaaataatctatttttttaaccaaaaaatcacctttgttattttgatagtgtttgtttcagatttaaaaaaaaaaaatacattttgtttaaaaatcattattaacctcaaaatgaaaagctattcctagtaggctggtagcttttccaaaatctattttttctataaaacagggaactcaactgcaagagcttaaaaaaagatttttatgataataaacaaacggggaattaactttaacttttctcaaaaatcgacaaaatcatttatttttacgccagaacaagcgcacccataagctgcaaactatactatcatagtgagtctattgcttgttattcttgtatttttatttcagtttccaactgtcatattggataagatggtaggtttcatctgagttatatacttatatttatttttcaggtttgttcgt

SEQ ID NO: 28095 - DNA, 400 bp, Medicago truncatula
  Intron number 1 from transcript Medtr3g156150.1 (locus Med tr3g156150) derived from phytozome v7.0 (chr-ID MtChr3; po s 40925131 to 40925530 reverse strand)
caattcttcgacgtgcaaaaatgtaatattcctttttttcattttcttttacctttttcttccttttcacaatgtgtttgatttattgtaggaagatattagatagttatttattattattgcattgattatttttcgcttaatgttctaaaacagaactggttattgaatcggcaagatctctggatcatggttcaaccgccaaactgcgatgaaaccacgattgagccgcccaaataacccaccatagtatttgaactgtagcatgtgatttgatttggttttgaaaacattgttttagcatgttagtgctgttgcacattccagttgggttaacggtcatgtttgttattcatgtgatgcagctggcaaattagagaacaacaaaataagttggaga

SEQ ID NO: 28096 - DNA, 652 bp, Medicago truncatula
  Intron number 1 from transcript Medtr1g068450.1 (locus Med tr1g068450) derived from phytozome v7.0 (chr-ID MtChr1; po s 13635207 to 13635858)
gcattcctcagcactccgtaagtggttaatgaaaaaatagtcatgatttgttgtttttattggtagtttatcatgattcatgtgtcttgcagcagcaaacgtgccttttttcgtctataaagggttgatcattatatttttttctctggtgttttagttggaagaaatttatattgttgttgtgtggttgcgatggtttatcaattaacatacatactatgtaggatattagttgccatggtgtagtattttagttggtgattttttgtttgtgcctgattttaataaattggttaatatatttaccaaacgtatgacattaggttggttgttatacctcatttgtgcaagatgtatgtagggtcataatacttaatcattgagtatagcttgaattgggtggaagatgtatgtaggatatgttgtattaggagagttttaattgttttgaacgattggttctgttttttgtttttttataaaaaaatgaaggaatagtagtgttatttgccccatttagtatattcgccagaatttgtagtagtgatgtccattttttattctctgatgtattttattgtcgcattgctattgccagcttaggacctaacttggtgttttttattttattttgtttgattcattagtaacc

SEQ ID NO: 28097 - DNA, 716 bp, Medicago truncatula
  Intron number 2 from transcript Medtr3g019770.1 (locus Med tr3g019770) derived from phytozome v7.0 (chr-ID MtChr3; po s 4189759 to 4190474 reverse strand)
ggttgggtaaacccaaaaaacccgtcaaacccacccaaaaaagtgggttgggttgggtgattgagcggatatggttttaaaaaatgaaaaacccataaaaaataatgggttttgggtaaaaccgaacccatactcaataaaccaacttacccaataatttccaaattttaatttcattttcatagggaggaagaagaataacaaatgttttgatcataaatttagtttaattcctaaaattgacaaaacacatcctctatattgaaaataaaaaaaatattagagttacaaattatgatgttgcaatttatagttactttgatgctaaagcaattttacgtcatccaactttaatttatttcaagtattcaatgatcaaattatttatttaatattaaaatttattattttatgatgctaaaatatagtgaaaatatgttacataattattttaagaaaataaaaagttgaaaattttttatgaaaaaaatacaaggactcgtcgtttagtcatttcatattaacaaaaaaaaaatttgggtaacccactacccaacccaaaccaaaccggaaattagtgggtttgcccaaacccacccattaatttaacgggtggatattttacctaacccaaaccggagtaccctatatggttcgggccttgggtttggccaaacccaacccaaatcaacccacttacacccctacttgcagtt

SEQ ID NO: 28098 - DNA, 574 bp, Medicago truncatula
  Intron number 1 from transcript Medtr1g137370.1 (locus Med tr1g137370) derived from phytozome v7.0 (chr-ID MtChr1; po s 30453008 to 30453581)
cttcagtattattttcttgccttaactttatatatcaagctttgctagatggtgatttttgataggctttccccctccctccccgccatccaaacaaacttgagtatgtgtgtttgtgacagaaagaaatattagttctatctgtaatttataatgagtgattggttgatcaaatagggccttcagccaaaattcaaatgggttttcacttgtattcaaccaggtgaaccgaatgttgcacggtggttagtctcaaagtttcttatcttgtatttgtgcgtgtgttagacatgacctaccggcatttaaaacattgacttgttggtgtttctgtatacatgattgactcagtgtactatacttggtgctaaatggctataactgaaaacatataatagaaaatttctaactattttgatttgccaatcagttagctaagtaaaaaaatatcaacatagggatattggattgaaagaataatctctaaattttgttcatggtttcggtccgtgaatcataaaaggaggatctcattatattcattttgtttaaatttttcaggtttgggagaatt

SEQ ID NO: 28099 - DNA, 570 bp, Medicago truncatula
  Intron number 1 from transcript Medtr2g129800.1 (locus Med tr2g129800) derived from phytozome v7.0 (chr-ID MtChr2; po s 31488572 to 31489141)
tcaaattgggtattcatttcccttttttccattagttggttgtagccaccataatgctacttatttgtactttagttatgagattttctgattttgaaagttttaatttttgtactcaattctaaagtttgatacttgaaggtaggtttctttgcagcagtgtacattgtactttaaagaaatgattttttgttataaatattgtgttttatgttttttatgttttcagatctctaaaaatttagtctttcttcttgtttggtttggtttaatgcatttatcttttagtttactatgtttagttattaatgttgcctctgctgaaactgtattgcatttgtacaatatatgttttttttttagttttcaaggataggttctcttgaagattctggtttttcataatttggtggttgtttagcattttaatgactttgtgaagcatttttttaattttactgtattgctctagttttttggtttactaatttttgtaaaatgctgttttttttttcttcttcttttcttgcagtagattaggtcacttgtggatttgaagaagctttcttg

SEQ ID NO: 28100 - DNA, 577 bp, Medicago truncatula
  Intron number 1 from transcript Medtr3g148800.1 (locus Med tr3g148800) derived from phytozome v7.0 (chr-ID MtChr3; po s 38753554 to 38754130)
agactcaactaaattcaaaatctgatctcgatattgtgatatactgtctgatatctacacagtgtaagctgtctctttaagtgtcatgtttttagttctcaattcattttcttccatgaaatcattttgcctgtaacttataatttataggtatttgtttatttatacatgtgacttgattcttagtgtaaaatctcactggatgtattcgtgcatcggataactgaacttcaattagagtatatttgaatggaggagatgaaggcatttttttgaattctaaatttagagaattattaatctttacaaaattattaggaatgcttagcaggttacatgatactctttcatttcattcctctcattttatatgattctcatttgaagggaatgcttacttgaaatgaaacaaaatctcttttttccactccaaacttctactacatccaaatataggatagttttcagcacatgttcttcttattgtaatttattataaaataaatcttccatttttgacaagatcatgctgtgcattgcctggtttaggtggtaattgtaccaatttggaagaaag

SEQ ID NO: 28101 - DNA, 778 bp, Medicago truncatula
  Intron number 1 from transcript Medtr3g148520.1 (locus Med tr3g148520) derived from phytozome v7.0 (chr-ID MtChr3; po s 38673677 to 38674454 reverse strand)
acttggtccgatacaacacatgtacgtacataccttaacaaattttatagaacaaacaattcgtacagatgtgaaatatttgtaaaggaacagacattgatcattcgttattaatatataactgtgatgatcacaatttataagatacttgtgattataacaaaaataatagaatttccgcttatatcatactatattctaaaccctacgtttggatatcaacaaaatcatatttatagaactcaacaagttttaagaactacttaggaagcatcctaaaacaaagtttctaagaaatataaaacatgagtatggcgctcgatacaggtacaacactgatacttttccttttcttttttggagtatctaggcttcatagtctttaagctatcatgccttcatgtttgtaaagatctccaaattttttgtctgatttctgtatttattgacatcaaggattcaaggtagaaaattaacttgaatggatctggggtcatagcaagacacctcgccctatttctgaattacgcatagacttcgttactatgtcgtctgtgattattgcttgttctgacatcaaagaaagctaatgttgtaaaactaattaggcataggaataaaatccagaatcagctatctatgtggtagatttagcaccattctttgtccttttaatttagtatgcattacctgcacgcataatattggttggtatatgcttacacatttgttgaccacttcttttcagattggtcctttacttggatctcaaggtagt

SEQ ID NO: 28102 - DNA, 995 bp, Medicago truncatula
  Intron number 1 from transcript Medtr2g042640.1 (locus Med tr2g042640) derived from phytozome v7.0 (chr-ID MtChr2; po s 11991349 to 11992343)
aaggtacatataaactttaatatctttaatttgaactttgtttataataatttataagttgggagcttcacctaaatatatccccctattatattttataggaatcttcattaaatggcttaatcatttagtttgaagctatcaagaggaaggatattaagcttaaagtttgttagagtattttagcttttaagtatgtaattagtttgctaatctcttgcagggagaaacatagttaataatatttgtttgactagaatcatatgcaattgtttcactgaaagatggtaaacaatctacagcaacaatatgtgaaatacaatttggagttcctttcattcaaatcgaatcatgattaataaaaaataatttagataagaaataagtaaattgatttgcatttctaagaatgataactataaataattccataattttactggtcaaagttgtgttgagtaaatcactaatgtgatatttaattagtattatttttatttttatttgtttgagtttttgttaggctaaattgatgtgattttgttcaaagcaaaatgattcttagacatattatgggtgcacatattttatatttttaatattttaatttaattaaagtcctcatgagcttagctcagttggtatagacagtgtataataatattcaaggtcgtggattcgaaccccgccaccacaaaaaaagaaaaatataataacttcacattaaagggtcaatggattgttcataactcctagttcgaccgaaaaaattgttgaaattgttaactcagagatcataacctggtgttgaatcataaaatctcaatcagagtcacttaagtagatattaaatagcttctttgggctagttcagcataataaaaatcagttgattactttatgactttgatcaaaccataaataattgttcgtttcttcaatattttttggaatatgtaggagtggttacaagctttgaagattcagttgttgga

SEQ ID NO: 28103 - DNA, 904 bp, Medicago truncatula
  Intron number 1 from transcript Medtr2g014990.1 (locus Med tr2g014990) derived from phytozome v7.0 (chr-ID MtChr2; po s 3986283 to 3987186 reverse strand)
ttttgcttctctcaattctgttcttctcggctgtaggtaattctatttctttatctttcacattttttatttttgatactttaattttattgttggtaaaattacagatttttcaataaaaatacaatttttagaacctcctaaataaatgatttagagaatttggttatacgatttatgtggctttgtaacattcacaatgatatgtataaaatacagggttttttgtgtaatttaatttgcaaccctgattttatgtttcaaaattgagatggcctttgaagaatgttgtagaggaaagaaaatcatgtctagatataatgtggataagtgttgttaatagtggatgtacttattgaattgagtttgccgcccatttgggtcccacaaagcttgaggtactagtcttcgcagttgcgcgcggcggatgatacccaattttaaccaaaaatggcggctgtagcgtggaaggttttgaacaaatcactaatgttttgcaatatactgtatagtacaaagttctggcaaataacgaccataacaacatcatagcaccggcacattgacaacactgatgtggatagagtcctcacttgcaaaactattattgtgtccatttattaacttgtagatggtaagttcaatatagcattatgtccttttgcttaaataatataggcaatgctactttaacaaactctttgacggttaaacataggtaacttaaatctggtagtctataggccagaacccattggtttcttgtttgcaaccatgttgtaccaagttattttatgataatcactacataaacatcgctggcgtgtattcatttataccatcaatgaagttcaaaattaagccacttgccatctttgcttttcattttgcagacgttggtgtt

SEQ ID NO: 28104 - DNA, 724 bp, Medicago truncatula
  Intron number 6 from transcript Medtr2g025130.3 (locus Med tr2g025130) derived from phytozome v7.0 (chr-ID MtChr2; po s 6607307 to 6608030)
aacacaggtgaattttatttttggctcaagttttgtgtgttatttgcacccaaattccacaatccatattcaccattaaaatagatcgattctagtttagtgttatgtgtatgtctacacacagatgcctgtatattttagaaaaaaaaaagaaaaaaaaaagttttccttatgcatgtgaagtttgtatgaacatatattcacattattgcacatgcaattgtaagttaatatatgcagtttatttgatttattatgaatgcaatgtattactggcatagaggcaagcgagcaaatgactaagtaatacgaattattttcagtttttttgcacaaggcatgcatttatgtgatccaaaattgatcagcagggttctttagcttatgaagtagatgactgtctatttttcagatcatgtttgagatgttgtaggttgtacatcatagattgttctttttgaaagggtcagaagctatatacgaataaaacatattgtttattatgtttgttaatagagcattacttctcctatattgacatatacgtgaaccattttactatgaagaaaacattggtccataaaacacatttaaaaggaaaacagtttacatcttttagatttttagttcacttctgaaataactttattatattctgagcttatttgtttaaaactgcttttatgtagtttacagaactggattgaagatttatattggaaac

SEQ ID NO: 28105 - DNA, 889 bp, Medicago truncatula
  Intron number 8 from transcript Medtr2g025130.3 (locus Med tr2g025130) derived from phytozome v7.0 (chr-ID MtChr2; po s 6608282 to 6609170)
gctgcgttttgtggacttgatttaacggtaactataagttagctttcttggtattgtacacccaggttttgttgttccatatgtattgtctttatttttcctcaggcagaggctttgaatattttgggtaaacattgtatttggaaaaatgatttttttattattagaaatttgagaggtcggcaaaacgctatcttcaacaccgtttctactattgtgtgaaattttgtgtctcactggacccatattatttgctggggcctacatgagattcaacaatatagggtatgtgtcggaaagagtatgtacaaatttatagatggtggtctcaagcttaggtaatagaggagggctgtattatacaagtatctatagaagcatctataaatttgttccgtagttttttatgtttttatattgttatttgtgttgggatatcatatgaacaagtataatttagtgcatattgccaataggttttatctataaattacacattgatcaagaaatgaacctaagtgttggacaagtaaattggaacataatgggtttgtttggtctgttcttttagttcttttagttaaatttggtctatatatttttgcggtgttggatgtcagataagttaaaatgccaaggttaaaactaaaattcaaccaatcagctcatgaacacttgattcatgaaaaatatctattttttttgtcggtcatgattaatctctagaaactaatcagaacagtgtccaaaattcaaactacaaatcagtgttactatttcgtacatatcgttgtataaattctcatttcaggatattcctattgtacgaggatgcctaattacctgtttgatttaacattcttattacaggtaaataaacaagaaaaaa

SEQ ID NO: 28106 - DNA, 695 bp, Medicago truncatula
  Intron number 1 from transcript Medtr4g022190.1 (locus Med tr4g022190) derived from phytozome v7.0 (chr-ID MtChr4; po s 4456036 to 4456730 reverse strand)
cttcttctgttgatattcttcttgaattacttgatgtaatgtatcttttatcctttcttcctttttttaatgtatctattgattaatttgatatatctattgatttttgtgtcctaaattacattgtaattgaacttctggtttttgttatgttttttctgtatatctttgctgaattgagtgtcattgattcaattgtatcttctgatcaggaggagtttagggtttgtgctatggttttttagtaaattgaatttcaatgttgttgattagatgcaaaccttatgtttgagtgaggtggaaatgttatgtggcaccaacagctctgatcaaaggtgtttccggtgtccgacacgacactctcacatgtgattacgttcaaataattcattttctcaaattattaccagtgtctgtggtgttagcttgggacctcaatttcggtgggctagtttggtttcttcaaaaaagaaaaaattatcggtgtcaatgtcgtgtccggtgtacgtgtctttgttggtgcttcatagctcatgtgtgtcaatttttctttcatggggattagtatttagtttaccttttacagttgtttactgcaatgtttgacatttgatgtttgaaatcaggcacaacaatgtaattaggagttttcgctgactttttgtctttcatttgatgattttcactttaagaaa

SEQ ID NO: 28107 - DNA, 910 bp, Medicago truncatula
  Intron number 1 from transcript Medtr4g019090.1 (locus Med tr4g019090) derived from phytozome v7.0 (chr-ID MtChr4; po s 3818420 to 3819329 reverse strand)
caagctcttcatattgctttggacactgatcctcggtgagtttcattcatttgcttttctttatcaggatttttctagaagaaactatatgattgtttatctgggccgcgacattaaggtttttgatgtctcttcgactttattgaagttgcattagctgtatttgacttcaattttcgcaatatcaaagatgtgatacaaaacaaaacataggaatctaatcccccttaaatgtatcatcgttacatacttttttgaattgttatgctaggtgagtgctaaggtggaccacttaaaattatcataaattctaacgatggtccacggtactcttcaaaagcgaaaatttaagaccctccttagaatttgggttggacctaactcaatcaaccatacaaaactggcttataaggtgatgactgcccaagctttgtatgataactagaatgccactattaggtggctagaggcaatgcaattaaggcgaatatgttggagtctgcaatgaaggcgacccatacgctgcaattaaacggccaggggcacagcgtaattaaggcaaaatttccaatacaaagcttgctaccagaaggcatatatttgagctcatcatggacaaacacttttaatgttttcatatattacacttcttaatggagctttagcatgtttgtacagtgtcatgaatctgtttgtgttagtataaattcaactggtgaactgaaatttgtttgaagtgtttgtgactgtgttacaaagttctttcagttacattataagatttttccattatcttcaaatttcgctacgagaaacagtgaatatatatatcgcttatttgattttatatttggcaatatgatcctctgtacatccttatattctccttttgcatttcatcgtagtgcgt

SEQ ID NO: 28108 - DNA, 896 bp, Medicago truncatula
  Intron number 1 from transcript Medtr1g124900.1 (locus Med tr1g124900) derived from phytozome v7.0 (chr-ID MtChr1; po s 27364638 to 27365533)
gactattgttgtttctttcttatgatatttaaatgataattataatatgtattcataatatatcgtactttttttggtaactatgtctatatgattgacgtgaagtattctccgacttttgccgaacattaatttctgtcaaggaaccttgttggtcaccattagtggggtttcctttcctctcccaagcatgttttcacaatgtgttttacttgatcatgttggtaggattcagctaaaaacgaaattctaaatcaaattacaatattttgatgtaatgaatgtgatgtgacgattctgctaattctttgtgacgatattttttttgcaaccatgttccttctcttctaatgtttaattggaactctttctaggagatacatgaggttaaattgaagtactcttcttgttagtgatttttttcaattttgctaatgtgttacttatcttttgttgtctctgctgcaatccattgaatccactaaaagaaaaatttcaaaaaatgtactatgccagaattttaaggccaagtgcctaacactacctgataagttatagattggtaatcataattcagacctctcatcttaactcatcattcttttaatctaatcttcatgaaagattagttttttttattgttacgagatgaaaaattagtaaattaattatcaacgcgttttgattgacatgaaattttataagactagtatactcgttagaattttgacttcagggataggaattcatttcatattctacttaaaattattaagcagtgtgagtattaagatttcataaatgctgattgtgttatttgatactggcactatatacatagagggacagatttataccctttatcttgtcattttcttatcgttattttgttacag

SEQ ID NO: 28109 - DNA, 468 bp, Medicago truncatula
  Intron number 4 from transcript Medtr1g146440.2 (locus Med tr1g146440) derived from phytozome v7.0 (chr-ID MtChr1; po s 32367520 to 32367987 reverse strand)
attgtgagtagatgttttcttctactagaaatgttttaatgaacattttatcttgagtttcttttatctcataaagaaatctgtcctatttaagattatagcctttgaaatttatgttgctgtatggattttaaattaaaaaaattataatattaaaaagtttttaacttcaatcaaatcaagagtatagcttcctttttgaatttcaagcctttttgctcatgggccatgaccgtgagattagatagagactgtttaattttgtaatgttactttgttcttaaagacatttattacacacagaaactctgaaacaggggatatacaatcaccatttgaattggatttctttaagcggtcgattgaaatactaaaaagtttcagtttttatttaatagtgaatgttttgaccacaatgttttggagactcatgtttcttcccatgtaaacagggggtgtgacttcggg

SEQ ID NO: 28110 - DNA, 776 bp, Medicago truncatula
  Intron number 1 from transcript Medtr1g146440.2 (locus Med tr1g146440) derived from phytozome v7.0 (chr-ID MtChr1; po s 32368827 to 32369602 reverse strand)
ggggctgtagtcggtgccattccaccacttttggggtaattgtgcacaaatttccttttgtctctttcttatgcattgcaaatgtcagagttcttgagtgatttaatttttgaaccatgtgatatctaaaagctaaattccctttgaaattcagctgttccgccctaaattgttgttgagagtagggggttttggaaccttataataataataggcccctttcaaaagttcatcaaagcacacaaattggaaatataaggaaattaacgaaaaagtatatggatattttgtttttctaatgtatagttagtgatatggaagcctcttgtttcatctcacttatctgatgaagaggagagcgcactcccaaaagccaggcagcaaaacctctactttaaaccccgagtcaatatgggaggagtcatcttcttgtgtcagtatcatcttatgttatggagtcctttgtgcgtgtgcacatatccaaaacctacatactactctgtcatgattgagcatgtttatttatattttgactgcttgatgtcaaatatatatatcttatgcatttcttcctgtggtatggatactccaatttttcatgcttataatctttgtttgagctgagtttctgttgcttaagaagaattttattttactgatttattgaacttttcattctgaaagtgttattattttagtattagacaattggtcaaagatttattttagatcttgtcctccaatttaggacgcctgtagccagattagttgtctat

SEQ ID NO: 28111 - DNA, 233 bp, Medicago truncatula
  Intron number 1 from transcript Medtr1g137830.1 (locus Med tr1g137830) derived from phytozome v7.0 (chr-ID MtChr1; po s 30616044 to 30616276)
tcacttttcgtccctcttcctccgtttttcttttggtatgtctttgttctcctttcaatttcaatttcaattgtttcttttcgatctattctattttttgttaattacaattgacgttaatcgtttttgttcttatttgactaagctaagaatttcttgtagttgtattataattattgtttatttgatttgatgcagattctttttcaaattgttgattgattattgctgga

SEQ ID NO: 28112 - DNA, 849 bp, Medicago truncatula
  Intron number 1 from transcript Medtr1g149750.1 (locus Med tr1g149750) derived from phytozome v7.0 (chr-ID MtChr1; po s 33107754 to 33108602)
gtcaggttcccggtcagttgctttgaatttctttatttaagtgaagacacacctaactatgttttagctggttcaaaaagactgatgccatcatggtgcttagccaaactaaccagaatgaaattagtagtatcaatttggaccatgtctaatgttattattttcaaaatattatgatatatggagtttcttttgataaaatgcctgtagtagttatttgtttttaaaatgccattgcttactaaaaatagaattctcaatggtgcatgggtactgaaatgggcatcattatgataaaaaatgcaatagttccattattattaaagactaatgtatatgaagtagaattttttttataaaatagagtatgtatacatgtatatttttaaagctaaaataaaattgatctatgtgactgttccccctttcccacgtccctatgtaattattgtcgttggcaagtactctgagggtagggactatccaaaaacaaggatataccgaaaatacaaatgcattggtatcagatacaaatgctatttggataaccaaccatttttggatatgcatcatagaggagtgcatatgtgatatatgatttgtggaaatagagtttgggatatttcttatttgagatgaattaaccaattgccaatatgtcctaactcaaatgaaggccctcgctatctcaaacataacaagtcaccaaatatgtttccatctgcatcacatacaagctgattgtctgcaggagatagttggtcttggtttaaaagtggcactttattttttcttaaatattttatttgaattgtgtagaaaactttgaagcaagcagtatttgtgccg

SEQ ID NO: 28113 - DNA, 484 bp, Medicago truncatula
  Intron number 2 from transcript Medtr3g073540.1 (locus Med tr3g073540) derived from phytozome v7.0 (chr-ID MtChr3; po s 17037253 to 17037736 reverse strand)
tcaaggtttctattttattttattaaatgttgataaatttgtgcttttgttttattttactttatttcatgttgaaattttggtgttttagggtttatttctttgattgcatgttgaaaattgtgtattatgttattttgtttgattttatgttcaaaattttgttttttagggtttatttcttcttgttggaaattaaatttttctttgacatgatttcttgcttaaaattgtgtgttttatggttcatttcttgtggaatatttggtttttatggtttatttctctgattcaatgttgaaaactgtgtttttattttatatatgatttcatgttgaagaatgtgttttagggttcatttctttatgttatgttaaaacattttatttattgatttcaattcatttgagttttgatcttactgtgttgatgtgatgaatgttgtttagggggaggaaggaaaggaggattacattgctaggat

SEQ ID NO: 28114 - DNA, 221 bp, Medicago truncatula
  Intron number 1 from transcript Medtr3g073540.1 (locus Med tr3g073540) derived from phytozome v7.0 (chr-ID MtChr3; po s 17037964 to 17038184 reverse strand)
tgaaatttaggtacggtacccttgtatcagtacatgtaaggattgtcattttgaaatcatgttgataagtttatattcccttccactatacagctgctaattattccttgtggtgattttttttttcttatttggtttccgataaaaaacaaaaagaagaaggtaggtaccaaaatattttatctttcctatcaaaattaggttggtaggtatactaccat

SEQ ID NO: 28115 - DNA, 1035 bp, Medicago truncatula
  Intron number 1 from transcript Medtr3g068910.1 (locus Med tr3g068910) derived from phytozome v7.0 (chr-ID MtChr3; po s 16349566 to 16350600 reverse strand)
catcttcaaaagttagtttatttctagtgcaccaattattttaggatagagaagtatcaagcacatgaatactcaatgaatattagtgatgataatctcctaatagaacaattgttctagatttttcatttgtaaaagacatctagttaggttgaggctttcaatgagtagtgtaggaatcgtttataaactacctttagtcttgattctcaaataatgtgatactttttagttatgggaattgcaaccacttagttgaggctaaggggctaaagggtatgtaatctctcaagtgttacatagattcgcattttcaagtattatgagggccttgtgtgagccttcacaattttttcttttataaaagacgtctcgttggattgaagagtctgagtgttgtttctaaactacaattaatcagtattctcaagtaacgtgagattctttatgtagtagaacaatgtttaatatccgttaacctttagcataatacgcccaaaagcatcagccattcatcttatgattagcagcattgatcaaaatttcctttagcaacaatttgatgtaccttctccattacaaaagaatgagaggattgtggttgtgtggtttccgtggttttcgaggaataagataattttttactattgtcattaaaaaaaattgtgttgctttggctgcaaagatcaaaatggtgtctttgggatgatttatggttagaacattttgctttagtctgtcttgatttgtaatattagtatgtctttgctttagtgtgtcttgatttatagtattagtctgagtaccctttgtattcaattaatataataatacatcttttgattataaaaaaataaaatcaaaataaaaaaacgatgagtggttggatactcaaagttgtctttatggagcttgttattacgccaatacaaccaaaaacattctaaattgatattataacggcattcgaaaagggtgggaggaagataaattgagtgaggtggagtttagtgtgtaaaccaaaagaggaaggtg

SEQ ID NO: 28116 - DNA, 651 bp, Medicago truncatula
  Intron number 2 from transcript Medtr1g093680.2 (locus Med tr1g093680) derived from phytozome v7.0 (chr-ID MtChr1; po s 19139174 to 19139824 reverse strand)
gctcctccaagtttacttgaaacagcgacaggtttggaaactttttattaatttaatctaataattttctctttttttttaacggttgaattgttcaattcaggacctatattcttggaaatttttaaggattttatttaacgtggattttggacattaatactgaaacgtataactgttcttcctctttaatttgttagattttcaccggaaattctgataccttagcaaacttaagtcttcttttaccttcttcctactttatatgaattttcatttcaagggtttctcagttattgaatttcaatccaacaatggtggcagcagaaacatgtcactctaaaattggtgatttcattttttctttttacagaagaaaatttggaattcggatcctatgcagttgtcaagggttcccgcattcatgcaggacattcgtgaacatttgatcaagattagacagtccaaaaaattatattttataattcaaaataccaagtatgaatttggactgtccaatctttgatggaactgtcatctatatcatccatgtcttaactgtgtgaatgcggggaatctaattttgaaattgcgatgaacttgtaatggctattgatttttactttttggtttgttgtagttgtagagaaa

SEQ ID NO: 28117 - DNA, 662 bp, Medicago truncatula
  Intron number 2 from transcript Medtr2g126220.1 (locus Med tr2g126220) derived from phytozome v7.0 (chr-ID MtChr2; po s 30529647 to 30530308)
accaagtatatcaattctacactttccttgtttcaaattagaataatttatcaatttggtctctaaactatcactgtctcgtcaatttagtcttaaactatttaaatacaataagtagtttctaaagtatatgaattccgtcactactgtatttgaaaatccatcgatttagcctctgttctgataaacaacatatttggagcttatagtataagcgcttatcatgataagtgcttatgtataagttgtttctatagcaaatgataagataagttcaattttttacagataagttataagttgttttcataagctatcttgaagaacttgtgagaataagctgaaaacaatttacgaaagctgttttcataagttctttcaaacggtctcacaaaacttatgtctatagataaactcaaataagccaatccaaagaggctattagaccctaaggttttaatagtagggactgaattgaatgattttatatactttaggaattacttattatatctacatagtttagggactacattggagagagtgagaagtttatggactaaattgatggtttatttttcaagttatttaacacctctttctttctcccttcttttgtgtttgtagaattacgacggggaatttttgtagaaacccttaca

SEQ ID NO: 28118 - DNA, 805 bp, Medicago truncatula
  Intron number 3 from transcript Medtr2g118300.1 (locus Med tr2g118300) derived from phytozome v7.0 (chr-ID MtChr2; po s 28103139 to 28103943)
cgtggcgaggatccgggaagcacttggttagtgaggtatgtttctctagtagtgcactttatagtttaaactaacagtttaagtatacctgatcaaactgggccagattataaaagtgagactgactaatacgttatacctcttctcctgctgctgatattagattgacatcagtatcagcaggattgaactacactgaacatgatgaactggaatagcagaatacagattctcatggagcttttagaataccttatctatgggtgccaaaccttcactcacacttttcccacctttacatgatgaactcgaatatcaaaatacagattctcatggagcttttagaacaccttgtctctgggttccaaaccttcactcacccttttccagcctcactttccacacacccttttctaagtccgtcactgatccaacaaaatccctttaccttccatttgcatcacatcattaggaagttagttatctaaagtcacaatgtgtctcttgctattttccacctaagatagaatgaaggcctatcaatattacaccaagaatatacataatatagtcaattatagcctgaaaagttacctctagtcctccacccccaaaacaaatctcaaagaggaatgtattaactcttttagggcattaaaagtcccatctcaatcgattacatacagatgttggattaggatattttgattcgtgtattgttaagttcattgttaggatagaatgtccatgttctgtttgttccttttttctacctcaaacttgtcttgttgatttgtgtcacagg

SEQ ID NO: 28119 - DNA, 836 bp, Medicago truncatula
  Intron number 2 from transcript Medtr2g098060.1 (locus Med tr2g098060) derived from phytozome v7.0 (chr-ID MtChr2; po s 23133004 to 23133839)
gaattgctctggttagtcacccatttctttcttcatttttctttaagagttttgttttattttttatttctataagtgtttggtatgggacttgttttcaaaccatgtcccccaaacctcttttaaccttttctcacatattttagatcgtcatcgtgtcaactcttgttattttatgggaccctcaagataaaatagatattttggacaatgatgcatcacataatacaacatgatcaaattatatatgaaaaaaaaaaaaaaaacagaagtatcacaatatacaaccagtcttttgtcaaccatgtctctttatcaaagatcgcagtcaaatcactcattatactaaaaaggaaattatctaaacggttttattattataagatgaaaggtgacacttatttaaactttagtccgatcttattttatttgacttgactttttttttctcaatacaattaatgcctcatgtttaacactattatattgagtttaattcatttgtgtaaaagcagtttataagatgatggacgtcactgtttataactctaatcaaattttatctttattatatgcaagacttgagtgtttttaataaatttctctaattatatgattaaatttaatgatgagagaattagatgaattttatttattttctctaaatttaattgctaattctattttttagttatatatatccattccaaaaaagcaagtacaaaatacaaataccaaatataaactatagtcttatggtgctttatactagttttgattcatcatgactttcttaatctcaataattaatttattttgtagcttggaggtccttc

SEQ ID NO: 28120 - DNA, 629 bp, Medicago truncatula
  Intron number 1 from transcript Medtr2g123350.1 (locus Med tr2g123350) derived from phytozome v7.0 (chr-ID MtChr2; po s 29918153 to 29918781 reverse strand)
acatataggtcaaacaaggtgagttctctcttacggtactacccagggatcaaattgatgaccatttatgaaggagttaaagtcttttatcacttaattaattaaattttgtcaaaggggttaatatatttgacaaaaatgtaatttttcccaaagggttgggaaatacaacaacgcggtaagaaacaacatttgaaaatcaaattgcctccttccactgtgccttttattccggaccggacagtcactcttaccaaaagacaatattgccccttccacctcttcatattcctttattatagttaaacccttttcttcttcattctcttttctttctttcaatcaaggtattcaaaactcattcttctacattctttcgctattcatcttttcaaatgaatgaacctttttttttttttttttttttgctcaagaaatggaaattcttaatgatttcatttttcgtcttttaagattttctgctatcataaaaatgttaactttttgaatttctattgaaaaatagcaagtgggtttttgacatttttgtaaacagttgcattttttctgtcaaaaaaatgaaaagtttaattattttttttgtgtgttgaatcattgtgtgtaagcag

SEQ ID NO: 28121 - DNA, 575 bp, Medicago truncatula
  Intron number 2 from transcript Medtr1g108480.1 (locus Med tr1g108480) derived from phytozome v7.0 (chr-ID MtChr1; po s 23160813 to 23161387 reverse strand)
gggctataaaaaggtatgatttcattgttgttacgattatcatccttggtttggagtgataggtaattgtgattgggatataccatgaatatgctgcatttagttctaacattttaacttaagtgaatgccaccacgatcacaaacacaattaaatggccaaaaacaagaataaaatgtaatttgccatccactaaaatctttttaacctgtagaagataggcagcagtggttttttgtatgattcacatagttttctacaacttaccgattataaagtctctatgatcttttctattttaatcaacaatcaaaccttccttttgctttctaagtttatattttttgagaggaataaacttattgcatttcattactcaaaatgtgttcaatacaatgtggtttctcctttctaagtttatttgacttttcattttatttatactgggggagaacatgtatatacattgttgcttgaagcaaacacttcatttcataatttcctaattcactcactatactcgacacttttaatttgcagggcggttttaggtagtgtgagtgactactgtgctc

SEQ ID NO: 28122 - DNA, 720 bp, Medicago truncatula
  Intron number 1 from transcript Medtr3g080340.1 (locus Med tr3g080340) derived from phytozome v7.0 (chr-ID MtChr3; po s 18870726 to 18871445 reverse strand)
aatattcaatttcattttttgtgctttcaagcaaagtatctcttccttctttctctcttgtaaatttgactaataattcttctaaactacttttgttcttttgttgggaaagaaatatcctttggtttagaccctaattaatggctaaatatgatttgttaatgatatttcctaacttcatcatgttattgattctctacaagtgtccaacgtgtagtcaccttcatcttgtgatattttatttgtgtgtgatttaaatatccaagtttgtctttaaatttgtttgattgtttcaatttaatcccctaatccaaaaatatttatgaaattgcaaaatgcaatcaatttgttattagcattattcatttagtttcaaatttgtacctaataattccaacttaattactatgttattttagtccctacaaatactaatggatggataaattaatcataattttataatattaatgaatattttataatattgatagtgtgtgctgatttaacacccttcatattttatctctatggcatgctgcatcactgtgtagtgtgtagctaggttccattctgccaatagtagagttgcaatttgcaaaatgggttgaaaaatcagttttgtgaagcataaacccattcctttttcctgctgctgttgcaagtggaggtgtgactcacttgcaagttgacctatttaacattaaatctagtacaact

SEQ ID NO: 28123 - DNA, 940 bp, Medicago truncatula
  Intron number 2 from transcript Medtr3g139310.1 (locus Med tr3g139310) derived from phytozome v7.0 (chr-ID MtChr3; po s 35829881 to 35830820)
agtttcttctttattcgtttcatcttgtttctaaggtacgcaatgcttgcatcttttattttattttttgtgtttaattgttactcttattattaaattcacgttgtaaatagaatcgttgcattttgatgtgagatagtataattgtgattctctgatcactgaaaaatttgaatgagggaaaatcaattatactccaaaagtggaaccaaacatacttgattgtgtaaagctgattttggctaaacgtgagttgaatgtaacgtgttttatgcttggatagattaatttaaaagtgagttgaacaatataatccaagctaaatattaattgtagaatcaaaagcacaaaattttaacttcaagttagaatcaattctagaggcaaaattaaatctactcgagaacattcaaacatgcctgtatgtttggttacacttttagaggggtcagaattgattctataagtgtggaattgattctgagatgtttgattgctttcgagtagaattgattttgcctccaaaattgattcggaggtgtatttgttttctttttttgataaaaggaggtgtatttgtttgagtaggaaaattatcatcctattgttttttaggttaacttgtttagttttagctacggtttagtttcaatgccattgctaggtttagttttttcttttttttttgaaataggtttaggtttaagtttaggttggatgttatcataaaaaaaggtttagggttgtttatttcaataaaggtttctaaaactgaaggaactctttcatcttctggacataatattcgataagatttgtttgatgacaatcatttctggcattgatttgggaaaccttaggggtgagataaaaaacattggctcaagattcattcaaaattgcaggtggagaaactaataaaggagctgcctactgtaca

SEQ ID NO: 28124 - DNA, 630 bp, Medicago truncatula
  Intron number 1 from transcript Medtr2g009860.1 (locus Med tr2g009860) derived from phytozome v7.0 (chr-ID MtChr2; po s 2252425 to 2253054 reverse strand)
caacttctcatttttcaacacaatctaatcccctggtaagctcaacctttttctcctccattaatgggtttctctgaaatcactcattactgaaaaatccattcttttttcataagtattgcaatagaatttgaaaatttctgcattttgtgttggcttcaatttgttttaatgttcttcactatactagttaggatgaattcaccaaattgaaatgaacaagaagaaaaaggggatttttggttttgaatttggataaccatagcttttgtttatttctgtagcacggatacgattgatagaaggcgtgtcacatgcccggcacttgttagacaccaacacaccacatcaaattgaattatgttattttctcaaattattatcgatgttgtgtcggtgtaagacactggcacatgtcgatgttgtgtcggtgtaagacactcacatatgtcggacactgatcacgtcttcaatctaaagtgtcggtgttacatagttgagaattagtcagaattttattgtgcaaaatttcattagcactatttttttaacgtgttttttccattatctctcattttttgtttaattgtatcagaaggttccaaatctcatcggaggcaaattcattga

SEQ ID NO: 28125 - DNA, 1051 bp, Medicago truncatula
  Intron number 2 from transcript Medtr1g100250.1 (locus Med tr1g100250) derived from phytozome v7.0 (chr-ID MtChr1; po s 20734018 to 20735068 reverse strand)
ccagtagaggttggggatttcgcggtgtgcacaaggtactgtgtgttgttcattgacatctctagacggaatggaactttcattttgtaactgctgaaagataacctaatcggtgaacttagaagcagtttagattaaattctcaaaaagcacttcaaacattaaagaaaaacttaaactagctatcagttttttaaaagaatagcttatttttggataatcagcttaattaagcacttatatcataagtactcattatatacgtgattatgtataagttatttctatctctatctcaaaaggtaaaataaagtcaatctgttttcatataagctataagctgttttcataaattatcctggagagtgaagagtttatggaactaagctgaaattcataagctgtctccataagctctctcaaacaatctcacaagtgcttaagccagtagataagctcaaacaattcattacaaacaggcccaagttgaaattagcttctatttcttagatttttgaagaaaccctcttatttaacttccaactttataaacaccaataggttttataacaacatttttgtaagtgcataactatatacttctttatactgaagagtttctatagactcaaagctaatccaaattccaaattggaccatattttatgttgagatatattgtattttgacgtgcttgattcattgtatcatgttttgtctgttatgattgtatagaggtttttttcagtgcaaggttttaatagagttgatgttatattaccagaaccagtacttttacgagtttgataagtagaatcaattctggactatggtcgtgttaaagattaaaaaaaaaaaaagacattctcactaaatagtgtttgagaccttagaatagaagatagtttgttgaacaatttttatgtcttctgttatcttttgcttcaaatgacatgttatatttgcttgttgaatctgaaaaataatttgaccgacacggtagtgattcaaaacaggcaattatttgtggtaaagttggccaagctcctgt

SEQ ID NO: 28126 - DNA, 501 bp, Medicago truncatula
  Intron number 2 from transcript Medtr4g005410.1 (locus Med tr4g005410) derived from phytozome v7.0 (chr-ID MtChr4; po s 220206 to 220706)
caaccatctcaagtaagtgattgatacgtgttaagtattctataataggtttccctaaggccatagatttaattgccaagttgatgtccgcctgtaatagagtttgttggtaaaacttagatcaaaggcttaaactccatagaatcctaattgagtttttactttttatttttttttatatataaaaaattcatgtactgggagaatcagctatatgcgatagcttcattcaaactggtatgaatttttcaaataccttaatggaagattttgttatgtaatagcctgaaaggaggttaatgtcattgacttagtgtttgtatctaccccttttctccatctttatccttgtctagcatctccgttactcatacaggggccaactaatcttgtcactgacaccaactgttggctataaacctttcctgtttgatgctaatttctaacccattcaggggctagctaatcttgtaactcacaccaacatctgacagcgtgagt

SEQ ID NO: 28127 - DNA, 953 bp, Medicago truncatula
  Intron number 3 from transcript Medtr4g005410.1 (locus Med tr4g005410) derived from phytozome v7.0 (chr-ID MtChr4; po s 220768 to 221720)
ctgttaacttttcttatgtgctatgtttaaacttcctatacactgtcttcgatgatttattagaaacactaacatttatctgataaaaaaaacttaaaacacttctctcaaaaaaagttttctatcgatatataaaattatctaagagttgtttagagagaaaggtttcctatcgatataacaaaaaatatagtttttgtaagttttggtaaaaaaaaaaaaaaaaaatctacgaccccccttcaaccatgatgttagggcattgatgtattaacttaaaatttgaagtctaatagttaacaaacacctgagcacatatatatagatattgtaaagttcaatatgatcttttttttaatccgagttaattttttgaaaaacagtatagtggctttcatcaaaatcaagtactcctaccaattcgaagtaaacatttatgaaaaagtttatttcacaacaacctctaacttcaggtttatcctttttgcatttactgttatgactttatatggtttttattccaattttggcaaatttattaagctataaaagaatagggatgtacgtgtatgaacatgtgtatggttctatcgggactatagtttgactgttgcatgatttctctttttatatttgagatgaatgttgatgccatattattcaactgtcttagtgattggccgatgccaattttaatttcatttgtctattatgatactcaactgtctattatgataaagatagcaaacaaattttatatgttgatgatgatggtcgcgacatttatgactgaactttaaattagaaatatgttatccagtctttgtctttagtatctgactgcttcttgtgttttccctttctaattatttagtaagatgcttgtgtgtctgacacttataattattttgatttcagataaaaggcccaattttctttgtgtctgttctgta

SEQ ID NO: 28128 - DNA, 831 bp, Medicago truncatula
  Intron number 3 from transcript Medtr1g087300.2 (locus Med tr1g087300) derived from phytozome v7.0 (chr-ID MtChr1; po s 17546849 to 17547679)
tctctctttatccttccactctcctacttctcccggtaatttttctaattttccctaatttttttaataatatatatttgttttgatttggtttggtttgttttgttttgtttcaaagacatgataaggatataattcatatgcaccatcagtgtaaaaaacaattgacttatgtgaatcaatcatgattgtcgtttataagctgtttctataacagaacataaaataaagtcaaacattgtataagctgtaagctataattcataagctatcatggagagcttatagatataagttgaaaacaacttattgacatgtcatacgctgtttccataagctctcccaaacagtctcacaagtgcttatgttagtagataaactcaaatatgctaatccaaacaggccataaagttgtagtgatctatagtgctttggggtattggtggaacaaaaccttatggttcttccatcccactcacatgctttgaaataagtttgaatcttgagaagggggtaactgttggtccttatttcaaactcaaactttttaaaatgaagtcgataacatgcataggctttctacttttatgaatcatcattagttgctcagcttgttcttcaatttggtaaacaatgttattcacttgaaaagcaggaaaattatatgaaccgaaaattatatgaaccgaaaattaggaccgtaatatcatgaaccagtcatgcagaatttccttttttatttttgttttcatcattccatttactgatatagagtcactattgtctaattttgcagtgaaggaccataaagttgtctctgtgccatctatt

SEQ ID NO: 28129 - DNA, 501 bp, Medicago truncatula
  Intron number 1 from transcript Medtr3g079640.1 (locus Med tr3g079640) derived from phytozome v7.0 (chr-ID MtChr3; po s 18500700 to 18501200)
ttggtgcttctattcgtgctgctactgattgaatagtggactattgattatgtttcattatgttgcttcttgctattttgtgctaattgtataatattcatgtgtttatggacttgaatcctcgtacaacaatgaaaaaaaaaaataagtattttatgttcgttgtgttattattaatttgcttcattagacttgattaaacatagtattgcattggttgtatttttcgcaaatactatcattatgcctatttgtgctattattattggatcatgttgacaaaattgaattggaatgtttgtataattgttattattattattattttttgattgatgttaataatttgcattttcaatatatagtataggattgataaaattttcttgtttagagtttggataggtagttgtgagagagtgctttcaggtataaggaagaggaaataagtcatttttaaacatttaataaatttttatttttattttttggtagcgcaca

SEQ ID NO: 28130 - DNA, 765 bp, Medicago truncatula
  Intron number 2 from transcript Medtr3g087260.4 (locus Med tr3g087260) derived from phytozome v7.0 (chr-ID MtChr3; po s 20689282 to 20690046)
gatcagtttccaactctcttcaacaggtatcgtttttcatcatttctgtttttatgatttgctaaattttattgcatcttagttaaatttgaagttattgggaaaggttttatgtttggatttcagttgaaaacctgcaaatgtaggtttggacccaaagtatctatatagttattttaggatatgttccagaatagaatattagagacctccgtatattgtgatcgaagcttgactgagtgtttgtgttttctgagcaattggtggttatcccctgtcaatgagatagactccttcttttaaagaggttgtcataagaaggtctttggtggtggggaagttagaaataagatcatgggtctatgggaggttatgtgctgaataagtataaaagtgcaccgagatatttgtaagttgatgtcggtattgttctggactggatattgagcaatagaacataggttgagataataaaatatttataacagtcccccgcttccaagcatgaggcctataatggcgaaatactgaatatgataagtcgagataaaaaatctataatggtctgggataaaacgtaggtttggacgcaaacgtatgtttaatggcaatgtgaatccaaaaatgagttagtccttgtttattggcatgattgttaatgctacttattcgtttgatttttgaaattattatttttttcactttcccgagtgtgaatcttccctttcagattatcagctgacccaagctttgcaagcaaagttg

SEQ ID NO: 28131 - DNA, 921 bp, Medicago truncatula
  Intron number 1 from transcript Medtr3g092330.1 (locus Med tr3g092330) derived from phytozome v7.0 (chr-ID MtChr3; po s 21676199 to 21677119 reverse strand)
gtgataataatcctcctcttttaccttccactgaggtaatccttttttcttttactttttttttcttctagtaatttgattgtgtttttttggttgattttagttgaatttatagttgttcagtttctttttggtgttattgatttgcttttaatcattaaattttatattaattaaccttgttggctattaaattacatttgtaaatggtagatttgtaactcataatatatattggatcatcttcatgaatttctataactgaaaaaaacttcatttgcctatgtttgtttctgcgtttcgagtagacaaaattggtttaagaggtgtaaaagtgattttgacgtgtttgcattgctcttgggtataatgtacgaactcactattacgttattgtatccaaacataaaccactttacatgtaatgtaactcacttttaagtgtatatttggttctgctttggcaagaattgattttgagtgaattgattccataaaattgattccgactaaaagtgagttgtagataaagtgatttgtgtttggatgcattcatgtacaagtgagttgaattctaaatttgtgtgttagaatcaattctagattcaaaggctacaaatagtaggttcaagtagaattgcttttagtccccaaaattgatttattgaaaaatgccaaacataatttatagagttgagttgcttttggcacttgaaaagcacttataaggcatctagaagtgaaaaaacactaaaatcaattcattcaaaatcaatttttttcactgcagatccaaacatgcacttgagtgttgaattattgaaattatattgtttgtaatttttatgaactatgttggtgagataatgttgtttgtttacttaatgctgtttctttgtgtgattacaggtgcaccaagat

SEQ ID NO: 28132 - DNA, 658 bp, Medicago truncatula
  Intron number 1 from transcript Medtr1g099470.1 (locus Med tr1g099470) derived from phytozome v7.0 (chr-ID MtChr1; po s 20332113 to 20332770 reverse strand)
ttgtatgtgttttttgcgaaatatatctattcttaattatttgcattctattttatcaacgtgtgtgatgtttttgtttgttatttttttagggtgcagtatgcttgccaaacatgtttggcggtgatttcggagatcaaattgggcgttatgcaatattgactgatcctaagtccaacaagtttgaagtattggttgacagagtaaacgaagcatttttttctcacaaagggatggaaagcgattcgtgacttttacggaatcgatcttggtgcccggattaccttggtttttgtgggtgacggacagtttgatatacacttgactgataggtttcacaagaatatcccctacccggtttttgatccccctatgcatttccttcttgacaagatgaatttgcaagcaactttcgatgagtatctccccccaataacactcttcttgcttattgtcacaatattagtgacatggttcttgatttcgaaaaaaattaactgagtatgatgttacaaaaggttgtatggtatgatacacttttcgtgtccaccttaacttattttgttccttttccgtttgtgagctaacttttgcaactattccttatgaacatttcaagataggacggcgttgaaataggtttgtggaagctcgcagg

SEQ ID NO: 28133 - DNA, 928 bp, Medicago truncatula
  Intron number 2 from transcript Medtr1g084150.1 (locus Med tr1g084150) derived from phytozome v7.0 (chr-ID MtChr1; po s 16868762 to 16869689 reverse strand)
tgaagttgacacttctgattccggttctgtaagtaacagaagtaccatacaaggatttggataataagtgtgaataataagaatactttttattatgaacacttattatagagatccttgtatgttacttatgttaccatttgcagaaccggaatcagaagtgtcaacttcattaaggtagtagtgacctcaaaatgctaacaagtgtgcataataagcaggagaaactgcatacaaggatcaacatttttgttaaattatgtttcatatgaaacataataaggatcaacattttaccaccaactttgtgtcgacacttccctccatcgtggaaaatgtcaaggacattatgttttactattaacattggcttggtatacaagtttggaagggagatttagatgcttgtttattcaccatgctttttatttttatttttatataaaacttatgttgccatctgttttttggtggacctttttggtttgattatggttacaagtactagatagctttttggtatgcaatgtatgttaccatcacatatatggttataaatattttgaattatggtacatatgttcccacaatggttatggttataaatattttgaaattatctttatattatgtatgctatctcttacttgctagctaaaggtttatataaatactttggagttatctttgcaattaacttagtgaatttcaaccttttgccatgggagtgaaatattgagcagaaaattggtggaaagaggaagatgttatatgttatttctatgagcataaaagctaggaaattccaaacgttaactctgaacaaaatacattgataccaccacaaacaaaaaccatcatttacaacctatgttatcattcatcgccttcagggcatccacttggctctaagagtaagccaaacaag

SEQ ID NO: 28134 - DNA, 885 bp, Medicago truncatula
  Intron number 1 from transcript Medtr3g036820.1 (locus Med tr3g036820) derived from phytozome v7.0 (chr-ID MtChr3; po s 9817695 to 9818579)
tcaacaaacatacgcagtggcagactcacgcacaggtatggatacgacttatggagttgcctcaagaatattcgttagatcgaaatttctagagcgttaggaatgccactcatagttgagatagatgttgaacctcctggctaaaaatgagggtaacactttggttacgcaagagaaaaatatttcggagacgccgctggaagtatcaccaacacatccaatttaaccgcgttgctaaaaaaaatattgcttttatttaggaagtttttgactctcgaattgtcgaagaaaatgttgataatacaagtttcacaccttatgtttcgaagagtccttgaaagaagtccaaaactgggaatgaaatataatgcctaatacaagggtgaacgtatcaaacattactaatgatgtttctcttttggagcattaggggtgttgcattgtcattacttcttctccgactgaggatggtttggtttgggaaaattcgacggatgaggaaattcctttgtttttaagagacgtagtttttagggatagacttgaaatcccttagctctttttttgttcttctcgtcttttttttcttttgtctcacagccccgcaactctctgtatttctttctcttttattattaaatttttcagtatgcttgtaagggatttgtggttctagggataccaacctagtagggatgtctattgccaccttgatgcaagttcatactcttgcttatctaaaaaatatgcttttcatttgctagttatatcttgtttcattttaatttttctttacctgcttaatatctttttgactagaataattaatcatgaatatgctttcgtttagattttcttaccaagattttttctcttggcgctttc

SEQ ID NO: 28135 - DNA, 442 bp, Medicago truncatula
  Intron number 1 from transcript Medtr1g020700.1 (locus Med tr1g020700) derived from phytozome v7.0 (chr-ID MtChr1; po s 4595696 to 4596137 reverse strand)
gatgttcgttttctgcttctgcttcggatttgtgtgtttctaaagggaattgtgtcatctttattgatgatgccttcctcaattttaatggtaaaaacatgcaatatgggaactgtgtttttgacttggatcaaggaaagctttcgcctttgtctgattgtcctgactattttaacttgttctggccacctgcagagtggatcggcgaatgttgcgttcctaaatgagtatgttatcttgcattattttgcttagcttccgttgtcagattagataatcttttcaactgtacttgcagaaatagaaaaattaaaatattatatgaatatgtgctttacatcaccatgcctagttattattatgattatgtagtttctaaactagatgtaacaacattgatgaccgtttattatcttctttccttgttacttttgcagactat

SEQ ID NO: 28136 - DNA, 692 bp, Medicago truncatula
  Intron number 2 from transcript Medtr1g078930.1 (locus Med tr1g078930) derived from phytozome v7.0 (chr-ID MtChr1; po s 15667125 to 15667816 reverse strand)
gagagcagacaaaaaagcagcaagacctttgtgaggtttgagaacctccctttttccttttcaatttcttttgacacttagatttggaattccaacatgatattctaactgaaaatgatactttgtgtgacttttgttgtgtttaattccatcatttttctacgggtgatttttttgtttttagtttaatataggatgtttgacatatcacattaatgaagatggatgacaaagtttgtccataaactgcttgacaaacaaagtattgaacgctaataatttgttctatatgttccgctaatagcatactgaactttggttgtaatactccgtgtttcatgacaaacaaagtgtgacaacaattaaagtatgggatctcttataatattaatactccgtgtatcatagtctcccatatctaaaaagtatttgatatgtttcatgatttatgaattttgaccaatttaatggtcccttatgatctaaagggatagtctactttatatgatcttacgtagggctgctacttactggcgtgttatatggtttgtgtatttcactgcatgctttaatttagatttgtgtgtacacctgaaagagctgaaccagttggcctccttttccaatctgggctattttattttattaccttttattccatattatataatgatcattctttcaggtttgag

SEQ ID NO: 28137 - DNA, 526 bp, Medicago truncatula
  Intron number 3 from transcript AC235677_7.1 (locus AC2356 77_7) derived from phytozome v7.0 (chr-ID AC235677; pos 29 632 to 30157)
tgcgggcataggtgttgaacagcaatttgtggcaggtatggaatgctattagttaggaatatgtttttttttatttacaagtttgccatgtttggaggatgtaacttaataaatttctaagttgcagctgattgcattattctattctctatttttatttttcgttatgctcgtgtatatttaaatgcacagttttatttatttgctggattgtgttaagattaactataatttgaggggaacttagttccaccattcttcactctgttgtaaatttgagccttgtcaatttgtttatcgattttgaactttgtatgttccttttatgtgttaattggcacacctatactgtgatttgtgaactttttcatcattttggattgggatgccatgtttctgtattttggtttggtctaaaatggtttggccgcgcatatctggtctgatggagctttcaacccatctagtttattttatttagtgtgcacgagcggattatctgaaagtgcattttgccgagagctgg

SEQ ID NO: 28138 - DNA, 412 bp, Medicago truncatula
  Intron number 4 from transcript AC235677_7.1 (locus AC2356 77_7) derived from phytozome v7.0 (chr-ID AC235677; pos 30 185 to 30596)
gaagtaagatctttggaaacttttttctgctatatatgacgttctttaacaaagaaagtgctttttgttttaaactatcttgttctgctatgacgttcttttgatgtcgtttagaggaatgagaacttagatctatttttaagtgttttataatgtgtatagttggttggctattttgaacaattgtgagtcacctttgaaataaatgtgtagaagaactatgttatcatgtttcagtttcctttgaaatttgatgtcactggttgccttagatttaaagtaatttttagttattctgttattcattttttctttgctttattttcattaatctcatttgaatgataccaactatttgactgctagttcatttctgtgttattcagtttagatagttttctatttcagctga

SEQ ID NO: 28139 - DNA, 575 bp, Medicago truncatula
  Intron number 2 from transcript Medtr3g080950.1 (locus Med tr3g080950) derived from phytozome v7.0 (chr-ID MtChr3; po s 19231094 to 19231668)
tattcggtgcgaggtatagaagccacaatgattcctcttatcttgtgatgtttcttataaagcttcttctgagcaggagtatgtattcttctgtctatagcagctccttcttcatccaaatccagatcatcaactccatcttccagtatatcccatagctcttcatccaatcccatgataaagctgtacatattagttttccaccatgaaaactcttctggatctccattaaactttggagcttttccagagtctgttttcttgtcagcagtatcatagtcatgcttgacacttgtgtattttggagtaactgattcctcatctccagacatgtttttctaatagatcttgaactgtaacacggttaagtgctgtgataacagagcaagctctgataccaattgaaggtgaaaaacacaagaagggggggggggggttgaattgtgttttctttttctcttaaaaaaaggattcttcttctgataaaacttcagaagcagtttgattgcttctgatgaaatgatcagagtcagattgcagcggaaaagaacagagcagagaaaagaaagacaaag

SEQ ID NO: 28140 - DNA, 765 bp, Medicago truncatula
  Intron number 3 from transcript Medtr2g104660.1 (locus Med tr2g104660) derived from phytozome v7.0 (chr-ID MtChr2; po s 24737349 to 24738113 reverse strand)
atcccatcaagtatggtcttttttctcgtctctgttgtttttccatattctatgcttgaaacatctcatcccagtttttgtattgccgtagtcttttatgaatttggcttgtatatggtgatacgacatcatcaacatgaaggaaacttgtagttgatattctaaattttgatccatgaatgggtaaatgtcgaccttcaagaatttttatgtttgttatctaactgtagtgcttaattttctttcttcaatgttcaatattgtggacttctttctagtgggtgaactgagttcttaagtatgaaactactcatgcgagctgttaaacgacctgcttcacgtcttctcggattgtatgaaaagaatatgtgtctatgagtctgtttccttttgctatctgttaattgttaccttaccttgtatgttcagttgatggttttgtggtcctcagctgttctctttccacaaactattatgtgatttacttggtttcttaaaactttttttttttttttaatataaacgctcctcgctaattttatttattttataagctggttttatcaattcactaggaattcctcgatggaatagttgttacaaattgatggtgcaggcatagtgtgtggtagtcttttttctagatgcttccatctgcatcagaaggactattaaattagttacagttcatgtctacttgtttgtggtcctcatgtttcaagttcaacaggttttctgctatcgatcctgctccgtctcgattat

SEQ ID NO: 28141 - DNA, 578 bp, Medicago truncatula
  Intron number 1 from transcript Medtr3g093430.1 (locus Med tr3g093430) derived from phytozome v7.0 (chr-ID MtChr3; po s 22199910 to 22200487)
gtgtaattggatggttggtttattgctgcgtcatatttatttattttgtggaccttatgaaaaaggaaaaaatattttctttgttttacattttcacttttttcttatatttgttatccaagctccaaccattgtttggcttataatattttacaaattttagaactttgaaacaaaatattatttacttgaatcacacacttatgtgataaaaaaataaaaacttcatatatgtcgaacaaagttttctataggcaaaacaatgtttttttttttttaagtgcatctataggtaaaacaaagtattttttttcttcttaagttcgtccaattaatatttaatgttgttttgtcaaatgaagagaatatttaattcagaatttcgtctagaggtaaataaatttggattaaagagagtgaaatttagaaatataaaaacaataaataaaacaaaacaaaaaccaattaaagatagtgaaatttagaaacactcttaaaacgggtgtcgtaactacttcatgtttgtgctttgttgaatcttaggtatattttgctagcggagctctctccaatctatc

SEQ ID NO: 28142 - DNA, 660 bp, Medicago truncatula
  Intron number 1 from transcript Medtr2g013810.1 (locus Med tr2g013810) derived from phytozome v7.0 (chr-ID MtChr2; po s 3292303 to 3292962)
accccttcgacgaagaacaagtcaaccccttttctgtaagtacctcttttctcaataaagctcatttttttccaactgggtctgtcaatttgatcttgttcagtcatatttgagcctacaacaacatatttattttgtttttgattttgggtttgcgacttgattcacactccttactatgtttcagctggttccaattttcatgtttcatttcacttttgtccttttaagatggtttcaacttggtttgttcagaaattgtgtagctagctctaattgacttgaatccaaacatcaatactgatatgtcaaaacatgtaatgatgattggacaaaattatactaattgattgtaatcacatgtgtctgggggagcgctgctgcgatccaagccaaaccatgttcaatgatagaccatttaaagacttgttaaatttcaatttttgtctataaacattcatgatgcagcattatggtgtattttggtttatatagtcaaacccgctctaataccaaaagattttggttgttgttgttgttaaatatcgtccatgttattaacgaagctctatgaatcattcacatcttcttgcccgcatctaacacatgttttaaaaaatttcagaattctggaggtgttgcccctgccacaaattcaag

SEQ ID NO: 28143 - DNA, 768 bp, Medicago truncatula
  Intron number 3 from transcript Medtr2g013810.1 (locus Med tr2g013810) derived from phytozome v7.0 (chr-ID MtChr2; po s 3293195 to 3293962)
aagctaaggaggctgaattaagaaaacgagagcaggtataaaatggaatcttatggactctagaatgaaatttttaacccaggaaaacttgtatttacaggggagtctaatttttattactaattactaattttaatttatatgttcccagatttttttttttttgtgtgtagaaacaactacctagaccggtgtttaattgataaacaatacatattgacttatagcatgtttggatcagcttctttttgacgcagacgcacgtctagtggccatttttccgtgaaaacaagaagctagtatttgctgcttctaaaaattgacgtctaggggcttggttgacgctgatccaaatagtctattaactaagaacctagctggttaatttgaactaagttattattattttataatctatatattaatttctgaagcgtaatgcttgaatctgtgattactatattattttttagacattggaaactatgtgcgtctaaactctgaaattgctgtgattagaaggtagtttgatctcttgaataatgcatcttctgaaacatgtgttatcctctatagatcttggtgtcttctattctatgtttagaatgtatgtatatgttgagatttactttcagtgagctttgtatatatgaagccttgacggcctgtttcttattaactatacttgcctggaaattcaccaacatttttgtcttaatttgtcaaaatgcaggaagtaagacggaaagaagaagccatttcaagagg

SEQ ID NO: 28144 - DNA, 726 bp, Medicago truncatula
  Intron number 2 from transcript Medtr4g011950.1 (locus Med tr4g011950) derived from phytozome v7.0 (chr-ID MtChr4; po s 1873261 to 1873986 reverse strand)
taggagatttctctttctgggggtaagctctagaactgtttgagagtttgtacccttgatgttgagcataagagcatcctgccgactgcaaacaatatttcgttaaacttcttcccgactgcagctggactatattcgttggccacaggtttttcctttcttgataataaatttttatattgaatttttaaaattttaactttgatcgttatctgcagtaaatttgtgtttttaaaacttgccaaacattgaagagaaagaatcattatccattgcagatgtacacatccttatcatatcaccaaatttttgaattgtactccgtgactgcgattgtagccacaatgtcagagtttgggaccaccacatcacaacaattgcaattgtgtggcatcaactacatttttccacaattttcctcaatatcaaagatcaggtgttattgctagttggcagtcttgtgactgcccccacaatttcaaaccttcacgtctctgctcaggttgtgctcttgtttttgctcaaaattttattatagttgtacacaaatctatcaagctcccttagtcttagcatgcaaaatattaatgtcacttcagaagaccgactctgaagattttcttatgataagctttttgctttcctgatacagtggtttactaagctattcattctttaatttttctttcaggtcttaaacgcagtaaactgcgagagagactccta

SEQ ID NO: 28145 - DNA, 879 bp, Medicago truncatula
  Intron number 1 from transcript Medtr1g024960.1 (locus Med tr1g024960) derived from phytozome v7.0 (chr-ID MtChr1; po s 5997936 to 5998814 reverse strand)
ctgcaattattgaattccttgaatctcaccttcaggtatatatatgaaatgaaattagtaccttccttatattggctatggccaacctacttacagttagaattttaacttcatgtataaatataattttttgttttcttttttcataaacgaatttccagttaagaaaatatttataacatctgccaattagagaatgtttgagtgaattgtttaactaaagtgctaatttattatatgaaaatttttatgtgtaagttggttccataataatggcagtagggatgagagtaaactctatttattatgcaaactatcttggtgaggttagtgtagctactttatgaaaggtttagatctagagagaaaaaagtgtcctttttagggtaatttattattatttttttttttgtcttttgtcctctacaaaaaaagtttgtcttttgtctctctagatttaacagttttttttttggtggtgtagatttaagtatttaacagtttatacaacggcagtatgagtctgaaatcctaaaaacatatagataaaatgagtttagaagaatgttttatacttttttcaaacactaacacattaatagagagcaaactactaataaacttagccacgaaaaatacacataaattagcaaaataaatttagagatggaaaacgtaaaattcctatctaattctgtcacagaattttgcggcaaaagaattagagagaaatttcgttttttccatcgctaatttttttttcacggtagtgtatattattcgcacaaagaaaataaaatgataataatgtacttcaatattactatatattatttgaaactatataattaattaagttgatctgtgtgtaggagttgg

SEQ ID NO: 28146 - DNA, 1035 bp, Medicago truncatula
  Intron number 1 from transcript Medtr2g080360.1 (locus Med tr2g080360) derived from phytozome v7.0 (chr-ID MtChr2; po s 18495579 to 18496613)
cacgagtccatcgtatcgtttcttcaattaaccctttatatgcatatgaggaagactataattgaaggttctcaaaaactgttgcttattatttttaaattagaagtggcatgatatcggtaaaactagaagctgctaattttggaaattataataacatgtgatggctgagatcactcttgaagatactaatcgtttgagaatcaagacaaaattgtttactagatgtccatggaagactatacttataagattttataacttcataactttatcgtttcgacgatttagtagacgtgcacaaaaaaatattccaaggaattaattattccaaggaactttttttcaactgcactactccattttcattcccaacaaaaaaggatgggaataagtaattcccaacggttaactctctctcttttttaaaaggtcatttataacctttaaataaccgcaagtccactatacatattaaccaataaatgtgccacatatgtcttatatgataagggtgttttgataattatataatttctttaaataagtattcccaaaaaaataaattatcaaccaaaaattgttaaacattccttagaataaaattgacgtgtgatattccaagaaaaatccaatcctgggtataatttttttgtaacctttaacaaacgccccctaatttaaagatttgtctatccctcctcccatcacatgattttggagcacggttgttatatgcgtcgaatggataatccttttatattattatacggtctgagatattcttagcatatggttattgagtctcaagttcatgtagtattgcacttgaaatgtttattactactatttatatataagaagttgcttcctgttacagcaagttttgttttttgtttattcaaatactcaagttgtataactatccaagtcattaactcttttttgcttgatgtggtcgattaatgatgatcatcccggggatttcaagcgtgagcagtacccatctctggtgatacctctggaatcagagaa

SEQ ID NO: 28147 - DNA, 620 bp, Medicago truncatula
  Intron number 1 from transcript Medtr3g138790.1 (locus Med tr3g138790) derived from phytozome v7.0 (chr-ID MtChr3; po s 35525949 to 35526568)
ttcccataaggacgtcgtctctgccgctgcacacggtaattattactaattgcacctctctggtttctttatgttttcatcttctaacttgaatcatatgtttctggatttcattgacatctgcttcttcatagtttgaccttttttttggttaacacataatttaattaactaacatatatttttccttaataattgtgataaatatgaatgagtttcagttcacggatgaatgagtttcttttcttgtcgtctactactggctagtattttcttctgattcgtacgattcaattcaaagtgcgtagttattatactagtataataatgtacttcgactttgatagtttctttcttgaataatatatggactttgacttattattaggctagtaggtattttttatgttgaaactcaaaatcactcttttattcgcttgaccagttccacacacaatacaagtctcccatttcatttctctttctcttattgggtgggttggggagtaaacatattattgatgtaaacatatagataataaagatgacaaaatacggatgattcaattagaatacataatcattaaatttgtgatgaacagctttggatctcattaaaa

SEQ ID NO: 28148 - DNA, 991 bp, Medicago truncatula
  Intron number 1 from transcript Medtr1g068580.1 (locus Med tr1g068580) derived from phytozome v7.0 (chr-ID MtChr1; po s 13711097 to 13712087)
tgttcactctaacacctccgccggaggaggaggaggtaattcttcttcttcaatcttgtctctttctttcagtttcttgtattttggaaggaacgaacttttaggaatatgtaaccctatgagctggatcacaagttctttttggtgctaatggtaatcaataagtaaagttcgactaagaattgttttatatgatcaaactcattcgtcattggtgaactcattaaccacttgaacccaattgaatgattactagaacacaagtctaaaaacacttctcaattgtatatttttagattatattcgtgtcagaatgggtataaatcttttcattcttcaagtttccgtttccttgtttccatgcttgtatagatactttaaaatatcggtttgattacatgttggattaacagtggattactgattgcaaatcatatatatacatacctagatggaattctttgcgaggaaggaaacgtttacttcgatatcgaaaacgaaaaatgccttataaccacataacatgttcctttaggagtcagtgggtagatgtatagtgtttagctaggtaacaactgacaaatgttttcaagatcttattgccaacatgggattgattgatactcactcatcaacttgaggggggtgttgtgtacttgtgattagaagttctaatcacaagtacataactatgattagaacctttcgaagtacatatttatctgcacagacttttttggtttcgtttctgttattaagttgatttatttcttgtagttctaggttagtatttattggttggcatctatgtacatgaactgtataatctattatctgtaatttcatcatcattggttgatatcgaaagaagaggagtggtgaaatactgaaagatatctagtggcatccagttctccataccagagttttatacttttcgtaatcactgatttttctgttgttttgacatcgtttcggtgacagatttccc

SEQ ID NO: 28149 - DNA, 721 bp, Medicago truncatula
  Intron number 2 from transcript Medtr2g080110.1 (locus Med tr2g080110) derived from phytozome v7.0 (chr-ID MtChr2; po s 18374969 to 18375689)
ggcaattaaaggtataaacgacacttaagtgtcctttgaagattaaataaaagattacaacaacggttcattaaaggtatttgggtaattatggtgtgtctaatagccattttagaagtctaaagagcaccttttctaaaagaatggttgaaagattaaggcaatagggccaacatcattttttttgttttgttttagggccaacaactctggtaacctcttagactattactttttttgttttgtttcagggccaacaattctggtaacctcttagactattactttttccactctatgttattctcatgcgtcttatttttttcttcaaatttacccttggttcaaattttataatctgaactggtctaagattctaaaatccgaaaccagttaaaacctgaaggccaccatgtctgttttccatccttgacaagagtatggtgaaacaatacccgagatatataatccaaaaattatttatgtgttttggattatatattccgaaaaatctaccttttaaaaaaaaacgggaaacttgcgaaatgtttcgaattttataatctgaaacatttgattatataagcttcacccagaattgtgctgaagttcaccacatttatcaccaaacagtccctacacctatataaacacaccattttgtgctaaaatttgatttggagtagcaatctagtcataaagttgcgttaacaacatcatt

SEQ ID NO: 28150 - DNA, 915 bp, Medicago truncatula
  Intron number 1 from transcript Medtr3g039690.1 (locus Med tr3g039690) derived from phytozome v7.0 (chr-ID MtChr3; po s 10571011 to 10571925 reverse strand)
agggtttccaaacaaaatcgagcctctttctaatagtaagagcttccatgctttgctccacgaagttaagtactcaaaattaataaaaaaaaaactaacttgcatcatgagtattaattaataaaaaaaatgttcccaagtctagtatggaaaaactaacttgcatctttgagatataagttaaaaaactaaatatataattattatttttacaaatttatatttaatgtcttaaaattttcaaaaattatatttttaatataaattatgttttaattttattttgagctctttaaattgtgtttttagaacacaagttattattacccgtctactattagcatcaagccatcaacccacttgacttgtcataagaaaagctagttgaacgaccatcaccctacaactatagcttcaaattaaatatgtttgtgggggcaaagatttagaatttagaattaggtatcaatataacatagtgtaatttggagactaaaagttggcctcactaatgaagcttaaacttttgcagttctaaagtattgcagctatacgactttagctcctcacatcttttggagtaattttggccactaatattttttcatttgtgattgagtagttctgtctataaatttttttcaaaatgtacattaagatgatattatttagagaaatgatatttgtacaaccattttaatataacttttgaataaatttctctctcatacttacattagattcttactatctcttttcttctctctctctcttgttttttaccgatagaaaaaaagaacaacaaggttgttccaaaagttgttaaaaaatttattgacacggcatcaatgctttttttatattaataacaataccaaagagtttgaagatagtagaggagtctcttgcccgctt

SEQ ID NO: 28151 - DNA, 760 bp, Medicago truncatula
  Intron number 1 from transcript AC235674_19.1 (locus AC235 674_19) derived from phytozome v7.0 (chr-ID AC235674; pos 94466 to 95225 reverse strand)
ccaaaaaggtatcatcatatatttcatcatcgtctgaaattttagggtttattgccgttgatcgtacgtaaacttaattgattgttctttcatgttagggtttaagatattcactgaacattgatcatcagaattcacttctgcatgtatcaataaattacttgatcgttttgcaaataacttgttttataataatcttgtacatttattattattattacggtagtgcagtagatccgatgttccactgaaccaccatgttggtttggtttgtaaagatatcagattagatctacctagcgcttacacttctgaatgatgattgaaaacatgtctggtgtccgacttttgtcaccgacacttttgattacattcaattatgccatttttttttttaaaaataattaccgctgtcaatgttgtttatttgtttgtgtcctgcaaatgcgtatataagtaaaataagtataattaagataagactcaatattagttgagcattgtaaaatgacaaaagtccttaattcatattggcatctaatatctttgagatctcaacagtttatgcattgtaaaatatatacgctgaagaaagtctgctactatgcatatgttttctacagttacatacaatgctcaattgattgttgtaaaatatatggttattttttaaatgcttagttcagaatgctaatcataagccttctgggtatattgaaatgcagagctttcaattggatagaaagagtggaaaaaagtg

SEQ ID NO: 28152 - DNA, 756 bp, Medicago truncatula
  Intron number 5 from transcript Medtr3g143090.1 (locus Med tr3g143090) derived from phytozome v7.0 (chr-ID MtChr3; po s 36823351 to 36824106)
cagtatacttgcattggttgcaaagctttacttaggtattattatttttcttccagtctcatattgtattaacacactgggattttcctggctgattttatttttatgtattccctttctaatggttacttcttttggttatagtaaagaaagacatagaaactagagagatttgccatttattctcatcgtaactttttcatttgttgtactgtatattgaggtgacattaatgcagaccgttatgagatcttgaatgttttcttcttgatgccagtttctatgagcatatatcatggttgcatcttaagttttcaaattaaaatcagattcttagggtgatacatataaaaccaatttttgtctagtaattaagatgaatgactttgcactttgagcagtctaggtataatttgcactagttggacacctgatagtacataggttttactttttatgatagatttagcatgtttacaaacacctttttgctatgcaaataagagggagtctaagtattggtttgaaaaattaacatgatgtgtggtaaagcttttggaactttgattttcttttcaaatcaaagttttaagcagaagcaagaatttgtttcttttgtagtggattttccatgttgcttttcattcaacttctttgacattttttacttttcatgcatctaataacttccttttttttttttgttttgcgtttgaatcagtactggaattagcactctctgcatacattgcaaag

SEQ ID NO: 28153 - DNA, 288 bp, Medicago truncatula
  Intron number 6 from transcript Medtr4g015740.3 (locus Med tr4g015740) derived from phytozome v7.0 (chr-ID MtChr4; po s 2995090 to 2995377)
agccattcattgcccttcatttaaggtattatacctcataactcaaagatatgtttagtttcaagagaaactacttgaaacagatccccgtattcggtgtatctcattcaaatctttgaaaacaaaaattaatgtggttattttgtgattaaaaattaaaagaaaaaatagaaattgaatatgttttctcaaatcaaatagacagaaaaaatttagttatgttttatggtcaatcacactaaggaaatttgcttacttaaggtttttctttcttcctataatgcagat

SEQ ID NO: 28154 - DNA, 893 bp, Medicago truncatula
  Intron number 1 from transcript Medtr1g129430.1 (locus Med tr1g129430) derived from phytozome v7.0 (chr-ID MtChr1; po s 28910829 to 28911721 reverse strand)
ctccgcctagggttcctaccgaactctcttccaaggttcgcacaatccatctctcttcccaattcaatcacaaatctcatttttcattcgcactttttcattcaacattgattttttatttttacaccaaaaacctagatctgagatttataaattttgttctctctgttgatttttatatctgtcagtgttaaatttttcatttagaacgtgtaattggatttcttatttttcatataaatgatgtatgataattattagtttttttttttctttttcttttatctgataaacatgaattttagcttcgaggggtttgtttgtctgtgtttttttagtagaagactcataaaaatgattttttttttctcagtttgaatgtttgataattagggtccgtttggattgacttatttgagcttatttagtggtgtacgttttgtctgactgttctgtttgggagaacttatggaaacgcttttggcttatacaacaacaatttaatttttttagtagaagactcataacaatgatgtatgataattgtattagtttaattttttttcttttactttatatacatgtattgaagcttcaaggggtttgtttgtgttttttaattgaagactcaaaaaaatgatttttcttagtttgatggttagggtctttttgaattgattttgttgagcttatctagtcttataagttttaggagactgtttcggagaacttatgaaaatgcttttggcttatacaaaaacaatttaactttgtaacaaaaaagaattaactttattctatcttgtgctataggaatagtttataagctctgttaagtgcttgtgctataagctgcaaataagttggttatccaaacagggatttatgtagtt

SEQ ID NO: 28155 - DNA, 805 bp, Medicago truncatula; identical to SEQ ID NO: 28118
  Intron number 1 from transcript Medtr2g118460.1 (locus Med tr2g118460) derived from phytozome v7.0 (chr-ID MtChr2; po s 28214768 to 28215572)

SEQ ID NO: 28156 - DNA, 651 bp, Medicago truncatula
  Intron number 1 from transcript Medtr1g086790.1 (locus Med tr1g086790) derived from phytozome v7.0 (chr-ID MtChr1; po s 17290891 to 17291541 reverse strand)
tggttagttttcagttatcacttagtttaatttgcataaaaacagtcttttttaatttttgctatgttctgatcttgttgttgagggtagtgtttgtaaaggtttgcacttgatgggtttttttacattttgtgtaaattttgattgttatgttcttgttcttgaattgacccaatgttggttacttggaatgctatgaattttgggtgatttttatttataagaaagatgaatatttggaagttatacatgtctgtgactgtgagttgaaaatgctgaagtgttttgaattgggaaaaggggtgaaaggatttctgatattagtaatttgttcattttgcggtggaatgtttcgtgttattttttcatgtgatgcaaatgtttgattcgttttttggggggtgggggtgtgagagggcctctatccccttaaataactcaaagtaatggcattttattttctgatttataatgaagtttgctgtctcccattgaatgcatttgttgattttggtttggcgaaatatttcctgctgaattgagttcatggaacttttttgtgacaatggaagatgtacagttttgtaaaggctaattattttaaattgtgtttcaggggatacaagagattttttaagagaacgtcattag

SEQ ID NO: 28157 - DNA, 624 bp, Medicago truncatula
  Intron number 1 from transcript Medtr3g034040.1 (locus Med tr3g034040) derived from phytozome v7.0 (chr-ID MtChr3; po s 9300758 to 9301381 reverse strand)
gctatcaccgggtacatctgtaaccttttcaataaagtattgcatccaaattgggatttggtctttgtgtggtatgtggactttaacgggtgttggcttcttcggattttttggaattggtccaaaacgaagggcgcgcgagaaggcggctgagtgggaaaattaaatctcaaattctaatctatctccttgtttcttcacaccagcgaagagaaagagtttttgtactggactgttcaaaagtctatacttgtagtccaaggtcaaacaaaaaaaccaaattcctaattggatcaacaacgcttttcatatcctccttctatgagggggtgtgctcgcaacaatacatagcaccaattcaaacttatgaatcgtaattgtctcttatcattgcaatctttaacactcgacgattatagatttcaccatctgtaaccgtcgagcaacgactacgacacgttgaattcacaagcaacctacaccttcctatataaggggactttaacagtctcccaatatacgattttattcacccttaaccctattttcttgctcaaattctctgaattgagcgtcaaagtacctgcagggacatcaccactcgccattccaagcactcaagaa

SEQ ID NO: 28158 - DNA, 654 bp, Medicago truncatula
  Intron number 1 from transcript Medtr3g148470.1 (locus Med tr3g148470) derived from phytozome v7.0 (chr-ID MtChr3; po s 38650324 to 38650977 reverse strand)
tgagtaccaagacaattgtgcaattgtgttgtggtgtacattaaagagttcatagaagaggctgctaaaaaattgtgttgtcactatctatgattaacagttgcatgtgttggcagcagcataattaagttgctggagtgtggttaatttgtgccattttaatgtatgtgcgcagctttctacaattggttttataataacaacaaattttggtttgtattttttgggattaactctccagttttcaggaaaaagggaaaattagagctatggtaatccggagtttcgacatgaaggtcctttgggccaattagctagcatcatagtatacaactaagatgattttcagttatagtaagtcaacccctagctcttttccaagtttgaatttgaatagaaaacaacttacctcatcctttagctatcgtacaaactaaaatgatttaataagctggatggtttgttttgcaactcagtctctcccctaattgtggtatggtataagatatattttatcttgatgtatccaaacgattaagcaacataatacgtgacagtaaatttttttctattaaaaattgaaatgctcttgaaaataattaaattggtgtctttactctataaattttatatttcatattgttttaaagggtg

SEQ ID NO: 28159 - DNA, 1037 bp, Medicago truncatula
  Intron number 1 from transcript Medtr1g012780.1 (locus Med tr1g012780) derived from phytozome v7.0 (chr-ID MtChr1; po s 2063855 to 2064891)
ccatctgtaatcttgtgtgtagaagtccttttctggtatagcatctatgtaatgaatctttgagaagcatttgaattacattgagcactgctacttcataggctgtttgcatttaataagtaatatctacacatgcaggagaagccctttggcataagagtaactctcttaatattttgaagtcttcaccacaatcgattttcatggtttgcaaaacttttgtattctttagaatatatcttgccaaaagaagctcactttcttggccaaagaaattaagaatttggcaagttttaagttgtaatgaaaggcacttttactaactcttcctctgttataggctcaaagggatgagatgataccgtttctcatttgaatttgtcttaatcgaatttctgtttttttttttttatcttctctggtgtttgtaagatgggtctgatatagtgtcttattttgataagacactataaggtgcatgactcattggtgtagtcaataattattttcataaatttcacttaatttagcaaattaaaccatagtatgtaacatacagttccattgatagatttttactgcaagagttctgttctaatttgatatataaaataaccttttgataatttttggtttgtggtggagaactttctaacatgttactgtttatgaaaagagaaaacacatatctgtgtagattatttgaactggatgatgctggtttggcaaaacattttgagtattttagtgcctaatctcctattagtttaaaattatatgtaacacatttagagtgtgaattccacgattcctagacagtgattaaggtgattgcatctacacatttgtcaagatctggaagttcataaaaatgtttggagctatagtgtgtttttgctcaaaccacgttataatgcccatttttcatgtcaacaactattgccacctaaaatgttatacttttgtaagcaagcttatagtagtttagtgtgtagacacttgattttatagatctttgttgtgatcaaggcaatcca

SEQ ID NO: 28160 - DNA, 847 bp, Medicago truncatula
  Intron number 1 from transcript Medtr2g010460.2 (locus Med tr2g010460) derived from phytozome v7.0 (chr-ID MtChr2; po s 2545907 to 2546753 reverse strand)
acaaatctggtaaaaaggtacaatattttcatttgatcaatttgggtattggagttttggggagttttttgtaattgtgatgttgggttttgcttagaattaggaaattatgatattgggtctttaaagtttattcctttttgtatcattgttatagaaagctgatgatgtcattgatttggggatttttgtttgatggaatgatagtggtggtattaagtaaataaattgttgaatggtggatttgtttaattgcttagtagttgttgtgtttactttgatagatcaattgattgttcagttgttaggtgatagtgttgtgttaagtgttaattgttaactaattttgatatatagcacatcacaatctgacagaattgtcggcaaggatttaaatcgctgtcgcatcgcagtctgtggtattgcagaaaacaatagtcaaatgtggccatagaagcttgatcgcggtcgcgaagacatcaaaaaccttgatgttgtgcctcatcgcggctgcagacctttttttaaaaccctaggtatcatgtttatgtgtgtgagttttccttgttgtgctacacttttcctcggctttcatgagttagttgtttaccaaggatagggacctagtgttagattttcatagtttttgttgctaggacttgtgcaattaacctaataattctgtatagggtatgttattgacatttccataaagaaaaggaaaaattaaagtgatgctttataagtgagtgcgagtttactgcaacgtgggctaccctggacaatgtagttctgtatacttatacatactaatataatttgtaaaatttgcaggtttctccctggc

SEQ ID NO: 28161 - DNA, 813 bp, Medicago truncatula
  Intron number 1 from transcript Medtr2g111360.1 (locus Med tr2g111360) derived from phytozome v7.0 (chr-ID MtChr2; po s 26388943 to 26389755 reverse strand)
gatccttcttgtggacaacctcaggtaggactactcattaggatgcatcattatgcatgcctagctagcttcatttaaatttcaacatcatattcttcatggttgaatattgctaatatatgtttgagggtttcttgattttgtgtttgagtagttttaagtattaagaaaattttaatgatccatctttacaccaaaaatatactgattttttatatactttctacaaagtttatgcaacaaattagaaattaaagcacttttgttcatgttttcttaatatatgtaaatgtatattttattcatgtcctgtctatctcttctagctgggaatttgaagttagggcaagttaattaactttcctatcttcatattttataccgtttaattactctactgccaacaaaatacataaattgcaaaattcacatgacctaagcactagtatataccttaaaaaaaagtgctagtagtacatgttttcaagagtggtttattcggtcgtttttctttctatttcttaatgagtaattcattgtattacttaatttacaacattaactctctaactttcgttgtatgagtaatgtatttgtatatggatattgcatatatcacctattataacttggattcaactcaatagtcactaatcagagatccaaaaaattaaaatttgtctccaattccgttgctaaatgttaaaattaaagtactaaaatcggaattttttatgtgtataattttggtcaataattgaacttagtttcatttgatttgtactcatggaatttttttttgtgatgcagcaa

SEQ ID NO: 28162 - DNA, 626 bp, Medicago truncatula
  Intron number 1 from transcript Medtr1g025300.1 (locus Med tr1g025300) derived from phytozome v7.0 (chr-ID MtChr1; po s 6238605 to 6239230)
ttcttcaaagcaccaccgattttcaacaacaacttgtaactacttttttctccaaaaatgaaacctttttcaattttttcttattttcactatgcccactttttaaattctgtatctttttacatttcctttaactgcagtgaagaaagttttgagcttttgattattggttatatatacatatgcttgtttttaaataatggcttagaacctgtcacattatttatgttcatatttgttttgtgaataaccactcaattttgttaactgagagggactatatagttggataggagaatagtttagggactaaattggtgaggaagtgatagtatagggactaaattgcaataaaatcatgctattgtggctgaaaagaaagtgaaaaggagattgtagtgtaggttttcatggtttattattctgttctttgttctgccagaattgtctatgtaaatcatgttctttgctgtttctgaagcaaataactatgtttagctcgtatgtagatatattaatctaccatcatctcttagattcttcagctcaatgtatcttagtctcaactggaaatttataaatttattgcaggcccttcctaaaatattctcggacaatttaaagaa

SEQ ID NO: 28163 - DNA, 955 bp, Medicago truncatula
  Intron number 2 from transcript Medtr2g014470.1 (locus Med tr2g014470) derived from phytozome v7.0 (chr-ID MtChr2; po s 3729952 to 3730906 reverse strand)
ttgttattcgtcagctagcacaaattgaggcagtatgtgtggattgatattcactttatctcattactgtttatcttaatttcccccgaattttatatgtggatttcgatttttttttttgttaattgttgtaaggtataaatctttaatgtgggtttttgcgaagatctttaatttgtgcttgttaaagaattctggtggtggaagttgcgttggatgtgtggaccagataggattagcagcgacaatattagagagtgtcggggcaactaacacctatcacagaaaagatggtggaaacttgactataggtggtttgggcatttagagagaagacttgtaaattatgtagtaaagagagtagatcatagaggaagacataaaaactatacgagaaactataaagaaatatctagagattaacgagttggatatagaaatgatatacggtagaacattatggcgtcgtttgatccatatagtggatcccactttgtgggataaggcttggttattgatgttgttaagagtcctgatgttttctttttacattccgttttgttgtgattttaaagaggtttagaaaaggagttcagatttgttttattttgagttttgatttttagaaatgttgtggaaagtgaagatatgaatttgtagtttacatggaaggttattgaattgttttcttgcatgtaaacgtttagcaaaacaaaatgatgcatcaatttctgtcattttgcataagacggaagtgtgttttataaagagtcaaatagtctttttcttagaagtgtttctatatttgaactggttgtagacaatgttgtgcatcatgggtgatggaaatgtagtgattcccatgtgtttcatggtaatggtaaactaatgattttcatctttgaaatacatgtgtaaaggcggcatcaaagaaagtgataacaagggaagagtg

SEQ ID NO: 28164 - DNA, 761 bp, Medicago truncatula
  Intron number 1 from transcript Medtr2g088080.1 (locus Med tr2g088080) derived from phytozome v7.0 (chr-ID MtChr2; po s 19844845 to 19845605)
atccttgggatcttccaagtatgtctctctaatttatatacttctttttctttctgattcttgtttatatttaatgatattcttctatttgtttagcttacaagtattaaagattaattaatttcttacaagatgaaacctctattgtaaaattaagaatagggtttcaatctaattaacacaagctagaaggatgaatgaaaaaaaaaaaattgagataatatttgcatgcacaaacagatattgattatggcatacatatatcttagctaccaatatattcaaggttatttattttagctctcatattctatatttcagaagattttaattttttttataaaattaagtattgtgacgaatataaataagcaataaaaaaattaaaaatcaaaacatgaaattcatttctaatttcatcatgagcatccattagctacaaaagcaaccgtaacattatagcttatgtatagaggattttgtgcagacatgtaaaaacaagaaagtcacaaggagtaacaatatagcttaatactttctttaactgatttaaaaaaataaaaatatttggtgtaaaattttatgcaacaactacactgaaaccttctctcaaaaaaaaaaaaaaaaactacactgaaacctatattctaacccacttttctacatagtgaaaatttttctttgttctttctttatttttcccttcattattggtaactatatatactaattaattagttacatgcattatgcagaagcaa

SEQ ID NO: 28165 - DNA, 463 bp, Medicago truncatula
  Intron number 1 from transcript AC235673_35.1 (locus AC235 673_35) derived from phytozome v7.0 (chr-ID AC235673; pos 160105 to 160567 reverse strand)
gccacattctctcacttttcaccaccaaagaagttgttgcaacaagcattctttcaataatttaacttttctcatgcttttattggtatcaacatgtcagggtgggtgttagtgtcagtgtttcgttcgtagtcctgaattgaatacaatacactaatgtaacaatgtgatttattttcttttttcttttggaaatttccccctaatttgttagtgtctttccatgtaatataggtcagtcagcctcattccccatatgaaaatattcctatctttcataatttgacatacttggagctccacaacagttgacatttgaaattacaagttcttcaccactgccctaagcttcaaaatctcaaaatttacgaggtttgttaagtttaaaaatcatatttggtttatcatttcttaacaaatgcttatgttttgttttattctgtgtacaatatataggagtcat

SEQ ID NO: 28166 - DNA, 804 bp, Medicago truncatula
  Intron number 1 from transcript Medtr2g041780.1 (locus Med tr2g041780) derived from phytozome v7.0 (chr-ID MtChr2; po s 11593040 to 11593843 reverse strand)
tcttgcaagcaaggttgatcgagcagttgggtgtggtatggataaatctaaatgtggttgcttaattttcatcatatatacaattggtccatgcaaatatgggttgtttaacttttgatccctgcaaaaaaaaaaaaaaaaatcaatccctgcaaaatttatattttaaaaaagtctatgaccctactttgttgatgaattgtcccatttatatctatatggcaaatgatgacgatgtaaagttggccacgtgtcatccaagtggcatccacatgccaattaagtcattttacatatttaaaaatcaaataatatattttttgtatttaaaaaaccaattaattttaattaattacaaaattaaaaaagtaaaacaacatataagggggaaaatcttaatcaagtttccttcgaatttttttctgcccttaaaataatcgaaaattatttttccaccctactttttaattttttttttaaatataccttactttttcaaattctctatcatcccacaacccccttataaaatatcttttttttgtttggattgattatatcccacaactgctccttctgggatatatttttttttttggatttattatatcccacaaaatatatttttttggacttattttttttagtagtcatgcatgtcaattacatagaccactgattatatgcaagacaccaccaatatagattgttaaagaatacattatcactcattcatcatgcaataacttcttcttcttcattagtggttagtttttagttttgttagagataggatttcaactc

SEQ ID NO: 28167 - DNA, 778 bp, Medicago truncatula
  Intron number 4 from transcript Medtr2g022210.1 (locus Med tr2g022210) derived from phytozome v7.0 (chr-ID MtChr2; po s 5870766 to 5871543)
tggaggcagtggcatacagacgaccaagttgcagggtattcacataactatagttaattattatatatggagtataataatagaatagtttatcacaaaaaaaaaaaatagaatatttcatatttacaaaatcaatgtgtttcggtacaattggttttcgaaccaacaattaaatgtgttgttatagaataggaaaatgttatatctcgcgacaaattactttcccagagtgtcccgaatgatatgctgccctttttcgcttatggacagaaaaatattttcctttaatttatgaaatggtgttccttaaagcaagattttaaaatttgattcaatttttttattttatgaaatggtgtttcttaaagcaagagtttttcaatttgattcaaaaaaaataaattacgaaatggtgtttcttaaagcaagagtatacaatttgattaaaaaaatttgattcagaaaatgatcaagaatttattggttaaaaaacaattgtaccaagacacttatttaatttttcaatgcacaggtagaatctccgatataataaccattctcgacttatgaccaagttaaattaatatttgtttatttgaactcttcactctactaacaaaaaagttaaaattgttagattgaatattgtgatatgggctttaaccctaactcttcaatatatataaattttcaatgataattatcatttcgtccataaaaaaaacttaatatttgtttttgattttgtgcaagtatagatatacaaggacttactcca

SEQ ID NO: 28168 - DNA, 787 bp, Medicago truncatula
  Intron number 2 from transcript Medtr2g017520.1 (locus Med tr2g017520) derived from phytozome v7.0 (chr-ID MtChr2; po s 4373474 to 4374260)
ttcctgaatttgatcccattggtaatcttatttatatattcattcatatatatacttaattcgtcgatttaattcatatttaaattctcgtaatgatgaagttgttgctgtgattttggcggcagcactgtttgttgatttggattaattaaaatttaaataaggttaattatagggttttttaattggtactagtagttttcaaattgtactgatttggtgtattagatgtttgagtttgatattcttcattgttaagttatttgaaattgaaacagtgttaataatattaatgatcaaatttatgttttttttattgctgctgattaattaaatttagggattatttatttgatattgattttgttttttcattgttaagttatttgaaactgaaacagtattaataatcaaatttaagctttttattgctagtgattaaaactagcaataattgattgatgagcttgccttgagattaatgttgcactgatgcaggggagtttatattttgggggtaaatttttatatagttgattgatgagctttttactgcactgaagcaggagagtttatattttggggtacattgttgtataattgattgattgatgagcttgccttgagataattaactgttgttcttttaatcatgaatttaattttgatgtacttttagatcaaattatatattattctgaatattgctggaaattcattgattttcagtatttatattgatgtagtaaatctccttggaaattgattttatacaggcagggaattt

SEQ ID NO: 28169 - DNA, 658 bp, Medicago truncatula
  Intron number 1 from transcript Medtr3g107050.1 (locus Med tr3g107050) derived from phytozome v7.0 (chr-ID MtChr3; po s 27096473 to 27097130)
aacccaattgtgagtaaaatcatttatattacaatttatgaaatttgtgtttctcgtcttaggtggtttcgacataagatggagcgtagtcaaatcagtagaagcataggaagaccacctagaaacaccgtaacataaactattaagaaagatttaggtattaatgagttgaatagatatatgatagaacattatagcgttttacttgtttaatcaatgtagccgaccccacttagtgggataaggtttggttggataagacttggttgttattgttgttgtaatgtgttacattgctcttagacttttttactttcttagttttgttatttgtattttcccttttcgtatttggtccatgacatagagcgttatggtgtaatttgatccatgtagcctaccccacttcgtgggataaggcatgtttgttgttgttattttcgcttttggtggatatgttctcttcactctaattgcactttttttcactctaatgttatttattctttcatttggaatactaaagcaacaattggaagaattttaatgtttaacctcaacgtcggatactcctatgtgccaatttttgttgtggttatatgtgtgtcttccatggaaaagaatctaaattgtttttttttattgaattgtcctgcag

SEQ ID NO: 28170 - DNA, 1011 bp, Medicago truncatula
  Intron number 1 from transcript Medtr1g102840.2 (locus Med tr1g102840) derived from phytozome v7.0 (chr-ID MtChr1; po s 21201370 to 21202380)
cttcaacatttttattgtcttcattccattttctggtaaggaataggatttatttctctctctctctctctctctctctctctctctctctaaattctgtttcttttttaatttctctcttgttaattaataatcctcagaagaaggaaaaaaaaaaaacatgtttattcttaattattatgttcttttgtatttcgaggtaattaatattccttgttctttcatcatttggttgcgtgatcatcatagactattatagtatttctatgaaacatgttttaaattaatttgatcttctttgtgtcatcgttgaaactgttttttcatcaattattactcttgaaagttgaaaccttaaaatttgcaagattatgtcacgacccaattatgttttcatgttgaatactgtcattaggatgtctgggattacaaaattggagtcttttcttttgagttcttgagtgaaatggatgaactttttcatttgatcatcttctctgatttgtgttccttgtaaagtcttgaaatttagttgagtgttttagtgtattgttgttaagattttaagttgtggtttgattgtgttgcactatgatgcttaatattggtgagaatcgcggtcaactgacgctgatgtgggttcaatcaacaattgtgatcatgttgtggtgatatcgcaattggatcacaattgtcgcagagacgtttaaaattttgatgtgatgatatcgcggtccaaattgtagtcgcagactttcttttgaacccccgactgctgttagttacttgtgcaacttatcaaaataatcatttttataaatcaaagtttgatagcgtgacgtggctcctagtgtattttgaattgatgattttggattatgatgtaatgtttctgtatatgatgatatggtccacttgataagaaggtttggttttattatcagtttttactcattttgctcatcatttaatgcaggtcttttaagcaatactttctaattgaagctctaa

SEQ ID NO: 28171 - DNA, 755 bp, Medicago truncatula
  Intron number 1 from transcript Medtr3g010210.1 (locus Med tr3g010210) derived from phytozome v7.0 (chr-ID MtChr3; po s 1694317 to 1695071 reverse strand)
gatttggtgcataaatataaatggtgggtgatttgataatggaaatctgatagcaaatagaacaatagatcgtggaggtggctttgaggtctagtgtttgttaataaatgtgaccggaagaagtagtttgttttgattttatttagaattgaagtagtataatttaagctaaattacatcagaggtcctttaaagtatttaattgcaataaattgatcttttaagtttttttataccacttagatccattatgttaattaattgtaacaatttaaattattttagatcttaaaaatataagttatttgagaattaaaaattataattaaataacttaaagggcttaaaggaaaaatatctttaaagctataagacccttatcactgagctagccttttaaatatttaaataaaaggaaaatattttgaattaaatttatgaatgctcaaaaggtcaccattattctgtactataaaaaggcaacccaagtctgaaatgataacttgttgagattgaccatatgtgaatcccacttttcaatatactcaaattaaaataatcccacctttcaaccgactttgtctttttccacttctttttacgtacaacttgttaattttttacttttgttggggtttaatgataaatcaacttagtatcttaaaaaatataaatattttgtgtggactgatgttgatggggttgccacagtttaaaaagtacaaagatttattgtaaattttaagagtgtttgt

SEQ ID NO: 28172 - DNA, 477 bp, Medicago truncatula
  Intron number 1 from transcript Medtr3g162480.1 (locus Med tr3g162480) derived from phytozome v7.0 (chr-ID MtChr3; po s 42434447 to 42434923)
acacaagaaaattacataaaagtcttcgacggtaattaactatcgctgaatacttgttaatcaaatgactacaagtgctttcatcacaggtcacatatacaaacaaaattttcagaaacaatcaattcaattcctttgtgtttcttcctctaatctcctcgtgaaacaaaaagccctacccatgaaatcaattgtttaactttcttcacaatcaactttaaacttattcttgttttatgagattaacatgactatttttatctggtttttaatgaagtaaacaccatgaaagagaaggatttgggtttaattttttttccagaagcaacaacaaaaaatacccaattcaaaaaaatgaatattttttttcaaaatcataatgggtagtttcataaacaaccataagaaaaaaaaaatgaaattatgaaacattaattgatagactccaattcaattattttacggtaaattgactga

SEQ ID NO: 28173 - DNA, 858 bp, Medicago truncatula
  Intron number 1 from transcript Medtr3g094180.1 (locus Med tr3g094180) derived from phytozome v7.0 (chr-ID MtChr3; po s 22527196 to 22528053)
ctaatcttagaaaacttattcccaagtctgataaggtaaacttattcatgtttgtcacatttaatttaattatatagtatagtattagtgtattactatttgaagcttagagtttgttacatatttcatgcaagtgataagatgttgcattcattcaattcaggctttgaagaataagtgtgctattgtgattttgacaaaagctatcttttgaaacttccataaaattttgttgccaccgtaattttatcaaagtcattataattcaaagcatgtacttggttgtaatttcaattgtactattgagtatgaacaatttgggatctatttcttattgtatgtttgaattgatggtgaattcaacaaaatcacaaagacactatgattttgtgacactcaaattttctaaaatcacggtggctctccggcaattttactcaatccaaacatgcatcaggaattgatttccacttcccctcttggagaaaatataggatgaaacttacattatacacacaacatcaaaaaaattaaaaaccgtctcctactatgccggtgtggaataaaatatttgataactctacctatgtagcactgatgcttcatattaaagatgtgtccacatactaatacgatactgacacatatgattgcatttaatcacatccattttctcaaattattttcagtgtgtacatgttttgtgtgcagcgtccgtgtctgtctcaataattacgaatttactactccattagtcgtatttgattacaattttctgcaatattaaggatcccgacagaactgcaacgcaacttcgattgaatcccttgcataacataatcatttatgtacttgcag

SEQ ID NO: 28174 - DNA, 775 bp, Medicago truncatula
  Intron number 1 from transcript CU651589_9.1 (locus CU6515 89_9) derived from phytozome v7.0 (chr-ID CU651589; pos 43 534 to 44308 reverse strand)
ctgattgaggtaagaaaaacattgctctgtagatttattagcttcttgtagttttgctttttgtagttttgccctgtagatttaatagcattgatgtgtcactaaagtggttttgcttcttggagttgtattattagcttcttgtagctcataatgaaggtgttaacttacttgaaacggggtaacatgtagtgtatatgaaatgagataataataagctagattttggtctgaacttttaatgtgtttgattttctaaggaaattaaattattttcatagaggtaataatggaccaatgcatttgcttgcaactgagattttgggcacccactgctgcttccactttgtaaggaacaatggacttcttcaggatatgattgctccaatggagatgggaggagctgaagccaaagaatgaatatgaagctgaagatatatgttgggttaatgatacttatttatggtattaattaattcgattagtttgatttgtatatcatttaatatctggtattagtagctagtaattaatatctggtattagtaactatattatcatcatctacatgcccattcttagttttatgcgttacaggctgctacaaagaagctaacattgagaaatgtcatagactgcattgcagatcttatctgtaaaagagttgatgtttattataactatcggtataaaaggaaaagtgatccttttgtgcatattttgttgtctggctgatgcaatatcagttttttcttcattcttgttcatgtaggct

SEQ ID NO: 28175 - DNA, 386 bp, Medicago truncatula
  Intron number 1 from transcript Medtr2g029780.1 (locus Med tr2g029780) derived from phytozome v7.0 (chr-ID MtChr2; po s 8002268 to 8002653)
actttcctataatcacgtttttcaggtaagcaattgtaaacggttaatttcttgctcacactttcatcttcgtcactctattctcacgcctccataaatgaaaatcgatttacccttcaattttcctctgaaagttgatttttatgtttatctatgtaaaaaaataactttgttctttgaatatcaaatactcaattacaaatttgtatatcaaaaaactaggtagattcaattgaatatcttcgcacttcaacgatatccttctattattatatgagtttcagaaaattttaggagcaattaattacttatttttgtaatttctgctttagcttagatattcaacaccatttttgtttgatttgcagccgttggcaggttttgtt

SEQ ID NO: 28176 - DNA, 948 bp, Medicago truncatula
  Intron number 1 from transcript Medtr3g111180.1 (locus Med tr3g111180) derived from phytozome v7.0 (chr-ID MtChr3; po s 28188028 to 28188975)
atcccaaattctgtaagaggttaatagacttttgtataattttggtcgttgtcagagctatgtttcaagttttgtaatgatttatcttcaagcaatgcaattaattattcgctttctgccttaagtatacttctttttctgccttagttgttttgatattgtaagcaagcaacttattcatggaacatgatattaatcatgttttagtgcataatatacacaacagtaagaaagcttctaatatcttataatgatgatgtatgaacaagctttgataaattcaaaagtgcatattttgcacatttgggattctgctcctgagattcacgtgtaaaaaaagcatcacaactttcttctttatcttttttcgaattttttgttccaatgtggtattaagctaattgatgctaagtccggtcgtttcgcgtgacactattttgccttaccaaacattgacatatcatatcacatgcaattggtccaagttattcttttcgtttcatgtcaggttgtattgcataataccagctgctgatgatgtttcaatcattgaacagtttatgtctaagcataatcttaggtagttttgtgatataatgagttgatttttttttttgtatgtattaattcatcaatttatttgtcataaactgttcaggttggaaacgaaattgatgaagttgattacacaaattctgataataatgtttctgcgagtactaataaataggttggaacaaaacctatctaagaactacggtctttaaaaaagataaaaaagaaatactatcaaaattccaaacacagtgctgttaaatgtttaatttattgacgtcttgctataaatctggacgttaggtggctttggaatacggtgattcttgcagcacaaactaacttggttgagacacagtaagcaaagtaggagttaagcgctcaactgacagc

SEQ ID NO: 28177 - DNA, 949 bp, Medicago truncatula
  Intron number 1 from transcript Medtr3g114550.1 (locus Med tr3g114550) derived from phytozome v7.0 (chr-ID MtChr3; po s 29019433 to 29020381)
actttgattccgccagaagatcgtcattagttagggtaaggtgcattccaactgcaacaattgtcttacctctgaaatggggtaattcaaacttgccaaacggccaagactcaagcatttcgcgcgacattcatgtttttcctttgaaaagattaaattcttgttagactggtttatatgaaggtattaagtgtcaaggaatgaacctcatttcgttggtacttgaataccatcatctaaagcacgcttaacaaaaatttattcttttcaaaggaaaacatgaatgccgggtgaaatgtttgagtcctgttgtttggcaagtttgaattgaccccattcacaggtaagacaattgttggagttggaatgcacattccaactgcaacaattgtcttcctctggatggggcaattcaaacttgttaattggcaggactccaacattcgataagcgtcttggacgctggtattcaagtgtcaaggaatgcacctcattcttttgacacttgaataccagcgttcaagatgttgatcgaatactggagtcctgctggttagcaagtttgaatttttccaattcaatggtaagatgattgttgcagttggaaggtacattccataatgtaatgtaatgtgtaatgcaatgtaatgtgataacatatattttattttgaatagaacaataattatcttatttattcacttttcgaatttatttattcattatgcaatttttattagttggattcacgttagatttaattagtttctattcgaatacgcagttattaaaaacgcgactttaatcgaaattattccaaatgtgattttattataagtaccataatgccaaacaaaatgtgcgggatacaaaaataaaacataaaaaaatctaaaactattaggcattaaaagtcattacattcattcatcctcgtcacacaagtcaa

SEQ ID NO: 28178 - DNA, 435 bp, Medicago truncatula
  Intron number 1 from transcript Medtr2g033450.1 (locus Med tr2g033450) derived from phytozome v7.0 (chr-ID MtChr2; po s 9117223 to 9117657 reverse strand)
tttgaggtttgtaatgtttgctttagcctatgaaacacgaacaccaaacattttttttgtgttgagggaaacggacaccgacacatgtaatataataaagttttgagataatgacataattaaatgtaatataatgtttcattgtcggatactaacacgtgtcaaacatcatcgatcaaaagtgttggtgctatagaggctttgaaatttttttggggacatttgggtttaagcatgcttttactttattgttgtttttcatttttcttctctttttcactttttcatatgattacttgggaccagctagattccttatgtatacattttcacagtttgcgccaattgattcaaaatttcaaccttcttacaagccatttgctcttgctttgtttgtttcttacaggaataggacattagttgcttgtattggaa

SEQ ID NO: 28179 - DNA, 392 bp, Medicago truncatula
  Intron number 1 from transcript Medtr2g005120.1 (locus Med tr2g005120) derived from phytozome v7.0 (chr-ID MtChr2; po s 104817 to 105208)
cattccggttctgacactgacagatagatcaacaggtcaatttggatgtgttttatgtctatgttttcacattcgacgaactagtttgaattttaacaattaatttgagattgtcaagagcttggcgtcaatttcagaagcgctccaaatattgttcttttcttcatttttcatgtaatgtttcatctaatagaaagttatcaaataatattactcatgtttctgttcaagaatttttcacactcttgccttttttttacttaattcttatatagatttaatcaaactaatttcaagtctttgttgaacccaaatatgtatctaaaaaaattatataacaagacaataaataataaaatatctaaatcttggcataacaatattgtttcagc

SEQ ID NO: 28180 - DNA, 441 bp, Medicago truncatula
  Intron number 1 from transcript Medtr2g029220.1 (locus Med tr2g029220) derived from phytozome v7.0 (chr-ID MtChr2; po s 7743027 to 7743467)
aaggtttgtgtttttttcttcttctatttggtgttttttgtttgaattatacgaataattgtgaagtatatgccgtttaattttgatgtatgcttagaaacaaattagatgaacaatgaattttgtcatggatgccttgtgtaattttgtctgaattataagattttttcaaattattagcggtgtccgtatctatgcttcataggttataggaaatttggaaaatattgacacaattcaatgtttttgcccaaattggaaaagagaagaataataataattgtatggattatatggttaatttggttatttagttctgcttaagagaaaagaaaaaaagtgttacatcattcaacgagatacacaactctaactgaaatagaaatcataacttattctcttgttgagcaaaataaatttgtttctattatgcagagaacc

SEQ ID NO: 28181 - DNA, 512 bp, Medicago truncatula
  Intron number 1 from transcript Medtr2g113850.1 (locus Med tr2g113850) derived from phytozome v7.0 (chr-ID MtChr2; po s 26769504 to 26770015)
cgtggcgaatataggttggattggaagggaggagggtgatagtggagatctagagagaggtcagagagatgttttttgagagagtgaaaaaattaacattgccctaaatgagtgaatattaaagagagtgtttaagaaagtgttgttagcgctactttttttaacaagatataaatttaatataaaatttaaagtttttaattcttgaaaattctaatctaattcatatttttcaaatctttttgtgggaaatttaaataatattttaaatatctttgtaaataattcagtaaaaatatgaatgacacatataagttgacttaaaaatagagacaaaaaatttaaagactgaaaatttataaaaggtctaaaaagaaaacgaataaaatttataaagatcaaaacttaattttctttgattaagtagtcttagttgaagttcacacatcttaaatttgaagaagtgaagtttttgaggtttcggtcgcggaagaggaaatcgacggaactgg

SEQ ID NO: 28182 - DNA, 970 bp, Medicago truncatula
  Intron number 3 from transcript AC235662_4.1 (locus AC2356 62_4) derived from phytozome v7.0 (chr-ID AC235662; pos 24 777 to 25746 reverse strand)
cagcacaggaacattgttaggtattgtgattagtaatgaaattgatgcactaagcaatagtattatgcttgaaatttggaagattaatgtttaatgcatggtttagcgtgtgacatggtgtttatcttgtgatattttttgcacattgatgttatggttatagatctgcataaaacaccaatttttggcatttaaattatgacaagttggtttgattactctcatatgtttctgtgtgattatttgtcactgcaatgctacttatattatcgtgtgatctgtgttctttatgattctgtcgctgtcttgtggcaaatgtgatactctaaagctatttatgctgttgagattaggattggttggaacaggaaaacctgttgacttaagccccgatggatatgttgtttttaattagttcatagttcatgcattgttgttctaatgttattctgcctagtgttgaaacacagagtttatcttgtgttatttttggtgcattgatgttataggtatagatctgcatataaaccaatttttggcatttgaatcatgacagcatatgacaaaaagattgttcggttactctcatatgtctatgcgtgattattttgagatggctaaactagtgtatgatgatgtttctgatagtttatggctttgcgaattgaaaatatatttgtattattctggttgtgtcaatgctgcatatgtggcactgcaatgctacctacataattgtctgatccgtgttctttacgattctacatctgtcttgtggaaaatgtgatactctagttccatttataccgttaaaattaggattgggtggaacaggaaaacctgttgcttaattcccgtttgatatgctgtttcgattagttcatacgttgttgtccacattttattctggttctttaactatttgcttattgagttaagtttggtggttatgtggatgacaggttgcagg

SEQ ID NO: 28183 - DNA, 416 bp, Medicago truncatula
  Intron number 2 from transcript AC235665_6.1 (locus AC2356 65_6) derived from phytozome v7.0 (chr-ID AC235665; pos 20 938 to 21353)
gaggtatttttttgaaacaacttatttatgtttgttctcattcacatcgaatatttattttcataatatcgtacctgcacacaaactttggttgttactttggtcatgttatttgtttgacgagatgaactcttcaatataaccaattacttcaaactttccaaaagctctcttcggtttctccataaacaccttcagattattaaaagctatttaacaagttcaaaactaaatacttactaatccaataagtgcttgtgtgaaaacaaacttaatcatattgccttttaaattttaattttaattttcttctgttctctttaagcatgggtatgcagttgtcacatgtacacactcataaccatctaaaaagtgtcattgatttgatttggttgctatttggtccttgtaggttc

SEQ ID NO: 28184 - DNA, 647 bp, Medicago truncatula
  Intron number 1 from transcript Medtr2g008300.1 (locus Med tr2g008300) derived from phytozome v7.0 (chr-ID MtChr2; po s 1495218 to 1495864)
aattgtgcaatcaaagcttttaagttgtgtgttttattttatttttggtgaaacaatagtttgaagttggcttggagtagaagatttttgaaaatttaggtttttacgaattcttgtttttacgaattctttaaatgcaattacacttctaaaagatgattgtagtactatccgttcacaacaacaacaaatattaatagagaatattcaatagattcataataatactggtgcagtgatccgataacatatttttaaagaggctagtcacgttgacgatcttataaaagagagtttatctttgaatgacaatgtttatatttttgagttttctctctcttctatttataacatgttttattgacaggtgtatgtagttcacgacttgacgtttgctttctttatatttttctagttttattttttttgttggccaaggcctcctaaatatcaaatattaatttaaatatcatcttaaataacacatcttatttaaaaattatcattttaaaatattttgtttataaaaaaaaaaaaggtcatccaaattcaattaaaatgcagtattagtgtggcacgtgcgacatagtagacctaagtaactgacgagagagagagagagagagagaggcggaatctgaaacagg

SEQ ID NO: 28185 - DNA, 286 bp, Medicago truncatula
  Intron number 1 from transcript Medtr1g106980.1 (locus Med tr1g106980) derived from phytozome v7.0 (chr-ID MtChr1; po s 22464249 to 22464534)
ctggtaggcccttgttttatgcaggcacatgggatataatttcgtaatgcagtgctaagttttttctttttaatgtttctcatcccaacgtttttcagaacatgcattctgttcaaattacataattcaaacgtgcaaaaatgggattttttttttttgcacgtttagattgtgtaatccatacaaaacacatgtttcgagaaatgttgggaggggagaaaagaagtcatcttttcgtttttgttttttaggtattgcttgtggatacacaagtccactacaagga

SEQ ID NO: 28186 - DNA, 994 bp, Medicago truncatula
  Intron number 2 from transcript Medtr1g092960.1 (locus Med tr1g092960) derived from phytozome v7.0 (chr-ID MtChr1; po s 18772517 to 18773510 reverse strand)
cactactggaactggattcctttgcctgattccaggttagcgcttagcttttctatttctttctttttttcttaatatatcttgattagctcttaatcaatactagatgctatttcttgttcgccgaatcaaaccgttatatctgagcttatagcataatatgtcatccgctataagctagtttatcagctataagctagtttatccgctataagctttacactattttttaccaaacagagccatatccttttttacgggcttgaataattctatttcccatgttagtgatcaattacagttgatgggttttagggcattcaaaaagaataactaagaggttgaatatgctctttcctcatcttctaagaattaactgacttttgctatcttctaatccaagttagtgaagaatagttggtgtagtgttataggccataccatatatcaaaatccatggctagtagctaccaccttgggttcaaacccaaatttaaagcatgttcaatcaaacaagtgcttgcgaaaattctgatgtccttgtgacttagggaatttggaatcggttcctttctccatatcacttcagctaagtatcagcaacacataaccctgctcttcactcaactatcttttgcatccaacttcagcttggagcaccaagatccttcttctgtaacgctgtggtttttgcttcctctgcagacttcctttttttcatcctatttgctgcggcaaccgaacctatttctttttgaatgcatcattttaccaatttttttaaatatctgaccaatttgtttgttactttacaactaaagatgcagttcttatttgaagacttgttgtctctacacatgttcatggcgaattgactttgcatgatttgtttccattccttcgttcaagttaaaattgatttctctataaagtcataactgtaacttctattcaattagtttatttgtcgagtcattcatcattcaggatagca

SEQ ID NO: 28187 - DNA, 796 bp, Medicago truncatula
  Intron number 1 from transcript Medtr3g092990.1 (locus Med tr3g092990) derived from phytozome v7.0 (chr-ID MtChr3; po s 22014359 to 22015154)
tctactagttccttgattccttaattgagtttttatttctttctatttatatttttatgatttgtttctgtttttgttttctattttgtgtttgttgttttctcatattcttttttcccgtttgatctcggtagttcttgaatttttttcttcccaaatatcaaggtagaagtcatgattgttttttttacatatttatacttttttgattttttttcttcttgtcactagccttaactgcggatatagagtatggtattttgtagataccattttgtatatatttttgcctataatatgggggtgtactcagttaagactcataagaattcgaaccagcacaaattgaccacacactactattttttcagtgtcattactgtcatatttgattatgaagaaataaacttgaatgactatgatgatatttcccctaaaaatagactatgacggtatttaattccagtgttcgtaatgaatgttatatcaagagtttaatggtggtgtatcgacaatttaaaacaattttgcacacaaccaatcaaaacatttaaaattgctacaacaagtaatgtttttaatttaagtggcaattttgaatgttttgattgatcatgtgagcaaagttaccgtcaatccaccatcattaaacttttatattaattgaacttaatttttatgtaatttgatttggattcaaattttatgtataatgttctaacgattgaagtttatttattatacaattttttataaaaaaggtttcttttactcaattttttttattggctaccac

SEQ ID NO: 28188 - DNA, 700 bp, Medicago truncatula
  Intron number 1 from transcript Medtr1g028520.1 (locus Med tr1g028520) derived from phytozome v7.0 (chr-ID MtChr1; po s 6943414 to 6944113)
attcggttaggttcttcatagtttatacgcattatcaattccattattaatttgttatcgtcctttcttcttttctgactatatttgttcttattccttgttatagctatcttcctagtttatatgcattgttcaatcataaattcaaacatgggatactatatgcgttggataaggtttttttagttacactttacgacaaaaagaagtgccatctgccgaaagaaagggcatccctcccacaacttgaccacactcttgccagggtgttatgatatatatatatatatatataatttacattttcaataaaattagttaaattaaatacaaatttagtctgcttgattttctaaattatcttcttatttgaaaatataaattaaataatatatattttatttgtggtattatatattcttttcacatttacactttgatttttttaaccaaactgaatcatagcaaaatggatcatcttaagaatccaatttatataacaaggaaaagaaatggaattgtacatacaatatttgacatgcaaattgaaaacatgaaacaaacaagagctacaattacgtacagtttgtaataaatgatgaaactcatgtatggaaattttttattttatttttccttcaaaccaaacaaatctaagaaatataagccatcattactttttaggggggaaaggcaagaa

SEQ ID NO: 28189 - DNA, 1007 bp, Medicago truncatula
  Intron number 3 from transcript Medtr1g016860.1 (locus Med tr1g016860) derived from phytozome v7.0 (chr-ID MtChr1; po s 3419845 to 3420851)
cctgcttttacattcatcctagctatcattttcaggtgcctatctctcttactctactcttgaaaactagatatgaaagaaatcacttgcttgaacaagaagggatatttttcaaatgcttacaattcaatttcaacaatatatatgatcttggtcacaatttcaataatatatatgatctttgtcaaacatacatgaaattcatttgtatttagcaatgagataatacatgattcatacaatttgatgaatattgtgaagttttgctactagtgaaatcaatgcaacctaacctgtgaacaaataaaacgattaaccaaaaatagattcaagagcaattaaatgagatgataaaagtcttttttagcttaaccaaaagtcaaaagtttcaaacacttacctaagaatgaacaacattaacactcttgagatatagttttgttgcctaatgtgttactacccaactctagggattagtttcacttgttgtgagcaaagaatatccgattaaaacaaaaaattaaattaaaaaagtcagtccccttgacctccgctattgtttaattcaatgaccgaaaccaactaacctatattttatccgaatatgttttaagtttatgtccaatccggtcaaacttgaaatgacttgatttgggtaaaagaattatgattctaaacccgcaaactcaactcttcaaaaacaattgatgtattttatttttgttaatgcagtttaaattttgtgttgatctaaaagtgtttaaacttaatttcaagtgttaaaattttaaaccagagtttagtttaagtgttgaaatttttatgaaataaaattataattatatgtatttttttagatttttttcggagagttttttgttgacccgaccgaaccaaaatgttcatcatcggcagtggcccggagtttgtctgaataagtatgtataaaatacaattgcgctgtttaatagattgtcttgtgaacaataatggttgttaaatgaagg

SEQ ID NO: 28190 - DNA, 439 bp, Medicago truncatula
  Intron number 1 from transcript Medtr3g025710.1 (locus Med tr3g025710) derived from phytozome v7.0 (chr-ID MtChr3; po s 6777800 to 6778238)
actttgcaaggtatcttcttgagcaactttcgaatataaaggtaaatcaatataaaaatggagagataatttcctgcttaatcattagggattaatctcatagctagtcaatataaataactgtagatgtagtgatatactctaatggactcattggagtttgaaattccttaattacatttgattccaaaataaaaatttaaaaagaagtatataaatttgtattttcaattttgtggggtttgaatcctcttcagtgacatgagtgtctagtgaaatcctatccattaaaaattaatgcatgtaggaattttaaatgagagagagaggacaattaatggtaaaaattgtatcactgcagaagaccgaagatatttccatcggaggaaattcattcccaattttgtgttttttaataattgtatagatcgtttgtgcg

SEQ ID NO: 28191 - DNA, 842 bp, Medicago truncatula
  Intron number 1 from transcript Medtr3g128150.2 (locus Med tr3g128150) derived from phytozome v7.0 (chr-ID MtChr3; po s 32720711 to 32721552)
tctggaggcagtatctacatcaagggttatagaatgtaatagttattattttgggttttatttggttataataagcatggtattgaattgattagtttgaattcgtgagtaatttttctattttagtagttactctcgatagactatgtcttgtttgcagtttcggtattcatcctcgcagtgttatctgttttttcattacttccaactttttcgcttatttgcattccatattccatatatggttatttctaattttaatcatgattttaatttcggtttttctctttttgattttgaagttaagacacatgatcagtgcctttttttggtaactttttgaaagccagcactggattttgtgtggataactaagggacgtaactgatacaaaataccacatctcttttctttgaaatctttttttgcagtttgctcactgccatgttccatgacgtggttgtctatttatgacatcagttactcgtcgtcatcttttcaacaaaattagcacaagtatatgtatttaagttcctgactatttgtatcatgcaagaatctgttactcaggcctaaaaccataaaaaaagggcaccgcggtgcactaaagctctcgcatacccagggtccaggaaggggtcatagtttatgaattattcatttctaaggacttcttttctctctatttaactaaatgcctagatttatttaaacaatagtggaatgttttaaaagattcttgtgcttgttgcaattaaagtgtaatgtgcttttcatgaatgtagactttatgattcgtcacttatctgttttttcttttaaagagcaggactggtagtggg

SEQ ID NO: 28192 - DNA, 779 bp, Medicago truncatula
  Intron number 1 from transcript Medtr2g049150.1 (locus Med tr2g049150) derived from phytozome v7.0 (chr-ID MtChr2; po s 13392463 to 13393241 reverse strand)
acttagaaagcaaacaaggtcataaagagtggttggtaagtactttttattttaactttttaccacatcatggttttttactaataagtgctttttagatatttagtttttagattagggttaaatattgttgtatcaatgtctataatttagtcattagaaatacttaatattttgttcaagtgatttggcctgtgagtgaaattaggattgaatataggatagactagctcaactgattcgaactaagggttacagattttgaaggatgtaggttcacatttggacgaaggaaaaaacaatattcattttagcaaacaatattcgtagttacaataaacacttcggacaccacaagagattacgagaattaaaaaatgagagtttatttttattttttttttagaatctaaattagtttatccaaattaacatcggatagaatcgaatgatactttgaagaggaacacactcacgggtcccaaatcaataccaccggtaataaataattacaattgtcacatatatgtcaccgcaagaaaaaataaaattagtaaccaaatctggaaagaaaaaatatgaacttatttcagtggtgtgaatgtgattaaaagactagaaataatgtcatgtgtatggctgcatgcaattagttatttttagaaagaatccttttcgtaataagtgattttgacttttgagttttgacttctaatactttgattctgtaacttgtgcttacagactgaagttgttgttttggggcaattaagggatcc

SEQ ID NO: 28193 - DNA, 578 bp, Medicago truncatula
  Intron number 2 from transcript Medtr3g097330.2 (locus Med tr3g097330) derived from phytozome v7.0 (chr-ID MtChr3; po s 23221066 to 23221643 reverse strand)
ttcttaccctggctgcccgggactctgttgttcatgtgagttatgttgttttgacataaatttgacatcaaaattcaaaaacaatttagatggttaatcaaatttagtatatagttcataaatataacaaaaactgtcacaactcattgattctccataaaacacaataaacatgtcattcaccataactttttaagtgttcaaataaacatacatatttagtaacaatttaaattgtattcaaatatacataatttttagatgttcaaatataatgacattaattaaccacgatttatattcaaatatacatctggaaatcgttgttaattgtgttaagtggatggataatgaattggaacacattgttatattcattaaccacatatgtgaaccatgtcagccatctagattattgtggaattttgatgtaaattggtgtttcaaaatataaattctatcatgtaacatcatattccaatagaacaatgataccgtactatcctcttcattagagtgatttaattgatctataaagggttatatggttgttggaatttacagctaggaggcccttc

SEQ ID NO: 28194 - DNA, 676 bp, Medicago truncatula
  Intron number 2 from transcript Medtr2g011000.1 (locus Med tr2g011000) derived from phytozome v7.0 (chr-ID MtChr2; po s 2763789 to 2764464)
gttttataactcttcttctgtttgtttggaaacatgtaaatgtcactaattcatttatgcccttgatatctttccttattgttttcttttaatgtatttgtatgagtggcttcaattacatactacggttgttaaaaaacatgtttttttctcagaatattccttgccagtagaattgattcaatcacacctcctaaatttggggtaggcatttagcagattcatgtgttaaacttttaaagcactaggctttataattgatgttttttatttttaatctaataagagtgtaaaaggctattgatattagaattggaagtgttgggttagatgttgtttatttcatttgatggccataaaactgagatatcaatgttgaaaactgttgagagagagagagttgtgtcacagtgcttccaacatacgcacagttcaattcacttaatgttgtatttatgtacatgattagatcaccaattacaaatttttgtcttccataaaatattaaattaattgttgtctttcaattatgataaaaaattattcaatatcataattgtttgtcaattttaatgtcttttgatgttttattgggtatttatgtttgttttgtttgttagaatatcaaaaccaccaaatagacaccaccaccacctctgacctaaccttaattcac

SEQ ID NO: 28195 - DNA, 570 bp, Medicago truncatula
  Intron number 3 from transcript Medtr3g103320.1 (locus Med tr3g103320) derived from phytozome v7.0 (chr-ID MtChr3; po s 25405188 to 25405757)
tagaaatgtaagcatattctgcttcggtgctttaatcgcaactttggacatgcatttgaattaagagttgtttttttatgtgaaacctaaaatctgcagtttctttaggcgtaattcttcggctgaatgtataaatttcacaaaaataagaattgtttttcatgtaaacccattatatacctccttatagcttgcatcaccgtgtaaatgtggaagaaaattatccgaccttctgcaaaaaattctgccagttgtcaactgccttttatttattcattaaattgtttttgaacttgtatctgttgggtcgtaagggaagcccgggggatcgtcacattgggacaaaaacaacctcagagaatctggcaccaaatatttacacatagcatctatccctttggtacgaaacataggttgttgatgcatattaggatagactctactacgtacagtggtttttatttattgttgtatctgttaatggtcatgaaatagttaaataaagcagacggagttgttgagttaaaggacagatttttctgatgaaaatcgttgtatgcaggatcttaa

SEQ ID NO: 28196 - DNA, 390 bp, Medicago truncatula
  Intron number 1 from transcript Medtr2g052240.1 (locus Med tr2g052240) derived from phytozome v7.0 (chr-ID MtChr2; po s 14121556 to 14121945)
gtaagttctacaaacctcgaggagtttgaagaaaaccttttagtggatactttgtttgttttcctcgttgtttttcctagataatttagaaaggttaacacaaaaataaattgagaactttgtagaacataacacgagaagttatttatgatttaagaatgttaagtctaaattttgatattctaaatgaaattaaagaatatcataactaatgatcatataataattcaatcatatttaattgaattttaaaaaaaaatgaagaaatgatattttgtataataattttgttacaactttttataacaacatttttttctttttttgtttattaatcaaaaacgataaaaaaaagaaagagaaagagagagacccttcagcgggtcgaac

SEQ ID NO: 28197 - DNA, 367 bp, Medicago truncatula
  Intron number 2 from transcript Medtr1g024430.1 (locus Med tr1g024430) derived from phytozome v7.0 (chr-ID MtChr1; po s 5797468 to 5797834 reverse strand)
tctgaattattttaggtaagaaataattaatctgactttcaatgtttatgaaattgcttcttctgaattatttataacctattgtatatgtcattattctttgaaataattttttatatatatatattcttatttaacctagtgatagtaattttagtttcaatttgaatatgtatgcatagggaagaactactagcttttttctattaattcatttatcataatattctgtgttttttcaatttgaatatgttttttctatacatgttgcacatattatttttgctttcattttcttcacacattgatattctttttcacttgccttttagatacttttggcactctcaatttctttttaaccaat

SEQ ID NO: 28198 - DNA, 450 bp, Medicago truncatula
  Intron number 1 from transcript Medtr1g024430.1 (locus Med tr1g024430) derived from phytozome v7.0 (chr-ID MtChr1; po s 5797885 to 5798334 reverse strand)
ctatcaatcatcaattttgttcctgcttaatcagggtatgttcctttcttttcctacttttgttatttcattttttttttctgtttcctttgtgcttcttttttcaaggcaccaagttttttgcttcatttttttttgttctttgtcttttcaattccttcccttgtccactctttgcatgtccatgttgcaaaaaattcataattattatagccaaaaaatttctggtttgcaaagtttggattagtatttataaatcatagctagagtttgatataattatttctcatatggtttaacaattctctagcaaatttggaatttttcttaagtttttgttttttctcttgatattttttatatcagaagaattgtcaacaaaccatataaaaattgactactcttcttcctgaagaattttccctgcaacaggagacatctcaacattta

SEQ ID NO: 28199 - DNA, 843 bp, Medicago truncatula
  Intron number 2 from transcript Medtr3g103330.1 (locus Med tr3g103330) derived from phytozome v7.0 (chr-ID MtChr3; po s 25414674 to 25415516 reverse strand)
caattgcgttagcgttaggtaaagcaggttgcaaggttagtcgttgaaaactgttagacataaactgataatgaaattattcaatattcatgtttatttctggtgaatttcgaattgtacgaatagattctagtagttacaaaaaatgaactcataattttcaaaacgattttgttaattttcctcttcatacgtagtaggctctatcgcaatttatgtaacttgttcccgaatcaccagcttctgcattgcgagttaaaaaatgtgtgttagagagtgtgttactattactcttttatttttggttgttataattgatcgtatttatgtttaaaactaaatatctaaagaatatgatcttgcggtaataatgaaatttctggtcatcttgttagaaatctagttctgttgttagttttttccccaaatttctgtcagaaattggcaatagttagaattccttgtaggtttgtagctctccttaggctcagtttggttgtcaattaaaataagatcaatttataatccttcatttccaaaaaagttctggttgatttataaatgttatagagatgttttttttggcaaattataatagagaagttaaactagagtttctgaaaaattgagaagtagaagccagcttaaattagaagttaataaaactcagttattacaaaattcttttgatattatttttacaagtggttttggagaaatttatcaaatccgtcttttagtccttgcaatgaaatcagagttgtctacattgctgtaaacgtaatgcttttggatcctgatgttcggttacatggacttaatattttcaggttttggtcaact

SEQ ID NO: 28200 - DNA, 441 bp, Medicago truncatula
  Intron number 1 from transcript Medtr1g010430.1 (locus Med tr1g010430) derived from phytozome v7.0 (chr-ID MtChr1; po s 1732460 to 1732900 reverse strand)
caggttcgaggctgctcatcaacctacattatccggttgttgagaagtttaagacttagtaagtttgcattatgatttcacaatacagtgttagagtaaattattatttcacaatctaatttgatttttttttaccatgtttcttgaattgttgtcgtgaccttaacacttctcaagcttagagtcaaagcatcagtcagaacttaagtcagagttcgacttcttctcaatgtacttcgtacaacgattttttcaatctgtctcaagtaaggccaattgttgaatttataaacttagtcaaggtctgctttttttttattgtacaaacaattctttgaattttttacgcacaaattaaaaataacatattgcattattctttatttcatgtgcatatttgtgttaggatacatattgcatcaccatttggaaagcaactaa

SEQ ID NO: 28201 - DNA, 736 bp, Medicago truncatula
  Intron number 2 from transcript Medtr3g103450.1 (locus Med tr3g103450) derived from phytozome v7.0 (chr-ID MtChr3; po s 25453011 to 25453746 reverse strand)
tgctgctcatcgatttccacctgctggtggatttggtaagttatttttatctctatgtagatagtagatgtttgcgatttataagaaaaatagtatgcaatctatcacttcgcatctatacaaaatagggaagaattcatatttttctttttccatgggaatatgatggcgtcatgtttggagagagtctgtttcgagtttccgtgtatgggatatgtttgtctttctttctctgaacatgggtattatcattctcctaaaggtacatttgattaaggagcttaaaaggaagggtagagtaagggtaagctatcattttaaaacaaacattcacatattttttgtcattagcatttgataactctagatggaggctgttgtctatggtttcgtgcttcgactaggggatttcttgagaataatttgggtacttcatagtatctgttttcaaaatctttggcatggtaatttcctaagttgttttcaaaatgactgaatgaaggcgcactcgcattagtgtggcttttagcagtaacttttttgtttttccctagaggcaggatgagtaatccactgttattttttgtttgtacatacatacagttccaggccaggggcagtggtgggtaaaggcctccccgaaatggttaatctaggattcaaacacactgttttttgttaatgctgtttatttaagtgaagcaatttgacacaatattgacgtaattttgcagga

SEQ ID NO: 28202 - DNA, 901 bp, Medicago truncatula
  Intron number 2 from transcript Medtr3g124560.1 (locus Med tr3g124560) derived from phytozome v7.0 (chr-ID MtChr3; po s 31602722 to 31603622 reverse strand)
aacttgcttgtaagtactctacatacttcaattattacaccaactagctattttaattaatggttgtggtaattattgcgagattagtgataattaggtgaaacgagccgagttgagggggttggataactcaagtgacttgagttaagagataagagaatttgagaactcaagttgaaactcgatgtaagataaagtctaataactaattagtaacattgaacgtttaaaaaatgagttgagccgaatatttaaagttgtttgatttaccgaagaaaaaaaaaattgtttgagcttgagttgtttaaagttaattagtaaagtccaggtgtgtttgaaaaatccaaatttgttgggaaaatacatgtaatatgaagaaagaaaaagcactagagattttatatttagagtccattagtgattttcaagaacaccaaataaattatatagttcatggtgtatcaacaaatttttgggtatgagatagatttgaatcggcgtagacatgttggtagacatattgccaacgaataggtcctattttgagaacacaacacattttacagcttatgtataaaaaagctatttctataataaaagataaaataaaataaaactgcttgttttcataagctactatgaagagtttatgaaaaaaaattgttaacacatcataagttgttttcataagttatcaagatgatgtcacaaagtgtttatgccaatgtggcaatgacattatataagttcaaataatcaatccaaagattcaatccaaacatgcccaaaatttaacccttttcttttttgagaaacatgcatatgtttcttaatcttatgcttggattgttgtgattatgattcagggtgggacttgggtttggcttggcatatttggaag

SEQ ID NO: 28203 - DNA, 889 bp, Medicago truncatula
  Intron number 2 from transcript AC235757_34.1 (locus AC235 757_34) derived from phytozome v7.0 (chr-ID AC235757; pos 108967 to 109855)
ccctgccaaggttattattcccttcttagatatcgtgcccccccccccccttccattgccatgcaatttctgatggaatacattcccaaattcaatagtcaattaggtattaagttatgtacaggtgatgcccatgcccaattgaattgaattatagtgatgatatgtgtcatggatcaaactcctaacatatagtcacattggcttcctgcgtcatgaatatataaatcctaaccaaaagcctaacctagttccgggctcaataatgatttttatctgcaacaggggaagtgagtggaaacccattgtgttgcgtgcttacttatcttttcccctgttgtacagcttatatatgttattgatagcctccctcctacccttcccaaagaaaacttacccacatgaaatatgaatgcaaaaactatcatagtcttgttaaggatttattgaataatgtaggtctgtttcatattaataaaaaggtatatagtctagataggtttgatttcaaagttgtgtttgccaggacaatcttcagttgatagtgaattttgtctcagttttttctgggtagaattacaaagcaaagctaagttgtgagtcgatattactaattttaattttatacatcttcaaaattacatgaaagtgttgtcaagatcttctgctattacttatgatctttttcattagtcataatcaatcaaaatattggtgcggtttttggctaaattggatttcaaaatattggtttcatggtagtttagatgaagatcttgtgtttcgtttcttgctagttaatttctcgtcgtggatacaattctgagagttgtttcaacttttgtgttttcaaggtacttgactgttcagtttgtccgtttcttttgga

SEQ ID NO: 28204 - DNA, 1025 bp, Medicago truncatula
  Intron number 2 from transcript Medtr1g114460.1 (locus Med tr1g114460) derived from phytozome v7.0 (chr-ID MtChr1; po s 24425105 to 24426129 reverse strand)
cgctagatcatttgcatcttggttctccactcgaggtatatgccgaatgcccacatggttgaattgctttagtaatctgctagctattgcatgatatgtaaccaaactctctttgacgcgcctatattctttagtcatctgtttgaggacaagttcggaatctcccttgatctcgatgcatcttgcccccagtttgagtgcaatttctagacctgtaattagggcttcgtattcggcttcgttgttagagcaaaactgactcattcaaaacatatgttcgaatttatggttgtttgggcgatattaggactatccctatgccagtaccattcttatggctagaaccatcgaaatataaacaccatggatggttgtctatttcggtcgtcaaaacctcgctcattgaatgatctacaatgaaatcggccacaatctggcctttgacagcttttaacgattgataagttaatgaatattctgtcaatgccaaagcccatttcccgactcggttatgtaaaattggtttcgacaacatatgtttaatgatatcaaaatgagaatacacataaacgtcaaaaggctttatataatgcttaagttttgtacatgagaagaataaacacaaacaaagcttttcactaggatggtatcttgtttcagcatcattaagtactcgacttaaataataaatggccttttatgtgccatattcatcctcttgtgctaacatgcttccgatggtgccatctgacgttgctatatataacttcattcttctccctttcaacaaaggagaaaggaccggaggatttaccaaataagacttgatttcgtcgaaggctttttggtgctcaggttcccatttgaaaacatcatctttcttcaatcgaagtagtggtgagaaagcttgtgtcctgccacttagatttgatataaatcttcggagaaagttgatttttcctaatagagactgtaattctttctttgtagagggagctttagtctcgattattgctttggttttg

SEQ ID NO: 28205 - DNA, 575 bp, Medicago truncatula
  Intron number 1 from transcript Medtr2g113720.2 (locus Med tr2g113720) derived from phytozome v7.0 (chr-ID MtChr2; po s 26720725 to 26721299 reverse strand)
ggctattatcgtcttcctcattccaaagctgcaaggtaaaggcttcatgttgtatgttctggatcaaaaggagaaaagattatgactatcctttaattttaggccaaactaagataaaatagaatgaaatatgaggtaaattttttgcggtaaaaaatgatctgagcataaagtaagaaaagctttagtcagaataaaatatagttcttggaaagcataaagtaaaaataataaaagtgaaagtaaacaagaaaagaatttattaaaaatggaatagtttggatttcttaggttcatttgatctggtttaatgtattggatatttgtttgatcatatatttttatcttgtctttgatgtcgttattactcgtgtatcaacttaatcaaaatatatgtcaaagtttcataatttgaaatatctgttacaacatcttcacttctaagatcaaactaaaaaatatgaatttgatgacaactctattgatttatattaattggttttttgtcaactcacatcataataatgtgtgcgaagacatgtttccattgaacaatttgttatgtcgattgcagg

SEQ ID NO: 28206 - DNA, 1042 bp, Medicago truncatula
  Intron number 1 from transcript Medtr3g139730.1 (locus Med tr3g139730) derived from phytozome v7.0 (chr-ID MtChr3; po s 36042467 to 36043508)
ttgcacctctcgaacgggttaagatactgtggcaggtatatgtttatgtttatgtttatgtttatgtttgttttttatctgattgtttcgatgatctccagtggaattgatttcgtcttcaaaattgttcacctatcatcaaacatacattcgactcacatttactttgaatcaatttcgttaccgcaaaaccaatcacgctcattaacgaaacactgcaaaattatttaaaaagatcttcatcctgtatatattcattggacttgtgctagaaaatggattgatggatttcaattttcgtaaatggaatttctcaggaaaaggagttaggatttaggcttgtatgaatagcgagagaatgagaggatgtatgttaccatgctatggttctatcagtttctgctccttgatttgtacggcttttgctcgatttttttttttttttttttttttttgaagttcttgattttgcaatccttgtaaatttccactctttgagtgaactttcaaagcttattgcctcctttccggtttgaaacttccggcagagactttttcaaaacaaaaaaaaaaatataactgataactctggcttttaatgtttatttctctattgtttgatgttacataatacataatcaatggcggtgtttctttccttgttccttagttactccaaccattgtagtcaagtatgactatagcttagtagaattttgaactaatcgctattgttctgtgatatgttatttagtacaaagtgctgttaagtagtggctacagcagtgctatggcactgtagtgcagcagaagtcgaaaaaaaatcatgattttaatgcgatcgacaatagtggctccaagactattttttaaatgggtgtatgttcctctttacggccttcaatagtgagataactcagagaagatttgattgctattgctattgttgatgaatgttcctctttaaccttcattttattcttgttttttattttataattttacagacaaggacgggaggattccatactcttggtgtgtg

SEQ ID NO: 28207 - DNA, 565 bp, Medicago truncatula
  Intron number 1 from transcript Medtr2g018860.1 (locus Med tr2g018860) derived from phytozome v7.0 (chr-ID MtChr2; po s 5064576 to 5065140 reverse strand)
tttgaagctttaggtgcttgcatttggaggtccaagtaagtttctattagctgtgttattatgacacaaattgagaacaaaattttatttgcaaataaattagatggttaatatagttaaaatttgtgtttaattacgtttattattggttaatgaatgtaattaaggctcgccattcacaagatgcattaacaactattttcatgtgttcaaatttatgcaaaaaagatttttatgatttgattttggaacgaaaaagatggagatcacatgttgaaagaaggaaagatatgaagaaatttgatgtttttaggatgaaaataataactcggttataataatagagatgaagaaaatgagttttttctttgataggtataaatcacctccaattcatccaagactaatgtagaaaaaaccttaatttttagaggttattcaattggcgatatatttagggacaaagaataaatagtatttaaatttaaatttacgtgatgacatgatgtctgctctaaccatggtaattgctactacagggtaaaggcctcaaaagtggaggata

SEQ ID NO: 28208 - DNA, 901 bp, Medicago truncatula
  Intron number 2 from transcript Medtr1g146560.1 (locus Med tr1g146560) derived from phytozome v7.0 (chr-ID MtChr1; po s 32438955 to 32439855)
gacgtctatttaaacatatcaagagtatgcttttcttctctcttcaccctgcaacataattttgttttaatagatagatatatattcatgctggtcttaattggattcttgttatttgtggcatgactccttagctatagagggatttttcccttcttttcatctataaaaatcacgtccactagaaaaaccttaccataaatagttttagtggaaatcagatttttgttaaagagttgttcaacctattcaactcatgcagatgatgggatatggattagttgttgtttttattagatgctaagaaccatgtaatacaaataattgcatattttgattcttttttctccacgtttctaaaagtctaatttatttcagtgtatgattgtttttgtctttattgttcaagatctttatgatattcacaatttatttcaatatatgattgtttttgtttttattgttcaagatctttatgatatttgtcttttatcttaatggaatttcatgtggatgacatccaatggaagatggatggtactaagttcgacggggattaactgattttgtgatctaataacttgatccctaattagaaaatttgttttcaagtggtcactagatggtgcttgcttactctttgtaactaataagcccaggttttacagaactttttttatctattaaactcgatcaaattgaagtatagtggcgtgaagtattgataaaattcagattaccttttattcctttgcctgcttatttgttactctttgaacaagtattgtaagatgacataagggaggaggagggtgatttttgtgtattactttacctggttcatatgatttctgaattcttagctgatctatatgcagagttcacttcagaaaatcaggga

SEQ ID NO: 28209 - DNA, 307 bp, Medicago truncatula
  Intron number 1 from transcript Medtr2g077920.1 (locus Med tr2g077920) derived from phytozome v7.0 (chr-ID MtChr2; po s 18070149 to 18070455)
tcccattctttcgactaaagttgaatttcctgtaggtgtaattatgtgaaaaagttaatcaattcttctaattcccttttagagattattttctgatttaccagtcatgttgtcgtgtgaaactatttgattcctgccgtgagtgaaaatagtatttgttttctttttatttgtacataaattttttagtttatttaataaaagtgagtttcctgtctttatgtacagacatgattttgttagagatgtactttttgatatattcaagtgagcgggagtatcactgaagaaggaggcgcctgtgaac

SEQ ID NO: 28210 - DNA, 892 bp, Medicago truncatula
  Intron number 2 from transcript Medtr3g068800.1 (locus Med tr3g068800) derived from phytozome v7.0 (chr-ID MtChr3; po s 16289317 to 16290208 reverse strand)
tgtgtagggaaagacttcgttatttggaagccacggtatgtatgtatatgtatgtttgtgcactatgatgatgttatgttgtgtttggattgtggattggatttaaatgatatgcattatcactgtaatctagttttacagtcctgttaagtgttagaagaaagatctgttaatcaagtcatagggctcaagtggttaatgagctcgacttaaggattcttgtttgggattaatagggcacccttcccctagaaaccatagagttaacacaaaattaataaattgaagatctgttttgccacaataccctacttctgtaactgtattttagaaacgacaacgacaatatggaaacataaaatgaagggcacacattgaatgtcagtgtaaaactaatttatagcgttatgtatgctaattgagctctgatgatatgtttggatggaggggaggactttggaggattaaatctatatcttggtatatatttgagttttcaaaaaattgaaagaataacatgatagatgatgatcatatactattttaatcacgcattatgattagaaattttctatagcttaatctagaaaagaaaaataaacccaaccttcctctacaaaattatttatctaaacatttggtttttcgtattggtcgcagtgttgtcaaatatcagccacggtggattgcggtggcggattttttgacaaccttcatggccaatttgggaaggattctgacaccatttttagctttccgccatcctccatcgataacactatttggttgtattaattagttaagtgtagtgtgaatgccattcttattttagtgatttatatttttgatgctgtcgatttggttgcaggctatttattctgaggctattgca

SEQ ID NO: 28211 - DNA, 652 bp, Medicago truncatula; identical to SEQ ID NO: 28096
  Intron number 1 from transcript Medtr1g068780.1 (locus Med tr1g068780) derived from phytozome v7.0 (chr-ID MtChr1; po s 13804283 to 13804934)

SEQ ID NO: 28212 - DNA, 892 bp, Medicago truncatula
  Intron number 1 from transcript Medtr1g042200.1 (locus Med tr1g042200) derived from phytozome v7.0 (chr-ID MtChr1; po s 9597801 to 9598692 reverse strand)
caggtacttttcaacaatgtaatgaatccctaatgtatactccctccgttttaaatataagcaaaattgattttttagtattcattcatttaatgatgaatgtggtccatattattaatcacatacatcattaaatgaatgaatctaaaaagtcaattttgcttatatttagaaacggagggagtacttgttaacgttattctacactttttactactgtgatggtttatctttcatatatatacttgattcctatttaggcgtgtcgcggtgtctgacaggcgttggtgtccgacactcctatgaactcgtacgacatgtgtcgaacaagtgtcataaataagttttttttttctttactttgacactctttggaccgtgttcgacaccttatataacacttatatgaggcgtgttggacaactcaaacaaatatacggattttttttctttgcttctacacatagtagattcaaggggttaaagatgtgtgagaaatgttgatcaacgaggagttatagacattaaagttgattacagtgcatttaaatttttcaataatagatagataaataaaggccaaatactattgtaatttgttatagaacttgttttaatgaagtaaattgctcaagttagatgcatatgtatgtattttgattcttaatttatatcttttataaataaattaatatataggtagcggtgtcagtgtcctatgctttttacattaacggtgttgacgtgtccgtgtcagtgttgtgtcagatgtccgtgtcaaagtccgtgcttcctagcttgattatgaccttcattatgacctaaatgtgtgatgtttttttttttttcatttcatttatttataggaacatactgctggaatacttgaacc

SEQ ID NO: 28213 - DNA, 350 bp, Medicago truncatula
  Intron number 2 from transcript Medtr2g121080.3 (locus Med tr2g121080) derived from phytozome v7.0 (chr-ID MtChr2; po s 28634892 to 28635241)
gctctaaatctcatcaaagctgggtatgtatgtatgtatgtctcacataaaattaggtgctaaacaaattgactgaaaaataaaataaaataagatataagctcaaatgctataaattagtaaaagtacgctctaaactgaagagaaaaaaatattgttaccaaatatgtatgttttggtcatatgagtttataagctatctgttcgaaaattggccttgacaaacaaagactatatctactttaagataagtcttctatctagtgacatgtggcggaattctcttaattcattctcaaaattttcctgttgtagagttgatctcacagtttggaataggactaagagca

SEQ ID NO: 28214 - DNA, 729 bp, Medicago truncatula
  Intron number 1 from transcript Medtr3g143980.1 (locus Med tr3g143980) derived from phytozome v7.0 (chr-ID MtChr3; po s 37241326 to 37242054 reverse strand)
atccaggcccagtctgtattgggttttggtttgggcttaagttttcttttacgtttttagtttcttcttgctatttgcactgcctttcttgctatctgaacctgttgcttgcttacctttttcacaaaaaattcctaaaaaatcctagttgtttcttgatgtatttttggtatttctatggtatttttgcatgtaaaaaaatggtaaaatggcatgaactaatctccatgtatctttacacttttggtatactttttgctatgtttttgttcttgatactttggtatgtgttatgaataaatgataccctatcttgtgatgaatatgcccctggacatgtgcttctttttgctgtttttgaatatgattttatggatttcttgttttacaagcaacaagtgtttgttttaaagaataaagtgttaaatttctctacgaatttggtgtgatattttgcttgcatgtgtcaccattaatttcatgtcatggcttgaaacaaaatctctttcaaaattgctatgatgtgatgattatgggttacaagtacctttaggtatcatatcaaatttttaggtttgttaccactttattactttcttttgcttttcctatgcaatttctttttgtttatttcctactattttgtgctttgtgattactaaccatttcatctcatgtgtcatacattttatagcattccaccaccccctccactttctttagcctagc

SEQ ID NO: 28215 - DNA, 919 bp, Medicago truncatula
  Intron number 1 from transcript Medtr3g076950.1 (locus Med tr3g076950) derived from phytozome v7.0 (chr-ID MtChr3; po s 17981133 to 17982051)
agggtttttgtgtggcataggtttgttgttgcaaggtatgggttgtgttttggtaataccataaggtgttaagctatgaggtattcttccatggtcaaaagatcaaatcaataatgtttgtacacacacataaaaagattcttctcaaaatattcaatcatctttttttatcaatttcctccttattattaaaaaaagatttttcatgtgtgtgtgtccaaatactttttctttggtcctgtgaccatattaaaatttctcgttaaactagtgttaagtgtttttaagtcggttgtaatggctaaaagtcttttagcacaattggtcattgtttgaaggctagttagttgagagtgtaaaatttgtttgagaatggacatggtgttgggaggaaagtttggaggcagagagtggttggtaaaatttgggtatgtttttgttggtgagtgtgggtgatgaagtttggttgttgataggtttgtggcttcaacaatgtatgaacattgatgattgtaggatcataaaggttgtgattgtagtagtggttgggaggagaatccatgacaataaaagcaccaattgttatgtacaacttttgtggttgttcatcaatggaggataattactctaaaagggactaataagttacaactacattattctaacaaactaattcttctttaatttctttttataatgattataatgatctttcctttatttataccatttgtattttaacaacttaatatataactcatcttaatagatccctctgaatccttctagaatgcatgactcatcacctaatataactttggtttattttattcttatgtgcttaacttagatcattacaaatactctcttattttttgttttagacaaggcaaattatctcttaaggaaatcattcctc

SEQ ID NO: 28216 - DNA, 846 bp, Medicago truncatula
  Intron number 1 from transcript Medtr3g102040.1 (locus Med tr3g102040) derived from phytozome v7.0 (chr-ID MtChr3; po s 24803712 to 24804557 reverse strand)
ttggtctcatctccaatagctctcccgtctcccaagtttaatcttctttttttttttttttgaaggatcctaagtttaatcttctaatttgttgtatttaataatgagatggtcttcttattttttgtcattcattttcactaagattttgaatgtttttcccgactctattttatttgtggttactgtgataaatttagattcaaatctccagattctctacattgacataaacaataatctgggtaaactattttaaagcatgtgtttgaagtttagtgtttcaataataatttatggtgtttgttgccatttgatttttctcatcatgcatatggcgtttgatccagtcgacacttatgattaatgtcatattatttatttaaaattaaattaaactgtcatattatttatttaaaattaaattaaacaatttcgttgcctaagccctaatgtcatgctttggccgcttgactcttggacaagttccggagtgaagagccatgtttataatgcttttggttcactagttgaagggttgcaccatatggtttgatgagtagagatttatagaaagtaaatatttgggttttgtgatttattgattaatttggagatttttaagatttagcaattttattttgagaaagaagataaactgggacgcatgatatggttgttcagtcacattatcattttaacgtgatacatcaatatccttaatataactatttgacagaggtaacatgtcgactgatatctcttaaaaaaaaaaacatgttgactgatgtttgacttatgtctggcataggaatataccgacgaaggtttctctgtttgtttggc

SEQ ID NO: 28217 - DNA, 560 bp, Medicago truncatula
  Intron number 3 from transcript Medtr1g092840.1 (locus Med tr1g092840) derived from phytozome v7.0 (chr-ID MtChr1; po s 18699502 to 18700061)
ctttcctggcactactcttgaagaccgtctttttggtaatcttccatctgtttttcactttaatttcaacagatatgtttgtttgtatattaatattacatagaagatcgtcgtcttctggaaacaaaaagttgaacacgagtggttattgtgttttatctaaggtgtttagatagtactcgaattcgatcctgaatgaaataattttgatccgattttagtcatcccatggctaaactacagattagtaaggcctataaagaacaaggttaagaccaaacaaaatattacacaaaaagggatgcaagagactccacttgataggagtatggaaatggtggacgacctttaaaacctttatattgtggcagcaattgtagttgcagatcacagtttaaaattattcacaaccttatctattgcattgcaagaactactcatagccttttcttgacttatcttagttttgataattaagagtatgtgcactacttttctatctttcgctatgaaatgattaatatagcacttttctgtttttgtagcagagaacaaaacgg

SEQ ID NO: 28218 - DNA, 777 bp, Medicago truncatula
  Intron number 3 from transcript Medtr1g147380.1 (locus Med tr1g147380) derived from phytozome v7.0 (chr-ID MtChr1; po s 32815301 to 32816077)
gatcttgttaactttgtcgcatcagcaggaaacaagtatgtaacctatctatgtacatttttgtttagtagggatagtagcaagcttcaacttgcttccattgtctgactctgtatgctttaggatgttagttagatacatactaagaactgtctatgcaagttcaaattcaaaaagttataattggtattaatttataatgcagagatgttggtaaatggtggttctgatctgttatgaattgagaacatctatgttggatagtcatagcgtaaacttataccgattaagaaagaaagaaagaaaatttagtcaagttggaaacgttattttcaatttgtcttttgggttagggcttggaatttagtcacaaatacgggtttaggtttaagagaaaacccatggttattgggtctgaacctacaatcatcaacatactgtccgttgatgcatatgtgcttggagtttgtgatcttatatcccgcacatttgccatgattgttgcacttgatccaaaagttatggaaaagcttttttcttttcaaattaggggaactaataatatattcagctcattttttaatagttggattatcaacattgatatacttaagataatgaaaggtgtcattttctactgcatgaggattactatgttgcacaagagcaactatgattaagaggtctaaaccaggactaggatttgatattttaaaacaataaattcttgtttttttgttgttgctaattttgcatttcaatttcagattggaggat

SEQ ID NO: 28219 - DNA, 89 bp, Medicago truncatula
  Intron number 1 from transcript Medtr4g012080.1 (locus Med tr4g012080) derived from phytozome v7.0 (chr-ID MtChr4; po s 1915900 to 1915988)
tcaggttttgatttttctttattttgaataattttctaaactaagaattatattttgtatttgtttcttcacacaatcaacttggcaga

SEQ ID NO: 28220 - DNA, 566 bp, Medicago truncatula
  Intron number 3 from transcript Medtr4g012080.1 (locus Med tr4g012080) derived from phytozome v7.0 (chr-ID MtChr4; po s 1916410 to 1916975)
gaacagaggttatatttttatttttatttttattttccatttccttgactccattgctaattaaaatgaggaaaatgctaggaatacgatctctctgacactcattttttttttttgtcaaactaacattgatgagacaatcgtctcagaattacgacaaagatcaccataaactttgatcgttggtgtcggactataatttttgttggaatttttaattatcaagtactaatttacgttggaccagatataagatggttcaccgtaaaacttacatatgacaatatatacatatgatattatgtttataaaaaaataatagtatgacaaatgtctccaaaaatttatatagcatagtgcttctcttgatggtaattattaggaccttatattatagggcaaagaagattaacacatatggtcaaagatctaaaatgaaatatcttgtgctagatagatcttctagcatccaaggttatagtttatatgataccttgtgtgagattgttaaaatgtccttaacaataaatttgaattttgtgtacagtttggacaaaaatatattg

SEQ ID NO: 28221 - DNA, 741 bp, Medicago truncatula
  Intron number 2 from transcript Medtr2g017720.1 (locus Med tr2g017720) derived from phytozome v7.0 (chr-ID MtChr2; po s 4482729 to 4483469 reverse strand)
attggtatgttattatccaaccacccttataatttgcatgcatacaatatttttttttttttttttttttttaagacacatgcatgcgtataattatgatatttataagtcttgttatgatattttctttcaataaaaaaaagtcttgttcttttttattgtatttataaggtttgtaaaattatgctacttagctagtgtttctttcattatatattttatttttggttttatcgaacaaaaatgacttattatacttaattccttttgttagaagaaccatatatattatatggtagatctaactgttacttgtcactcaaataatttgatttatttttagaggaaataacttgattttagttgtgattttttcttttaaaagctgtactccctccgtccctaaataaatgatctagttgactctgacacacataccaatacatatgttttatctttgatatcttcaattctctactaaaaaaaattataaaaatttaatattttaaaaatactcatcgagacgaatccaacaacatcttacatgatattatttatctttgtgaattagtagaaaaatatggtcaaagtatatcaagttaataatgcatattgtcaactaagtcatttattaagggacggagggagtattactgttcgtaatttatatttacatagatttaattaaatctatctcatcacaaacatataaaaattaattggattgtatgtgattgcagg

SEQ ID NO: 28222 - DNA, 395 bp, Medicago truncatula
  Intron number 1 from transcript Medtr3g005740.1 (locus Med tr3g005740) derived from phytozome v7.0 (chr-ID MtChr3; po s 418852 to 419246)
ccctaattacctcacacatcaattccgaacataaggtactgtttctgttgaaattcaaacttcgatctatagtttaagccaattgggtcactcaatttcttctaaaaatgaacaatttttgagtattagggttttgtttgttaaagtttaagagttcatgaaatccctaattgttttgcttttcttgtaattcagtgttttatctgcagtttaaacctaatgggtcactcaatttcttaaaaatcaacatctttttagttttatgattttagggttttttaaatcctaattgtttatgtttaagtttaattagttaattatgcaattagagcttctatagtcaaatatgtgtgattgattgtgtatggtgtattgtattgttagtgactctttta

SEQ ID NO: 28223 - DNA, 915 bp, Medicago truncatula
  Intron number 1 from transcript Medtr2g097700.1 (locus Med tr2g097700) derived from phytozome v7.0 (chr-ID MtChr2; po s 22945400 to 22946314)
ctctagtactcgttcaatgcacttgctttgtcattctaagcttgttatcaaatgtttcttggcttattcctccttgtcctgttggttttctttgatttgtacacatcttgttgtagtattatgttactcttggtgcctatgtgaagaaattagttaagattcattatgtcttctcaataagagatacaaattgcatttcatctgattttatagaaaatacacgattgagcaataaagcttagctatgctcctagctaccttttggtggattaaaggtgttgtcgaaggttcttcaaaaaacaaacaaaggtgttgtcgaaggcttgcagattaagtggttttcacaaggatttggaatgcttttctgtaattaatcacaaggaagtagtctgccctgagttgcaatatttccttttgtaccgaaaatatgtaatacttttttctcggggaggctgcttggattcttgcaatatcgccctttcgccgtcacctggaactcaaaatcattgatcttcacggtttttgcttctgcacatctgattttgcatatcattattcaccactgtatcttggtctttgtgaaaggacattggcaagtggaaattaatctccctcggtcgtgatttttataaatttcaatcctcgaacgttgagggaaaaaaaaaaggaaggtttagtatgttggtaccttgaatttgaggtctggtattttaaggttatcaaagtggacaactcattttaatattcattctcaacaccagactcatacgcaaatatgaatttgaattgttgatctattgcaagagtattggcgaacaaaaacctgtttgaaactgcaagtgaggttggcacacctttaatgattgatgatgcgacaaagcggcgtgtcttcggtcactcgctcgggctcttgta

SEQ ID NO: 28224 - DNA, 364 bp, Medicago truncatula
  Intron number 1 from transcript Medtr4g022260.1 (locus Med tr4g022260) derived from phytozome v7.0 (chr-ID MtChr4; po s 4483840 to 4484203 reverse strand)
ctttctcgagttcaaggagagaagcctcaagacttgtgagtttcctgctcagcaatttttcttttgattttattacctatttgcatgcttcagcaaacaatgtttctcacttcactaacattcttaagaacaaacaatattcagacacaaattgggtaaattgacatgtctcctttcctttcttcagataacaaatagattagatatgctttttatcttcataataaaccaaatttcaattttagcctagttaattgtgtggtaatgttttatcattacttcaaaatgagcagttcaattttctatggttcaattgttttaagtaatgatctaatagagaaggctgaatcattattgtcaactg

SEQ ID NO: 28225 - DNA, 720 bp, Medicago truncatula
  Intron number 1 from transcript Medtr3g040750.1 (locus Med tr3g040750) derived from phytozome v7.0 (chr-ID MtChr3; po s 11215128 to 11215847 reverse strand)
gagatcgtagggggaggtgaaaaaggaagggagattttatttattttgttaaacaaactcttattttttttaatgttaaatctcaacccttgattatatttttgccaaatgtatttcatctaaatacctaaatggattaaatgaagcaaacgataaatggagcatatctggactcgtctttttctcatattatgcctaagagttaaactttactccatttaactttgctcaagttactcctttccaatgtatagatgtgtgacatgtggcaaaaataaatctaagggatgaaattaaaaggttaaaatagagattgatctatctaattcctttaccatctccgtaaacaacaacaataccccctctttctccaccatcttcctcctcgcatcatcttcatgttgcctctccctctttctcgtacaccaccgccgcccctgccatggtgatttgtgttgttaccaggaaacctattatgttttgttgatttaatatttcaatttgagaaaaattgaatccctaaaactaagaagaaatcaaacaacttgatttaaatcaaggcatataatccttaatgaagtacaaatgaatatgaaatccattatgctgtgttacttcccctccctcatagagctctcaatccatggttaatgctaaaggtggaacaatttgaaggatgtagcagcgggtaacgccggtgagagggagagatccgcctct

SEQ ID NO: 28226 - DNA, 930 bp, Medicago truncatula
  Intron number 1 from transcript Medtr3g102140.1 (locus Med tr3g102140) derived from phytozome v7.0 (chr-ID MtChr3; po s 24839485 to 24840414)
ccattatcattctcgtccctgctgatatttgggcggtaccgattctcattctgttcttcatcacttcaattgcgattgttttgttatataatctgttgtagtgttacttctgtagattttttaacttatttagcactctaggtttaggatatgataggattgtgtatcatggtgagtttctcaaaatcaccatgagatgagccgccgtgattctgacaaactcaccatgacactaaaaatgccatcttgaaggttattaaaaacaatgttgaattggatgtttgattaggaagcctgtgttggtatgtcaagtgtgagttagaagttccatgctagataaaaaaatagatgttagtttagcaacataaagtgagatgacttatataccgtaatgcactaaggttttgggtgaaaatgtggtgttaaagccttatgtggttgctattcacccaatgcagtgatccccgggctccctcatgacccaatggactaatctttcgaaagaggcttgtgtacatggagaagttgtgaacagttggtttttaaattagaaaccaggagaaagatttagaaagtcagaaaggaaagatatactttgtggattagtgatgtctaaactcctaagttttaacaaaaaatatgctgcctccttataatggagcagacagcttcacacctttttattttatggttaagcttgtgtaaattaagtcaggtttttaatttgctgcattgccttttctttcatattaagttcaatttgactgttattgggctagtaataagttttattttttccttcgaatggtacattttttcaattttatatcgttataaggtgaaaatattgtggttagttgaagaactgtatgtgcattgtttcgttcattaatggtgttttatgacactttcagacgatagcttctcaca

SEQ ID NO: 28227 - DNA, 908 bp, Medicago truncatula
  Intron number 1 from transcript Medtr1g023180.1 (locus Med tr1g023180) derived from phytozome v7.0 (chr-ID MtChr1; po s 5062572 to 5063479)
ctggctctatccactatccaagaagcacacccgaggtacactcattccactccactacctccatacaaacattagtttttgtttttttgttttccaaattattgctttcctttctcttttatttattcattttacagatagatccaagcatgaaccaaaattatgtatatgtttgttgttatttggcaacaacattaaattatgtcatttattttacttaatcgtggtcccgttttttcaccattttgtggatttgatcatcctattttaaaatctaaaatttttggtcccttcctggtatttttgaactaaaaagtcagtaatgtaacatgttttaatgacgtaatactatacatgatctgatgataagaaaaaaaatcaacttgtaagaaagcttcccttaaaaacttgatcgaaaatattaacgaggacactctttaagatttttaaatggtaactttttataaaaatgtgtaattaatacattgaaaatcgaaatatttaaattttttataaaatagttttttttttttttttttttttttatttcttaaagagtgctccgggagcactcgttaaaataagacatatcatcatattttatggaaaaccaaaattgtcaaattttaaaataaggagattattgactaaatgagatgtctaggtttcgaaccccaacatctctgaataacatgcaatggacagctttctttattttctaattatatgaaaataaatattagcatatagtagtatagtaccttaatttttttaagaaataaaaaaaaaactgtatcccatatctgtatctatacaacatagatttatcttatgcaatgtcttggatttgagtcttgtgtacataatttttcccgctaaaaattcatcaaatatgtttcttaatgcag

SEQ ID NO: 28228 - DNA, 588 bp, Medicago truncatula
  Intron number 1 from transcript Medtr2g076880.2 (locus Med tr2g076880) derived from phytozome v7.0 (chr-ID MtChr2; po s 17512364 to 17512951 reverse strand)
atcaacatgtaagtgcttttaaacttatttattgtttgtctattttggatgaaatggcacagttcatatactacttggatcttttcctgaaagtgtcgttttataactctgcagaattcgaatttatcttttatattttataaatttagaattacatattgtaacagtactaaatgagtaggcggaaattgaaacctacatggtccataataaatgcttatgaagaagtatgcatgtttttgggttacaaaagaagtatgcatgttatttctgaatgtcttgagaaatatttcataaatttattttaaatagtttaaaaccattttggatataaaggtgtttgcctagaagaaaagtgttttaccaaccctctcatcagtgatcactagtctcggaggaaatacttgtatttgccatgctatcgacgctatagagtgtgaaagtcaaatttatattaatacacacatagacaagaatccttttgaaagatttcaagaaacatttgtatggaatttattactttactgtggaattgacacacttaaaaccctttcaggggcgtgaataggtctcagcagaagaaacaag

SEQ ID NO: 28229 - DNA, 713 bp, Medicago truncatula
  Intron number 1 from transcript Medtr3g013730.1 (locus Med tr3g013730) derived from phytozome v7.0 (chr-ID MtChr3; po s 2680533 to 2681245 reverse strand)
gctactccaatagagttgaggtaatattctttcagaaatcagagctatctttgaatatactttccattctctttgctaatcgtaatgtttgtattttgttgatcatgttacaatcaaaatagtttatacagttatattttaaaaaacttctttacgatacattttgttaggaggatgccttcttagtttcttgtggaaaacaaacaatttctaatttaattgcatccaaggaggatgaatagaggctcccccgataagtagaacaaatggaagacagtccaattaggaaaacctaagaaaactcgataaaaaactcagtaaaacgaccttactcttagattatcgtaaattttgtttttgatagagaactatggcgttcattgatctgtgtaatcattcctgcctagtgaagatgctttgattgttgttgttaaatcctaggagttttgagtttacattatatatggtaaatcgtgttaatactgaaaccacaattttacaatcctgtgtcttttagtgtcattgactcattgttatgtcatgtcttggacatatgggttctttcccacattctcatgtcaatgtttgttgtgtttcataattgatgcatttctatgatgttataactattctcgtgagaaacattgatattgatagtttaatcatttggaatttcagtctgattgtaccgtttctacgcttcggtgaattta

SEQ ID NO: 28230 - DNA, 939 bp, Medicago truncatula
  Intron number 1 from transcript Medtr3g163410.1 (locus Med tr3g163410) derived from phytozome v7.0 (chr-ID MtChr3; po s 42946748 to 42947686 reverse strand)
ggatactggttgctggtaagtggttactaatttcattctatttcttgtattttcaattgcatgaaacctctgtgcaaacgaccattatgctatgcacccatatcaaaaggaatcaatcattatttcaaggtgttacctacacattatatagtgtaagagcattatttctaaattctcaactcacttttagtgggcactcaataccaaataggatttaacaaccccaacaacttttgattctaacagtagagtccttaagaacttaaaaagcagattctacaatttacctcttaagatttaagagccgattttattggtggtatccatgccagtgatctcaaatggtgcaatgacttaaaaccagttcttccatataagaacatgcattggaggcgctcttaatcacaatctatcagactctatttgtgtcactttcttggcaaaatgaattgtaccatttaatgttttaagttgggggcggttacttatttattgaacccatttctaattagatatcttttcctaaattctaaaattggatctctgaagccactggagtaataataataaattaagacttgccttttatggcttacgtagaaatcgagttcaatcaacagttggtaaatataacatatcacttgtgttaattgctttttacacggtcgtttgagaatctgtttcctccaacatgcagagctaaccggatggttctcaaactgaatgtcaagattagtatcagggcatgttaaacacattttttgagaccaacctgtatttaatgttcataaacatggtttcgacttgtttaataggttagtggtctgattttctgtattttatgaagggtggggaactgagaaaacttattgatgcatctttaaaagttccgcagatgataaaatattttgacctaagcagttccctgttgaatacaga

SEQ ID NO: 28231 - DNA, 394 bp, Medicago truncatula
  Intron number 1 from transcript Medtr4g005770.1 (locus Med tr4g005770) derived from phytozome v7.0 (chr-ID MtChr4; po s 447866 to 448259)
actgttgcaatgttagatcttcattttctaattatttagttgatcatgtgaaacaaacttctaatgattatattcaccatctagttaagtttgttttatcttcgacagacacaatttgaattgagaattgtcctcgttgtattatttcttatgttgctgtcgatatggttgcttaatgaaatatatttcacgtcaaaagaaaaagaagatagtgttggtatttggattgcctacggtttgataattaaaccattgagagatcatatagatgattcatcattgaaaactaaagataaaaactgtgtgaaacattgaaaatattctgtttacttgaaagaaggttatttaccaaataaaagaaaagataaagagcaaagtgaacttaccgttaaat

SEQ ID NO: 28232 - DNA, 356 bp, Medicago truncatula
  Intron number 1 from transcript Medtr2g104330.1 (locus Med tr2g104330) derived from phytozome v7.0 (chr-ID MtChr2; po s 24567793 to 24568148)
ttcttcacctacttcattctcctcattcacagctggtatgtttctctgttcttgttcattgttccatgattcatttaattgtttcattattttctaaacttacaaattaaatgaataatcatatatatatatatgaaaaaacaaattaaaggaaactttcttttctaggccactcctttcatgatctcaattcttaaatatctctagaacaaccaaagtgacacaattttatttgatgatttaaattggtttggtttaggttattgttcatagagagtctttgattgtagaaattaatgctgaaatttaacatctttgaaggaaatattaccttggtttgaagcatcaaagtgcag

SEQ ID NO: 28233 - DNA, 423 bp, Medicago truncatula
  Intron number 2 from transcript CU013523_9.1 (locus CU0135 23_9) derived from phytozome v7.0 (chr-ID CU013523; pos 40 929 to 41351 reverse strand)
attattttatcctcgaccacataagaaatttagcggtatgtaaggatttcattgtgtttcttcttttattttattttgggttttaagattaatattttcttctttgttgaagtttaaatatgaggtcttcaattctgttaacatttaattcaaaccagttgaactaccactcaccaaaaaaagaaattagggaaagaggaaatttttattaattcaggtgacactaattgtcattctacaatagtcgtcgattcaaactcaatagtcgaacctgcattagtttggatatgtgcaaaccggaaaatagcaagcatcatgaattttcaaattctgaatatgctcttccaagagtttaattacttgttttattttccacacatatatgcaggtgagaacaagaagagtactaaaagaacttcatcc

SEQ ID NO: 28234 - DNA, 484 bp, Medicago truncatula
  Intron number 1 from transcript Medtr1g129490.1 (locus Med tr1g129490) derived from phytozome v7.0 (chr-ID MtChr1; po s 28938560 to 28939043 reverse strand)
ctcttttggatacaccctttcataccactgctgatgtggcatgggaattttagtagtttcacacacttatttttctgctgcactaatctctacccttagattaatccattggctatgatataagattaaattaaaaacataaaacatggaaaaaccatgttcaactctttcacttttctttgttctttcttctcctcgttttgcagagttttaaattgtgttgggttgatttaacaagctttaccagcaataatcaatatcaatatcaaactcaaaatttgcatatgttgcataataatctcaatagttaacaaaatgaaaccccaattccaaaagaattccaccactatctatgagagcgctcaactactgtaaatggattggaacaacaaaaatttgagatatattgcaataattttaattttgatggatatagtaataaagtagtgattttgggatgttgatcttagatctcagttgggtt

SEQ ID NO: 28235 - DNA, 694 bp, Medicago truncatula
  Intron number 1 from transcript Medtr3g137600.1 (locus Med tr3g137600) derived from phytozome v7.0 (chr-ID MtChr3; po s 34937761 to 34938454 reverse strand)
cagtcacttatctctgtctcaggttagtgttggtacatttcaaaatgtttaccccgtttgacctgccttcattctctgtcaacttattttacggatttgcatatatgaaaatcaaaagatatattacaaagaaatgaaaaatatcgtcacattaccccgttgagaaatcttaaataatcatgttttttaatgataaatgttaatatgcctattgttattttagtattttcacccaccacattttgctcgcgctctgcatgcgtgacttaagtcacacaccactgagcctctgcgcgagttaactcgcgcaagttggccggtggtaaaaactgaagcacaaacgtttctaggacggtaatcaatgcttttgattggtttttacacattttttttaagtttttcacacgtttttggacctcattaagtgttatctaccttacaccacctataaaaatcctcacacacttcctcttttcctcacattttctcctcccactctctccccctctttctcttcttcttctttatttatatagtctctagggtctttatacccctttaggtaaatactggtggcttttggggaaagtagtggtccgttaggttggggaaaaagacatcatcccttgaggtaaaataaggtttgcttccttttactcccaaaatctttttaccatgggtaaaaagaatcatc

SEQ ID NO: 28236 - DNA, 246 bp, Medicago truncatula
  Intron number 4 from transcript Medtr3g132970.3 (locus Med tr3g132970) derived from phytozome v7.0 (chr-ID MtChr3; po s 33564619 to 33564864)
acattccatttgtgattttaggctaggggctcgtttggattgccttattttttagctttgaaaactagcttatgtaaatcatattttcttatgctaccttgacaagctcgtgaagaataatacataaaagctgattaatttgcataagctcaaaataaaaataaaaatcccacaggcccaagttatgtgtgtgctttctggcttcaatatttttatcatttgtttgtagtatttggagcggcgaga

SEQ ID NO: 28237 - DNA, 983 bp, Medicago truncatula
  Intron number 1 from transcript Medtr2g052770.1 (locus Med tr2g052770) derived from phytozome v7.0 (chr-ID MtChr2; po s 14353869 to 14354851)
aatttgtgagagtgttagtgtacccagtggttctggtagtaacaacaatgttacttctagtgttttagaattctgtataggtgatttgcgacccgtttttcctatggaaaactactatttttacatagaaaataagttggaaagaaactaatcccacgatcaacactcctctcatgttgacaaacgcttgtctcccacgttctcctttgaggaaatcacttctcttttgaaattcaaatcttccctctattggaatattttaatattttattatattccaatatcattatgtgggaaaatatcgtaataataactatattagctatttattaattgtgagccttagttgattagtgatcaaattaagtaataaggctattagatttctaattggataaataattaaatatttaattaattgatattgactcaatgagtgaatgtccagatgacccattaacggaataatgggaaacttaatggccatccaatataacataaaagaggttatggtcgccaatacatcgtacacggcaaaactctctcttctccccatctgaagagaacttgaggcataaaggtaccgattgaagaagaatcaaatcagccgccgctatgctaagtcaaacatgtcatagatctgttcatattcgtgttcatgtcttcatgtttgatttattgggataatttgtttgcttttgagtatttttgctctcgttaattttgcttgaaccctgttaaacaattaggggattttcagtttgtttctcccaaatctttatgaattcatgtgtcgagcaatttggttttatcgatgtgatgttatatattgcaaacaacttttaagatgattgcactactagaatcgaatctctcgattttctgcggaattttgtgcgaacattaatacgcaagaatacctgaggattttgctgcggataacgatagtcttacgaagtttcctgcgaatccataggccgctg

SEQ ID NO: 28238 - DNA, 732 bp, Medicago truncatula
  Intron number 2 from transcript Medtr3g073380.1 (locus Med tr3g073380) derived from phytozome v7.0 (chr-ID MtChr3; po s 16953607 to 16954338)
ttgtcaaatcgcaatttggcaaacttgatattctggtaacatacaaaaattggttctcctttccgcttttttgttgttgataatgaaagtttgtcgcattttagttgcatgataatcttgaaggatttaaaagaattaccattgatatataatacatgtataaggagatagatcaagaattgtgtatctgatataagattgatggaagagtatgagagcaaactaccctctttgccgttgagatcttcagtcaaagattaatcggctaatggacaacgattaaaaatttgtgtgtcctcgttgttacggcctaatggttttggtgtgaggacattatatatggaatctttggttcaaaccctggtcaccacattttcaccttcccatgtgtttatttgagtatgtgttggccactagaccaatattaaaataaaaagagaaaaaaatctaaaatttttgcatgctcagcttgcaactttggttattacttgctcgttttgttgttctacattcatgcttgttacaagagtgtttaggtatgttttatttttctttatttttgtgtaaattgactttactatataggtattatgttacattttgttactgtttaatcaaattgagttatgctgaattttcttaatagctttgaagggaatctcatgcttcacattttgttacatatggtatatgaatacttaatgaagaaaaattgttaaatgcaggttaaca

SEQ ID NO: 28239 - DNA, 953 bp, Medicago truncatula
  Intron number 2 from transcript Medtr3g110340.1 (locus Med tr3g110340) derived from phytozome v7.0 (chr-ID MtChr3; po s 27792507 to 27793459 reverse strand)
tcaagggagtggcattgtttttgttccgggaaaaggtttgttatgtatttgtttgctgctgaaaatagtaactgaatgtgaaattcaaattagcatatggatgtaggcataaatatgggtccggtttgaattaacttatttaagcttatctaatggcataaacagtgcttatactgtttgcgagagagcctatagaaacaacttatgacatggccatcggcttatgacaaatgcataagttcttttcaacttatttctatatactctctagagtagtttatgaaagcaactcatggcttaggtgaacacaattagacttcattttatcgtttgttatagaataccttatacataaacacatatatgataagtacttaaataagttgtttatccaaacagtgttaggatttgcaaatgaatttagaccaatcatagaaatagtttcttgtagaagacatgataaaagctgtcgagaattgcctaaaatgaataaaatcaatcctttctttgcattatcacacactcaggggactcaagtggttcttgatggggtaaaccattgagcaagcgattgtatttcgcaacagcaaaggaacctagtttggtatttatagtaatgtaaccctaagcatcgcccttcatgggcctaaaggttatggcctacactgttgtcgaccttgattagaatcaggcatctaaagtccactaaaaaattgatcacaatattaacaaacctaaatatcatcaaatggatcataacatttgtttttggaaaactgaaaaccacaattaattgtagttcacaggaattgttaaggaaaattgtaacaatggcttgctaacaaagattacgtgtatctttagctatgtcattaagtattttcttatgtattacaaaattcaatataagcatctcattttgttcttttacatgttttttcttccagatcaga

SEQ ID NO: 28240 - DNA, 501 bp, Medicago truncatula
  Intron number 1 from transcript Medtr2g045590.1 (locus Med tr2g045590) derived from phytozome v7.0 (chr-ID MtChr2; po s 12626008 to 12626508)
ttcaagtagtgaagagcttaagagggagtctagtggtaatacttttaagttaaatatagaaagttgtggtccaggattgcaaccaacatatggtagatactatgtttgttttgatggttgtaagaaggccataaacttgtataacctttataggattggatggcttccacttgaagaataagtatggggagatattgtcactggcagagccaggaaatttatggagtccgggcaaaaaatttatcgtaaattcacatatgacataatatatcaatagtcataaatcgaatttttttttttaagtttaattttaattaaaaaaatcgaaataaaagaggtttctcattttgtcaacaaaagtacaatattttatgaaacttaaataggtttccatataggactttcaatgtcaagggattatgattacattaaggatttcaaaaatgattggacatttgaaaaataggatttgttgtgttggattcttggattgtgaccggt

SEQ ID NO: 28241 - DNA, 917 bp, Medicago truncatula
  Intron number 1 from transcript Medtr2g125760.1 (locus Med tr2g125760) derived from phytozome v7.0 (chr-ID MtChr2; po s 30351332 to 30352248)
aaccacacttccatctcacactaccttcttgcccggtaatgttctaatctttatttttctttacttagtcgtagatagaatgattttccggttggtttgtgtatttgaatttagtgtttgtaaaattcgatgcttttatacttttagttctacactaatatttttagattgatttggtattaagctatatcatataggattttagatgataatattgcgtttgatgtgttgtaagactagatgagatatgattacaaatgacaacattagagagttgaagtagcacctatagtaggaaagatggtggaaaataggcttccgtggttttgacatgtttagagaagacttgtagctgttgcagtaaagagagtagatcagatgaagtatcttcagacaaaggaagacttaaaaaagatatatatggtttatactagcccattacggtgtaatttgatccatgtagctaaccccgtgtaatgggataagtggtgcgtagtcataatgatagatagcaggcaactagataccataaatcattttgtgtatgtttggattcactttgtgagacaaaagtgattatagacacataaaattgtgtttgacatgtttgtgtgtctacgagtagaattggttttatctcttgaatgaattgtaacttgatttggggcttttgcatccaaacctgatttttagccttaaatctgttggtcatatttcacttttacatgaatggatctaagcataaatcattttacgttcaactcactttacacaaaatcaatcttacataattgattgaaagtcaatttttgccaccgcataatcaaatagacacgatctttttattttttttagttttttctttaatgtcatctcaacaatcttaggtccttttcaaactcttgaaactgcaggat

SEQ ID NO: 28242 - DNA, 1034 bp, Medicago truncatula
  Intron number 3 from transcript Medtr4g009180.1 (locus Med tr4g009180) derived from phytozome v7.0 (chr-ID MtChr4; po s 1399341 to 1400374)
tgtgcctcgcagattcaagagtggattcagagaaggtattcttttgtttaatcaatttaccgtgtttggcttttctagcatgtgcaatgttttgaacgtgaagtaattaagtagtgatttatgaatcaattgatgaataactgtaaagttccacaagtaaaatgttttgtatttgatttaatttataaaccaacaatgttttttctagaataagcttttttttttttggtacagctagaatgagcaacattagaaaatatttaattgataacttataaatcaatagatgaatgactgttatgcttaacaaggtgaaatgttagcttctatgcgttatttatgtgttcgtttaggggagctaaatctctttatttaggtgtagtaattttttgggttgtgatttattaatctgataataatgattaagggcttggatatataacttattttcagcttataacacaagcatgtatcattataattgattatgtattagcttgcacatgctatgttttacaacaaaaagtaaaagaacattaaattatttgtatttatggtagtatatgtggtttttataagctatattggagaacttgtgaaaataagttgaaaacaaaattagttgaaaaatgtcattttatttctcacaaaacttatgttactagattagttcaaatgagtcaacccaaacaggatccattttagagcaaatggatcttggttcctttaggtgttattttgtttgtgttgtagtatgattatgattataacaagttaaatgttaattcttacaccttttatcataggtctcttattttagtatagaagagtcaagtctctttgttttaggtgttttatttgtttgtctctgaattttgctaatgtgaaatctttttgttctatgtttcttttagcttttgttagtatgattatattaaagtagttgttattttttctggattgcttgtttgttgatacattgattcattttgaaaccaggtactgaagctgcacccaggaacaagggagcagct

SEQ ID NO: 28243 - DNA, 1009 bp, Medicago truncatula
  Intron number 1 from transcript Medtr1g117100.1 (locus Med tr1g117100) derived from phytozome v7.0 (chr-ID MtChr1; po s 24973244 to 24974252 reverse strand)
cttcaagagggatacaattcttacaggtaaaaatcttagtccttgaattatgctaaagtttgtctctgatgttttttattttgttggtcaaatatcatgttagttatcgaaatattttatctgatgaaccttatattatgtttttaatgcattaatatgattaatctatttaattcccctcgaggtttgtaatgaattgtaaattgatggaaactgcgtggagtaatttattttttgacagtggtggtcaattttgttaatttaatatctttggtataaaaatcttataatcaatgcttttcttttttcttaaaatattgttttttttatacctatccctacatttatttaattgttgtaatttattatttatggtaaaaaaaaattgcaacgttgattagtggtggacaactttgttgatttaatatctttggtggagtaataattaagatttttctctttctcttttcttctactattgttttttttatacttattactacatttatttatttatggcaatttattatttatggtaaaaaaataagtggggtttttcctgtttaattctttttcttcctgtaaatgggtagatgcagggataaaatttgaaaaaggtgtgataaaatagtactcttacagacatacactttgaccaaaaaaacaaataggacttattcatacacaaagtgaaaaaaattaaataattgaatctcaatagttgttatctactaaggggttggttggtccaccacttgatttactcttgctcttgacaatgtatgattttgatttttggtttcaatctaagtctctcgatttataattcaccgagattggtaagtttaacttgtatatattacgaaagataaaaatgaaaataagagtaaagctgagaatctatctgctgattaattctagagttcctaatttacaccgtgatcttacataacatgagtttaatgttctttcagggttctgttactgccaacgttgggatttgtcagtt

SEQ ID NO: 28244 - DNA, 575 bp, Medicago truncatula
  Intron number 1 from transcript Medtr1g120410.1 (locus Med tr1g120410) derived from phytozome v7.0 (chr-ID MtChr1; po s 25887088 to 25887662)
ccaaagatgtaagctttttttcataatcattaatgggtttctttgttttcccttaattaatgcttgcgttgtgtgtgcgcttattgcttcatcataaataattcttagttgaaatggaaatcttagtttcctatgtatggatcaatgcttgttgctagctagtatttcaatttagctattaatgtttgattttggttaataattagaagtgctgaacttctagcttaggattaaggtgttgctgatgtatttttgacacaaaattagcttttgatattgttatctcccatgtatcatgacactttagattgaagatgtgtctggtatcaaaccgacacggcatattaacttacttttatcacttccattttttaaattattataggtggctacattttagtacctaaatatgatatatggcagaacattatggcattgattggtccatgtggccgaccctacttatgttattgttgtctatatgtgtctgtgcttcataggttttctcatttgttaatgatttgattccgatctactttgtttgatccggacgttgcacttaatttcattgcaga

SEQ ID NO: 28245 - DNA, 955 bp, Medicago truncatula
  Intron number 1 from transcript Medtr3g102390.1 (locus Med tr3g102390) derived from phytozome v7.0 (chr-ID MtChr3; po s 24948470 to 24949424 reverse strand)
tttttttgttgctcagatcttcatctctttttccggtacgtttggtagtagtttctgtaattgattgttccttcagtttctttatctaatctaaaacccctaaattgaaacttcactgtaactcaactttttgtgtgttacttcattttctttaacaaggaaaatttgaataaatttatgatccttcaatttattattgatagatatagttgcttctatttgattaatgaaaatcaagcttgtttatgataattggtacaattgtggctgttttgattggcttattttgcttccaaaaatagattatcattaacttctttaagagactttttgcttgatatgctaatctaaatatgaatcttttctttcatggtagttctcatagaaactgccacatgcttttgtaattggggagctactaattttaggtaattatcttttcggtgtgaaagagatcacatgcgttgcttagccttttgagttaatttggtaggttattgaggaaaagtgcaagcttttcttgcatatatggtttatttcaacatcagatgctagctatatttggttcctttgtggttacttcaaggaaactttatcacatttatagatcatgccttctagaggcgctctcactttcctaattgtcgctaatcttatgctggaaaagttcaactgaatgtcactatgattagttgctttgcacattatagtttgttgattaccttcataaataagtagaagtaacctaatgtgtctgtcattctcatattgaggattttaggtgatagtaggagataccacacgccaaacgatataattctttgctctaataaaataattatcccttactcttaggagtttgaaccattaaccggtttggtttattaatatatcttttcgttattttttttcttcggcaggggtttttcttctttaaacaagcatatttgtttct

SEQ ID NO: 28246 - DNA, 762 bp, Medicago truncatula
  Intron number 1 from transcript Medtr3g016780.1 (locus Med tr3g016780) derived from phytozome v7.0 (chr-ID MtChr3; po s 3342650 to 3343411)
atcagtatatatctcttttctctctttcacccttttcatatttttataggatctatcttactctaattgttaagctgaattttttatgttaaagcttatacctttgttattgttatttcttaaatttttctatggtcaaatgggtcataccttcttcatttctgttgcttgctatagttggatttatatttgattgcttcaattattgatttttattacatgatctgattttttttactgattttatcagatccatcatcattttgatgcaaattattcatttttatttcatgatctaatttttggtgaataatgccttgttcatgccattgatgattttgatttcagagcttatgaaatatcacgatggatgagttgaatattacttgattcatgtaactatgtctagattactgtggatttttttgtataaatggcttgatctttgtgaaaaataagttgatcttgttgttgagttgaagtttttttttttgggttgagaaatgagaatttgtagatgaattggctttattgctaattcattatatgtaaaagcacttcccttttctttgctgtaattgcagttcatgatcgagtttatttatagaaaaaaaatcaatttttgtggattattgagagttaattacgtgtacgtttgatatttgcgaataacggatggctgcgatgtgctattctcattgcatggttttttccttttgttttgcagatatctaagtgagttattgggagagcgtcagaaga

SEQ ID NO: 28247 - DNA, 1019 bp, Medicago truncatula
  Intron number 2 from transcript Medtr3g094730.1 (locus Med tr3g094730) derived from phytozome v7.0 (chr-ID MtChr3; po s 22772677 to 22773695 reverse strand)
cttttgaggtaaatttttctgtttgacactttgatggttccttgattttttatttgtagttaggcctatttgaatagacgccataagcacttatgtataagtataagctatttctataacataagatgaaataatgttgatctttttttcatataagctataacttatggctctgtttgataaaaaatagcgaataaatgataagctaggttatagcggacgagcttatagaggatagctaataagctagcttatagatgatagaggataaatcagctgattgaattcatagtgtttggtaaaattagtggcttaactagcttatatatatgaaatgacataaaaaagatatatttaatgaatttattttattttttcaaggcttaattgcagttttggtccctctattttgatctttttgttgaattggtccccctatttcaaaattcgacagttttgggccctacatcatatttttaaactaaaaaaaggttatgcggtaggttttaaatgtcatggtatatgaactgaagatgagaaaacattagacagagggatcaaaattgtcgaatttgaaaatagggggaccaaagctgcaattaggcctttattcaattaagattacaggggggaaattgggatgaaaaatataagctataagctacttgaattagcttatcaaaaattgctttaagcttttaaaaataagctataagctcatgggaaagtgacagttatcaaacatgtcttttcgagtcaaatgagcatataggacataagctataagctcaataaaagtgtcttgccaaaaagacccgtaagatgaaatcaagatcatatattttcatacaagctataagttgttttcataagttgtccttgatattttatggagataagctgaaaacagtttatacccgtagataaactcaaatgaataattccaaatagacccctctaaatcatgaactttattgtatgcaggcattcaaaattgttgtggcagatcctgataaggt

SEQ ID NO: 28248 - DNA, 462 bp, Medicago truncatula
  Intron number 1 from transcript Medtr1g129980.1 (locus Med tr1g129980) derived from phytozome v7.0 (chr-ID MtChr1; po s 29207890 to 29208351)
agtttgagaaatttgggtaatataaaaatgtcattttttgttgttaattgctatttctttttaatcgtcgcatttttttcttcgaaaaattttgtttctatttttgcatgtcaaagagtctagtgacaaattaacttatcacatattaagtgggaaaaagaggggtaatactgattaaaaactgcatcccaacacaacaaatgtctctgcattttttaccatctaaactgcacttataagacaaatttttgtttctttgtatatgtcaaatttatcaataacaatttatttcagaagaatgtaaatagttaaagtactacagaaaaagaaaattaatttcttcaaaaatatcaaagttcaagaattttcttagcaattcatacatgtttcataattttattaaatcatgttcttactagctatattttatacagggaggtttatcaagactactgcaaagct

SEQ ID NO: 28249 - DNA, 638 bp, Medicago truncatula
  Intron number 1 from transcript Medtr2g049880.1 (locus Med tr2g049880) derived from phytozome v7.0 (chr-ID MtChr2; po s 13731028 to 13731665)
caacaacaacaacacagacccttctggtacggaaccttaatttctccgaatttttcgtcttttgtttctgggtttggtttttttttttttttttttcaaccttttgaaattttttttgtgggtgtgttttattatttttttaacatttggtttcttaatggttaattattcctttcctcttagttggttcataattaaattctagtagactatctatatatgttcatttatttttgttaattttttttcccttttttgttaggttgaactatatctaaattttcaaatattttccttttataaaattattcaattgcatgtgtttatttttattttgaattgaatccatgttgtttatttgttgagacttttaaaattcatagatctaatttatagctctaattaatggatgatttattcataattctaattgttattatctagtagataggttgttaaatttgataagattgtaatcttgtggtataattttatttattttgttaattttttttattttatttttgtgtaatattgtcaatttaggttgttttctcttcaatggtttttctaaatttgttttattttttgttttttttataggttcttctgagacttcttctcaatctgcaacaacc

SEQ ID NO: 28250 - DNA, 865 bp, Medicago truncatula
  Intron number 1 from transcript Medtr1g081230.5 (locus Med tr1g081230) derived from phytozome v7.0 (chr-ID MtChr1; po s 16084813 to 16085677)
cgagatctgtgcttccttcctcttcgtaagtgtcggtgcgttttcgttttctcttttacgccaccgttttcaccaggatttttcttctgtttaccacacgcaacttcatttttttattattattattattatttttttctaatacttgattgtttcattgttttgttcaagtgctgttatcattttttgttcagatctatgtttttcttaattgtatgtaactgttaatgttcaggctaatggcttctgaatcggaaactgtcactgtggttggtttcacctcatttttacaatttctttattcaacttttgtcatgttttcgttttgattttaagaaacttgttttctttgattttgaaaggatgtttctgaggtaccaacaattgcagtgtctgaaatcgtgatgaatgttaattttgtaagtcgttttttgcaatgttgttaattcacatgccgatcattttttcttgttgagattaggggtaaaaagcagcattagtttttaataaatgttagattgtttcaattttaattaatttaatgttcaaaaatggtttgattgatttactagtaagatatttttggatcgcagtattttttttctttctttctatgtagcattgacatttctgatcgaaagtatgtgctgtagttatgtgttattttctcaaattattattagcgttgacgttctagtgttcgtgtttgtgtccatgcatcataacttttttttttttttctggggtcaaatttcagtatgtttttcgttttcctaaatagctttgaaattatgtccgaacatgataatgatggatctgattataattattatgattgtatttttttttttttcaggctgaagaa

SEQ ID NO: 28251 - DNA, 832 bp, Medicago truncatula
  Intron number 3 from transcript Medtr1g081230.5 (locus Med tr1g081230) derived from phytozome v7.0 (chr-ID MtChr1; po s 16085945 to 16086776)
taggtcctgaagctcccaagatcttcaattgtgtaagcatgctggacactaacttacaattagttgtatatgtttcttagaataatagaattacttccaagactatttactttataaaacaatgttttcaattttcatttacagttttttaccttgtatgctggaattaaatttcgtaatgggtttccttttttaattgtgatagagagaacatggaaactaactagagaaaatgcattgttgaaaacaatgttttgactctttacagagttttcaaaaatattcaatctatttttaaaatgtatcttcagtaacttccaaaatgtcttttataatgattattttttctgtggaaatgaaaacaagaaacaccaaaagtaaacaggccattagttgatgattcacgtggtttttagctactgtcaaacattgaacatattgcatagttctgattctgttttcatccttgctttacctatctagttaggcagttttattataagaaatggctcctgttatattgctgacctgttgaatggctgtgtagtatgcttgtgcgctatagggttaagtgttaagcatgttgggcactgtgtttgtctttattatttatttgtttttcaaaaaaattctcagttttttcaaaatttcaatgtgattgtttccgatcacaacttggatggttcctcttttgaacttgaacattcttaaggtggtatgttatgatgtttatgttgtgatcttcattgagggatctgacttgattacttcatttttgaaatattgatgaattttaggtggttgaaattggaaaaggaaacaaggtgaaata

SEQ ID NO: 28252 - DNA, 413 bp, Medicago truncatula
  Intron number 1 from transcript Medtr4g012520.1 (locus Med tr4g012520) derived from phytozome v7.0 (chr-ID MtChr4; po s 2129979 to 2130391 reverse strand)
gttggataacctttagtgtttaacatgtgtttcctagttgttttctttgtttggttggtgtattattatgtgatgtaactttgtaaacttgttcaaagtttttttctgacacttcttgtgcagaatagacttgtttgattttagtaatatattctatctaagttttttcaaaaaaatgttaaaaaaaattattttattataacctggaattcatcatcaccgacaaaaaaatttttcttcaaataatctagtggctaaaaattcacattttaaaggtgaataatcaggggcggatccatgttggggcaatgtggagctatagctccacatgctatttccttttcttttttttttcttttctttattttagataaaacgcagtagtagaatactaaacttttacagtgtgtttc

SEQ ID NO: 28253 - DNA, 473 bp, Medicago truncatula
  Intron number 1 from transcript Medtr1g106180.1 (locus Med tr1g106180) derived from phytozome v7.0 (chr-ID MtChr1; po s 22067206 to 22067678)
cttcttcttctcaaatcatttctctcttcttcaaggtaacctcttctctccttctcttttctcttatcatcttcttccagatctgtatatctcttctggatctctttattttctttaatcttaattttaaattctccatctctgattttccactgcattagatttgtatgtactttactatcgcaatttaaattatcatatgcatgttattgctggatccacatcgcatatcgtgagatcacatgattttgaatcagtattgcttttttttaattttgtttattcaatcctgcaattccacccgattcgtatccattttacgtgagatcatgttacgatactcttccatctgcatatatttccttttttggtttgaaatttgatatgttgcgattgaaatttgatttgttgcgattgaaatttggatcgaagaaaattgagttgtgtgtgtgtggattcagaaaacttgaaaa

SEQ ID NO: 28254 - DNA, 629 bp, Medicago truncatula
  Intron number 3 from transcript Medtr1g106180.1 (locus Med tr1g106180) derived from phytozome v7.0 (chr-ID MtChr1; po s 22067968 to 22068596)
ttggaggtcaggacaaggtaatttttctctttgcatcttctatggtgggcttgtttatggtttagtacaatgtacataatgattttattcatgttataacatgctaattggctgaaactccccttgagcaagtatgtttgtgaatgttatgtgaaactccccttggaggtcaatttgaagcattggtatagttgtaatcttttccatggattaagatgcagatgtgattcgaaatacatataatcttcacatgtttgtgttgttaattgttatttgtgatgcatgtcttgttatcgatatcgtaaactgtatgaaatgaaatattctcgttttgacttcttaaattcaacactcttgatgtaatttgtatgatcaatctactcaatcacctaatcgaactttatggagttggtgcatcataagtttgagcccctttgacccaagttatcttacatttgacctcttgatatgatgtataatctccgaggtatattaaattttgttttactgaacacggcagtgacaactacatgaagtatattagatcttttttactcaacatggctgtgacaattgacatgtttttccctgtagatccgtcctctgtggagacattacttccaaaatac

SEQ ID NO: 28255 - DNA, 937 bp, Medicago truncatula
  Intron number 2 from transcript Medtr2g120920.1 (locus Med tr2g120920) derived from phytozome v7.0 (chr-ID MtChr2; po s 28595417 to 28596353 reverse strand)
ctatccgcattcaggctctttttcgagccttcttggtaactatttcttttcttgctgtgaatattgttcatatcatagtgtgctagtttgaaattcaaagtccgatttaggatcaggattcagggattaggttctattaactttttacaagatctaccaatagttgggatttgtgagtttaaaaattggacctttgtgttttcatgatttgaattttgagatcaacctgcgtcaaaatttgaatttgaatttgaattgtcaactttttttgtcctttttaagtcatctaaacttttcccccttttttcctttattggggttgaatgatttaggtagttaggttcttactactaatatgccaggggaatataatgcataactgagttataaacactagcaaatgttaggataaattgcagaaatattagccactctttttcacattgttttaagaggatttgatcagtatattttgcatatgtctcttgtgcttagttttttcctatgctaatgatcttcatgttaattagtttaccttataatggccttgtattatcatcttttaaattttgaaatcagctcacagctcgtctttaccaaattgaaattcaaccctttagtcctccttaatatgactgtaaaatccctccctttactctttttggattggggaaacataagtagttaggttcttttgtatgcttgtggtgctaataatctgtcagaggaatatgatgcataactgagtttatcattcagcataaacactgcccatattttgatgatttattgcagaaatatcagccactctttttttattttctttctatgttgatactcttcattttattgatttagttatttcatatcatacctctatttctatttaaaataccttgaaggctagacgagctttgagagcattgcgagcagtggt

SEQ ID NO: 28256 - DNA, 761 bp, Medicago truncatula
  Intron number 1 from transcript Medtr1g086290.1 (locus Med tr1g086290) derived from phytozome v7.0 (chr-ID MtChr1; po s 17030469 to 17031229 reverse strand)
atacacttgtgagttctctgtttctttctgatatttatatcatgtgtttatgatcatatactacatactcatactcatagcttagtttgtgttttgaaacttttacttcatatagattggaaatgagtttgatcattctactgtgattcgttttatttttctatagataagggattgattggtaggtatgatattttgattaacttaattaagctcttattgtagaagaacttctatgtaagttgtttcttcaattgaatagagacctaggataaatttgtattaactatgtgtaagtggatgtttggatttgcgagtttggcagaagtacgcggtgagcaaccattgttttgcagaagctatgtacagtgagctgccgtgattttgtagaactacaagtttttgcctaatcatgacagctcactgtgatttcaacaaacgcaccgtgattccaaacacacactttgtgagctggatatttcataagttattcttataagctcttccaaaagtatgtatgagtatttttatggcatatgttgagcctaaagcagctctttctgacgtgactaaagtcacacatcttgccagcatgttgtgggttggaaactataatcttgtccgaggttatgttgtgattgatgcaatggttgcttctgttttttttttttgtgtatttttactagtagtgttagtttggttgatggtgggttttctttgataatttccttaacaatatgaaattggttgatgcagaaact

SEQ ID NO: 28257 - DNA, 916 bp, Medicago truncatula
  Intron number 2 from transcript Medtr3g144670.1 (locus Med tr3g144670) derived from phytozome v7.0 (chr-ID MtChr3; po s 37572311 to 37573226)
ggaaagaagtctgtcaagaatagtccatacccaaggtaaattactcttggtcaatgtttttttttttaattcattgcccttcttggctacatacgtcatatcaatgtatcttttaaagattatgtaatttaaaatgtaaattcacaatcacatgtaaataaattaatgttgagcacttgcactttactaacctaatcaaaatcatgccttacacaacaacttataattcaagggttttgctatcaagtgttcttaaatgcattcataaataaataaaaaatatcttaaaaatatcaataaattacaccgttttctttatataaacttactttttaaattgattaatcaaatatacttaaaacattgattagcattctccttaacttaattggatagtaggagataggatagtggtggtgggtctgattggttatatgatcatataaatattgtggcggctgatatatactagttgatggaggggggacatggactcttgtgtcataattataaactgtatatggttttaatggacgtatatataaatcacaatcatatatgtatgtatgcatttcttgtgtgcttaattagcaaacaaattaaatggtgtacaattaaataaaccctacttgttgagctagcgtatatatgtgtggtttccatttgtttgtcctggaatcgagagaaaagtagtagcaagttgatgtttcaatttgctgcggttaagacaattaattattctttctctataaacatatatgagtatatgtatatgtaagatcagcatcgatcccacttgctaggtagctagtcccccgtaaataatggcacttttgcattatttgtgtgacactgtagctatgtgtgtgtgtctgaaagagagagattctgtgcactgggactgttgatcttatca

SEQ ID NO: 28258 - DNA, 555 bp, Medicago truncatula
  Intron number 2 from transcript Medtr3g105250.1 (locus Med tr3g105250) derived from phytozome v7.0 (chr-ID MtChr3; po s 26285407 to 26285961 reverse strand)
acactaccagaccccatttccctatccttcaccaggtgcatttttctttttcttatcctcaatactattttcttaaattaacttttcaactgttcagatagtccatttttaaattttcagccttattgtcatattgcaaacttaatgttacaacttataaatactagtttcatgatatactccatgtggaatggggaccttccagcatataacgtcatttacataagttatctcctactactacgagatatggtgcttaggcatataactttatgtgtcaagtcaaatcaagcccaaagcttaagaatcaaactaatacatgtacaatgcaacttataaccatgccttggtttcattacctcatttcatttctagttaatctatctataatgttactgaaattcggctttcattcatatagatatgttttttcagtttttttttctttctatatgcgcgtactgcttaagatgtctatgtgggtggcgatgcttggtgtgttgttgcggtgtaaatgacaaagttatgatacttacctcaatacacaggaagtaa

SEQ ID NO: 28259 - DNA, 565 bp, Medicago truncatula
  Intron number 4 from transcript Medtr2g008070.1 (locus Med tr2g008070) derived from phytozome v7.0 (chr-ID MtChr2; po s 1380908 to 1381472 reverse strand)
cttaacataccacctattcctttgtctgagccctggtaaacactctttcgcttacacctagttacctagtgggtttatatggttttatgttcaaatgcttctggtgtgattgtgtagatttgttcttatgtaatgtttcaaaattcaaacagtttaggttttttaagttactgctatatgaatatttgtgcatatgttgtttgtggctgcacgtgaagatgtatgcatcgatgtttaatttgagatctactttggatgacactggtaatagtgtgacttgcgccgatgcatgaaaatgagatgtttctataactgttgttattccatgaatatttatttccctttgtgattgattctaggagtcttggatattctttgtttgatatccattatgtcagggggaaaggcttaatggtctgttttgtcgttttatattaattattttagcaacattacctctaaagttttgatgctagggaagttttttacagcatcatgaactcgttttagttttgttcctgtttcaattttatttactttgactttgcagctttgttagttgaaa

SEQ ID NO: 28260 - DNA, 527 bp, Medicago truncatula
  Intron number 2 from transcript Medtr2g008070.1 (locus Med tr2g008070) derived from phytozome v7.0 (chr-ID MtChr2; po s 1382069 to 1382595 reverse strand)
ttggtcaacttacattaactagcaagttttaggaggtagtttctcttccttcatcccttacattatgcttatcttacatgtgttaacgatgatagttaaaagaaagaaatttacaagtgatttttttccctttgatatatgcaactttagttggtaaatatgtgataaattttgcaagatttattgtaataatttatttgccttgtaaggtgttccataaacaatataaaatctaattaagatttgtaatgtaacaaaattatggttttttccccctaagtagaagcaaaacaatgcaaactttacttcagtaatctacactaacttaaaatgtttaaatattttttgcatttgattcatggccaggatgcataaactggattgcatgtaaatattgaaatatcttaagctttgtgatttggttcttagtttttagatagtattttggtaggaaaatgaacagtaatagctagattcaactataataatgtgactgttgaactaatactcttctttgatggcagcat

SEQ ID NO: 28261 - DNA, 360 bp, Medicago truncatula
  Intron number 1 from transcript Medtr2g008070.1 (locus Med tr2g008070) derived from phytozome v7.0 (chr-ID MtChr2; po s 1382594 to 1382953 reverse strand)
acaatacaaggtttctttagatctatttattctgggtaagttcatcttccaaatccaaagttttttttcttcttccatttaaactatttgtgaagtttttcttcaaatctgaagcctttggtcaactgggtttctattgaaattaccaacataatttttttatgtatttttcagcttttaaaaatctaatttttaggtttttggttgaaatttgtaatcatagtaatgatgcaaatttattcaactgtttgtatgatgaaatccttatcaagattgtgtgatttgggatttcttgataataatttgatgtaattgtgttttgcagataaagggtgctttgtgatctagcttaggagtttt

SEQ ID NO: 28262 - DNA, 416 bp, Medicago truncatula
  Intron number 4 from transcript Medtr3g058650.1 (locus Med tr3g058650) derived from phytozome v7.0 (chr-ID MtChr3; po s 12840374 to 12840789 reverse strand)
ggtcccacaggtatatattataattcctttgtcatatttatgtaacttgacattgatattatgaatgattgttgtggtacactttcttcaaagtgcatttacatgatattagttctcaatcccataaattaaaagataatggtaaaatatcattttctgtttataactgaactattatattttcttccaaaatgatttccctcactttttatctgtgctcaacaaaaaagatattttacctcaatcattcaatccgaacagaccttacgcatttagtgcacagttgtaatctatttgtccattataaaagatacgattacaactagagtactagttgttatccttaaccaattatttccaccgtgatgtgagatttacctgcttcaatgtcatttgctttgtctttcagttggctg

SEQ ID NO: 28263 - DNA, 859 bp, Medicago truncatula
  Intron number 1 from transcript Medtr3g058650.1 (locus Med tr3g058650) derived from phytozome v7.0 (chr-ID MtChr3; po s 12841704 to 12842562 reverse strand)
tctccatttcttcttctaattttcattcgtttcaggtcagcatgcatcttaaaattccttatttttctgtaatttgaaggcaatttggtggattgagaatgatttgattatgctttattgcttattcataactctgaattatttgttgcatgcctatttgtcacactttggagtcaattgtgattatttgaatgaggaatgaaattgaattagctcttttgcatgttaaaccaaatgaagaaattacaatttttgaagtatattagatgcaatttaagaatccaacaatataatgtagttctttttttatggttccaacagattatatatatataagagaaaattgggtcaacaaaagttgatgtatctggtccgaacatccgaacagatacatgaaccagagggagtgcattttatggaaggttttcttgtgtgtatctatgatttgcaatgtaaataagtctgataaagacaacaaatttgttttgcagttttagccaatgacatcttgattgttaaacatttaaccggtataataactccaatggttttgttctagtggtaaaaagacatgttttggacccggatggaggtgaatgtaaatttttttgtgagtgccctttgagcctgaaggtttttcctgccttggactaggggcaccaccccttaccctaaactttccttattaaaaaaacaaggatttcactgtatagagtagacaattaatatgattatgaatgtatataatgctcaatgacctggtgaaaagggtagaaagaatattaaataagttattgttgcacaatgatacttactctgaatatctttttccagcttcgtttctctcattcacttcacc

SEQ ID NO: 28264 - DNA, 519 bp, Medicago truncatula
  Intron number 1 from transcript Medtr3g139030.1 (locus Med tr3g139030) derived from phytozome v7.0 (chr-ID MtChr3; po s 35662458 to 35662976 reverse strand)
tcattgggcctccaacagcaacataacagaaacaggtaattgaatttcaaaatccccattgttggggttttttaattttggattattttatgactcaattgtattccgtcggttgattcattatgcaattgggtctatgactaatatatttgtgttgtgaaatcaatattggggtttttgatttgtctaaaattggggattttgtctttgttagttgctgtgatggatttggatcctctcaattgtgaagaaaaacttgaaagttatgtggatgatctcaccattaaaatgcatttgactctacaacctacataaaccaaatcctgctgtgatactcttccaaatcattctgttagttgctaattatgaatcattgtcgctgtattagctgctgactctagtgtactgtgaaatattgtggtggattttgtcattgttgttgttagttgtcattatgaatcattgttgctgtattagctgctgactttgttgtttgttgaaacaggaaacatatttttg

SEQ ID NO: 28265 - DNA, 1017 bp, Medicago truncatula
  Intron number 1 from transcript Medtr1g116810.1 (locus Med tr1g116810) derived from phytozome v7.0 (chr-ID MtChr1; po s 24779246 to 24780262)
tcacctcaacgattcctctgctaagtctcgtctcggtgagtttctgggtcttctccttttgtttgtttctattacatgcttcttactaccactttaattgcttaattatgacccatgtgaaccatttaatgtctcaagtgcttgattttaattaaatgcttctcaatttcaaacacaaattgaatttttgaatctgggttttgctgatttacatcaatagagtcagaattggtgtcaactggaaccactcaccccttaaaagattcaatacaatcttcagatttttgtccatgtcatgttattcattttttttaattagtagtagaatatactcttcaaaaatattagtagaagttgatgcaagaaattacttattttttgaggaagcaaattttgtttttggttttactggcctatttatttaatcttttcttattttttaattgaaaagctagctactcattttgtaattgtttttggtctagcaatacggttggtggtaactttacaaaattatgactaatcccggcttaagttgaatagccaaattttgcaagaggaaaattgtgtttttgtttttaaaactcagtatccggtccgaggatagactaatttgaaggggtccgtccacttgcggggagagccccatttaaaggcagagcaaaaactctgtacggactagcccactgaaattggcactgtggggaatcgaacttgagaccttgagaggagcatactccaaggtctcaagccaacaccaccgggccaacccgtgtgggttgaaaatgttgctttttaattcccaaataattgttgtactttgaatcatgaaattttcaaaacaaaagatgatatattcaacttttaaataataaaaaaatgcttggaatagtttggcatgagttgaaattgaaatatatctgtagctctatatttagttccctttttaacaatattgtgtgttatttgctgagtattgcagagctattaccaaggacttgtcttaaaagagctttt

SEQ ID NO: 28266 - DNA, 642 bp, Medicago truncatula
  Intron number 1 from transcript Medtr3g092830.1 (locus Med tr3g092830) derived from phytozome v7.0 (chr-ID MtChr3; po s 21942505 to 21943146)
attgatcttcgttcatttttcctccataactcaatgtaatgtcttgatttgtcgaattacatgatttctttctaaaatgattcaaaacatatatggagttaccggttttgggatgaaatagaattaaatggactcgaatgaaaacaatacaaaatatttcttaaaccatgagaactcctctaaaacatctctaaaatgacctcagactcaactgaactgactcaaaacatagctaaaatgtagttgtgttgacgtttgtgcgaaattcgtgatcaactttaactttgtttaacaataatactacgcttcaagaagtaataatttatcattgattcatggtcattcataatgatccatcgaaagggaaatttttaaactatgttttgattatatgtagtttttttcacaattttcccttaagtctaagggtgatatcataattgggattctatttctgaaataaatttctttcatctctaattttttaaacaaaaaaaaagtcatttatgactgtccctttcctatcatgataagttataaaataatggaaatttaatttgaagaagaacgaattatattatgattggtaagtttttctatatgacctctttgctaattgtgttgaaggggcaaacacaacac

SEQ ID NO: 28267 - DNA, 681 bp, Medicago truncatula
  Intron number 1 from transcript Medtr2g032840.1 (locus Med tr2g032840) derived from phytozome v7.0 (chr-ID MtChr2; po s 8801772 to 8802452 reverse strand)
aaactgtttacgaacatagtgttgaaagataaaaggtattattttctaatttgtcagcataagatgataggattttgtataagtttgataatgacttgaaagatgtctttccttatgcagtgagaatatagttgatgtaacactatgggaaaaatattccgtagctttatcatttaccatctatttaccttgagttctttgcttccattttgtagtcattgacaacccaaatatatgtaacaattggttcaaggctgctcattaacctacattatccggttgttgataagtttaaatcttagtaagtttgcattatgatttcacaatagagtgttagagtaaattattatttcacaatttgatttgattgttttttgactatgtttcttgaattgttgtcgtgaccttaacacttctcaagctcagagtcaaagtatcagtctgaacttaagtcagagttcggcttcttctcaatgtattcgtacaacgatttttccaatctgtctcaggttaggccaattgttgaatttataaacttagtcaaggtctgctttttttatgcacaaacgtgctttgaatttttttacacacaaattaaaaatacatattgcattattctttatttcacgtgcataatttgtgttaggatacatattgcatcactatttggaaagcaactaa

SEQ ID NO: 28268 - DNA, 501 bp, Medicago truncatula
  Intron number 2 from transcript Medtr2g019030.1 (locus Med tr2g019030) derived from phytozome v7.0 (chr-ID MtChr2; po s 5138350 to 5138850)
ggaattgttgccttctatctgcaattctacttcaagtgaggttacctactattcgctttcccacattttgtttttataaatacttgtcccattgcaaatttgcatttattaatttgaaccacgaatttgatgggttgagaatagtttatagactatttattatagttttatagttaagggatcaaatagaagagataatgaaagtttatggatcaaattgaagatttactcttgattatatgatatgatgtttaaataatagaaattgactgagaattttgtctgggagatagtttgatttaaatattcagtagctttcctagtatttgaatgttgttcttcatgtaaggatttgattcacgaaatatttaattgatctcagtatttacttattactttgtatcccttgctttttcttgactgtttaagttggtaattctggtttatgcgatttcattctctttaggctgcaaaggtgttcttcacagctccttgtttatt

SEQ ID NO: 28269 - DNA, 717 bp, Medicago truncatula
  Intron number 1 from transcript Medtr3g110900.1 (locus Med tr3g110900) derived from phytozome v7.0 (chr-ID MtChr3; po s 28018277 to 28018993 reverse strand)
gaaagctttgctcaacttttcttctccttcatcaagtaccctactttcctctcttttctggttttgctttgtttccctaaaaagatatatttttttaatcttaccttggagatgattatgatcttgtagttgacacttttggtatcttgaaattagttttctgtttgagttcttagattgtttacttatgagttaggagcttcattcatatatagattattatttttattttatatttgagtactagttttatggttgagttgagagtgaacattttattcaattatgtgaaatgtttttagaatttacaaactatttgatcggcagagatgcccatactgcccctgaaagaatacctgttgacctcttgacctaaaaaaagtaatctttcttgaaaaagtcgataattgtttcataacggaaaatagaatcttgtcatggaattaagcataatgttagtattttagaagaatttaattaatatactcgattagtgtaaaataattgtacattgacagagcatactaattaaactcattttagaatcacatttttcaaatcaattttgtttcttgtatatgtatattttccttttagtactattatgcctagcagtgacttaaggataaggaaaacaatatgaatataggaactattaggttacatacactttcactctaatatgtgtggttcatctaggctcttcaataccaacaa

SEQ ID NO: 28270 - DNA, 584 bp, Medicago truncatula
  Intron number 1 from transcript Medtr3g132670.1 (locus Med tr3g132670) derived from phytozome v7.0 (chr-ID MtChr3; po s 33398283 to 33398866 reverse strand)
ctactccttctcttgttgttcgagattcagtaagtaactcttcttttaactattataatggttttcgtaaaatgagaagaaaaaattgttttatgtaagtttttatttttcaaaagtttgtctctctttatttagaattttttgttcgatttgatgaaggaaaaaaaaaaaaaaacaatttaactatcataagagacactcactttttgatttctacttcccttttaattggttttttgcacttttgacaaatttcaatgcatacatacacaagctaatttaattaatctccatttccaattttttaggtttcttatttttttccaccagaataatataattttttttttttcaatcaagcactacctcccaataaaaaaatgtaattttgaacttgatatcctccacaagtttgatttttaatctcacaaatttcgcatgagttgtaaaaacaaagcccttgtttgattcttcttgctttgcatgcacccataggtttcaagttccgaaatagattttgttcaaagaaaaagaagaagcttttgtatttgtttacaaaacacaataatatttcaaagacttga

SEQ ID NO: 28271 - DNA, 877 bp, Medicago truncatula
  Intron number 1 from transcript Medtr1g118020.1 (locus Med tr1g118020) derived from phytozome v7.0 (chr-ID MtChr1; po s 25539014 to 25539890)
aaacgttccaagagaaaggtgccattgtcatttatgtaagttacaatataaactttttgtagggtatctaattattattatttttacttttgagtgataatgtttttcaattctatgctaacacgattctttattatatgactttaaaaatgtttcctttatattcattttctgagaatgggagaggttctagttttaatcctacaaaatttgttaaaaagtttaagtgagaaaattgttaaaaatgaagaacttaaaatacaacattatttgttacatatttgattttattttaaaaaataaccatgaaactagataaaatattatacaattctttcttacgttttttttttaccatgcacttctctttacaatgtctttttctctccctcaatcaaccctagcttcatttatgttaataaaacttatgtcagagttttatttatgggaagtgctatttcacgagagaaaatttacctcgaatgtatcccgaatgcaagtttcagggataacctagtttaagggtcgtgaagaattcgggaagtttgttgtcgcagtaacaagcatttccctttatttattcatcagtcacactccttaatatttccgtattcatcatttttctttgcttgatttatataaaaaaaatgtgtatgcaattttcccccacatttaggtccatttttatttagtcagatccaagtaaaattaggtgttttcacacataataagtgtatgtttgcatgcgtacgtaacaccaaaaaaaaaattgtatgtttgcattcacgatggaatatttcattaccatgcaactttggagcttaatcttttcacatgtacatggcagggtgtggtaaataataaggagttcgtggag

SEQ ID NO: 28272 - DNA, 509 bp, Medicago truncatula
  Intron number 1 from transcript Medtr3g149090.1 (locus Med tr3g149090) derived from phytozome v7.0 (chr-ID MtChr3; po s 38927435 to 38927943)
accaactagttccaacaagagatctagttcaaagggtgaggtaggtatcaaaaaactcactatgaatttacataaaattaagtaccttcttcaaattttatatataaaaacaaaaaaagaacggttaccagataccactgatctatccaaaaatcgacaacaataccaaggtttttcatgatctttactttcaaattgattctagctattctaacatttcataaaaaaatgtcttagtttctttatcaatgttatttttatccttgttgcatcgccttcacttacataatattgcttagtaatggggtgaagaaatcaaatcactccatgcacggtgaaatttgctgtttgtattttaacatagctaactaatttctttttgtgttccaataagaaaaatcacataagtcatgataaaacatgataggactagtggagtagatagacttatttatttaaatgctttcacaacagggagcaaatacttctgcattcacaaaactgacatc

SEQ ID NO: 28273 - DNA, 911 bp, Medicago truncatula
  Intron number 1 from transcript Medtr3g102880.1 (locus Med tr3g102880) derived from phytozome v7.0 (chr-ID MtChr3; po s 25211854 to 25212764 reverse strand)
cagcatcaaaagcgtaagtatctctataaatttgttctttttatttatcaaaatgcacccaaaatattctgatattaaagacattgttttaaaaaccggattggacggccgaaaattgggtggagcgacctaatggactggcaatgctattgaacgggtatgaaccgatgacttggattgaatcgggtaaatactatacctctttttcgatttctttgtacattttttctgaaattcttaaaaaaacgacatcattttcctataagagataaggagtttaaggtgccggattaaaatccgaacgaatgagtaaatattaatctaacaacttgttactaacattaatcattaaaaaaacggcatgattttcacagaggctttgaatttctgtttgattttggttgttataaaattgatgacttgtttgggttttagggtgggttatttgtgttttgataaatttaataatttttctctaactatggtttaaaattattctgtgttttaatttggttgttatactgttatactatgttgtgctttgcatatgtatattgttatttaggtttctgtttatgtctatctttagtttttgcctctgcttatgcctttagttgtgaagttatgtttcggttcaatttggttgtgatacaatcttttttgtagacgccaagatatacgactgagttacttagattcagtcatacggatcaaccggtgatccaacaatctcttcatgtcttataagtatagattttagtatttttcacccattgaattttgtgtgtatgatgataactgttgactataagcctttcttatcttcataaaaaatattcggaataattatattcaatcaaaactaaaaatttgaatccatatctcgatgctaattttacaggtatcttgca

SEQ ID NO: 28274 - DNA, 619 bp, Medicago truncatula
  Intron number 5 from transcript Medtr3g076210.1 (locus Med tr3g076210) derived from phytozome v7.0 (chr-ID MtChr3; po s 17590823 to 17591441)
aattcagagaaagtttttttctccttaatttgaaggtgaaattttattcttctttacaatctgttcgtttttttcgtgtgatttgaattattttttagttttgaattctggattgtgattgtggagattgtgaaaacgtgtttttttttttttttgtgtggatgattttgacttttttgggttgatgtttggttttgtagaattgttgcgttttgtgtatgattttgatgttaaaggtggttaatttttttgggatttcgtgatgggtcggaattttgtaatttttcattgtttctgtgatcatgagttgatggtggtgtagatttaatagaggaatttgttgttgaggcaattagtttggttttttgggttaataggttaatatatttgtgaatattcatgttaggaagtgttgttgatagtgggttacagaaaaaagtggtttgttcaaattatgctacaatgctataacatgccgctatatctactatttggcaacagtttgtactaaatagtatatcaaggagcagtagccatttttgtccaaattctgctatgaatatgatatagtgctatagcgcctctttctttttaatagcactaattttgggtaagaagg

SEQ ID NO: 28275 - DNA, 328 bp, Medicago truncatula
  Intron number 2 from transcript Medtr2g104490.1 (locus Med tr2g104490) derived from phytozome v7.0 (chr-ID MtChr2; po s 24662665 to 24662992)
gaaatcagcttgtggctttgcctgtgagtcaatttaccatgttattagtgtgaagtattaatcaactttgtcgatgactcattttcgtcggcatgactaacctctgccgaaggaaaatatggttggtcatttttagtggggactctcttctcaatcacattctttcaatctacaagactcaaactcaagattttgcttaaaggatctccgactcaatgcagttctactcggaccaatataatgttgggaaagaaaaataaacaaaaaatcatttcttgttttgtgtattgtagtacataggaagtggatttgctggacttcaagggat

SEQ ID NO: 28276 - DNA, 449 bp, Medicago truncatula
  Intron number 2 from transcript Medtr3g005520.1 (locus Med tr3g005520) derived from phytozome v7.0 (chr-ID MtChr3; po s 322794 to 323242)
attttacaagctattacatccacagggaggttttggtgagtgagagttacttaactttgtgtgcttgtgttggttggttattagattattaattatcatggtccaattgagttagagaagaatgtttcttcacaacaacaggtagaagacgtaaaaaatgaaactttagcatttccagttagtttcaccatgggttttgctatgaaaaggaaaagtatgaaatggttgaggaaatgtgtggaagataaggaattttgttcttgctgatgaacaaacacgttggataaatttgagattgttgaagatgaatattgttggaagagaaacaggggtttgttgtaatgaaaatggatgagagaaagtatgttgatttcagttttgattctaattttgtaagtgaggaaggtgatgaataatcatgtgtatatgatgaaggaggaagaggaagg

SEQ ID NO: 28277 - DNA, 906 bp, Medicago truncatula
  Intron number 1 from transcript Medtr1g105730.1 (locus Med tr1g105730) derived from phytozome v7.0 (chr-ID MtChr1; po s 21867200 to 21868105 reverse strand)
aacttactagtgagggaagctttaataaagaggaggtaattgattcgaaaacatgatgtgttttctgatttgatcgcaatgataattgtaatcgtttgtttatacgttttcttttttcgtataatgtgtggcccttggtgcatgtttagctgggatttgatggtgtttattttacaatgtcactttatatacaatgttcacatagacactctgtgtcaatgttagtacatataaattatatacaactttttttaaaaatattgattaaaattattttgattttgattaaaagtatatgtataaataatagatattttgctctttcatattgtaacaaattatattcatattttataatgatatatcaacaatataacaaatacaatgtaaatttttatcttttttaataagaccaacaaaatagcatttttatagtccaatttatttaagagtataattgaaattgaaaaaaccctttgcctcggaatttaagtgggatggataaagtgcactttataaatatattttatgaattcgctttatcgttttatgatttttttttagtcaaaaggaagattaagttaattaaaaagaaagtgatacaaagactaaggggatattaaacctgaccaaggtacaatttaaatggggatacatcaatttcgtcaagcagcaaacaaaaagcactttcgagcattacatattaaagtgtaggctgacaagacgacttgaaacctgcatatctgaaaacatcaaagaaccaaagtagtgaggccaccaacacaacaaacatatgcataacaaaagcaaacaaacatgtccctttcgagttaacacaaccttacccttttgggtttttgaaatcggtcagaccctttcgggtttttgaaattgaaccacatccaa

SEQ ID NO: 28278 - DNA, 900 bp, Medicago truncatula
  Intron number 4 from transcript Medtr1g146280.2 (locus Med tr1g146280) derived from phytozome v7.0 (chr-ID MtChr1; po s 32297572 to 32298471)
ctcaaattgaaaaggactttttggaaatcaagcctgtgagtactttgcatacttacctgtctattgaatgcatgagttgttttgatccatttacgcgaattatgattctatctatcatatattgtccatgtctgcatttatttgcatgtagttatgcagttggctagagcaatgtcttacctatcttgggatatagcaagatattttctcgtacagttaattacttttatttttatttttatttttttatagaaaatctgatgattatttatatcagaatgaagaaattaaattatatggactttacaatgctataggagtacaagcaactgggtcagacactcagagtctcattcatttaagtataagagctacaacattgatttgtgtgtaattaatataagagctacaacattcagcacactttttagacttattaatgcctaggctaggcatttttttagcatattggagttgggcttcaggttgtaggttatagttagagtgttagactgcctaacagctcgaggaaaacaatcaaccaaattgtatttagttgaactcacagtataaagacgagcatgcgtgtctgattcacttgtgaacattcaatgagctttttacatttcgatatccctttttctgtctcctcagagatcttttcagtgaaatatttcatctctcaatcttgtgtcctatatgtgtggtggtgtgacagtttattatttgggagtttggacttgattcacgaccgggcattatagtcttattgagttcggctgatgctctttattttattctgagttgaaatgaatgttctagcttctgaaaactctttatgaccaattttgtccttttatttcaggtttttcaaccattttgtcaaagttttggagattt

SEQ ID NO: 28279 - DNA, 954 bp, Medicago truncatula
  Intron number 1 from transcript Medtr2g091400.1 (locus Med tr2g091400) derived from phytozome v7.0 (chr-ID MtChr2; po s 20603352 to 20604305 reverse strand)
tatcagagcacaattgcggagggtaactcatcgaggtaagagcctaagaggaactaatttaagagttgacttctcccaacttaatgttttttcatacacacccttaagaatcaaagtatctactacttgtattacatcatcttgttagtatatgggtactatatttagcttgactaaacatgtttaaacgtctctatttttcctttttttacgagtaattacttttctagttatcaaactagaagaatgatatttgtacaactaatcttagacaacttatgtgacaaccactttctctctcttcttattggataaaaacaatagagagagaaagaagaagagagagaataaaaacacatgtgagtattagagagatggttgttccaaaagttgtcaaaaagtagttgtacaaatatcatttctcataaactatatccctttgattttgatttcctttttgtttctaactttcaatggtcctaatttcctttatatttgttgcattgccaactaatgatatcaactcttatctattaatttcattatttttcaatcagcaaactgaccagattaactaaatagatttatcataatcataaaatcattggattatggggatgctaaaacaggtctgacttgctagaccggctcgtttagcccattatttttggcaggctgagtcgaagtagtgtactcggccacttaaattgactcagcccgcctcatcccatttttaggtgggcttaaacggggcgtgtgcctaagcgagacatgcaggcttactttaccatccctattggattaaaactgtgatgtaatgctattgatttcataaaaacatttattaaactcatcagattatgagttagttgtacaaagaaatatgatatttattggaagactatttctctttgataagatcaaaagcacttacttgggagaaggatagctcaa

SEQ ID NO: 28280 - DNA, 914 bp, Medicago truncatula
  Intron number 1 from transcript Medtr3g025290.1 (locus Med tr3g025290) derived from phytozome v7.0 (chr-ID MtChr3; po s 6517961 to 6518874)
cagaggaaatactcaagccccagaaacaattattggtacgtattaaaaatcgaatattattattagtttctaatattcaatattattatgagtgattacataccaatattttgataagcttaatatttttacttataaacaattgttggtacgtatgaaattgtcaagaagattccgtattattataaattatcatttttactgcatctgaaaaactctgtccgaatctcattttttaacaatttttcatccttttgatcatttgttcctatattcaatattcgattttattggcagctataaaaaatctggaaaagccatgaaaaaaagaagtaattaagaggcctttcgctatacttttttatgaaaatatttattgttttaaacaaaataagcacttttagaaattttcatccatttattataaattttcaaaaaaaaaatatgattctgaaaagaaaaaaaaaatataaaaactgctccacatgaaatgttgttcttaggatgtgcttcttttgacttaaaaacaatgtgtttcttgctttttaaaaagtagattttgaaaaagttattgggaatcattctttttatggatagttcaaagcacataatccactagatagtattgttgggtttcttgaatttaacaatataatttagagtaatgtttgatggatacctccatctacctatttgaaccctacaactatatatgaaaacttccttcaaaaaacaaaaactaaaaaagttcctactttttttttggctaataaaattttctcttacatttctttcctctcactttattttataaaccaaatatagcataacaactatatgagagaaaataataagtatttgtcctttgcacaatttttatgttttctttacaggtcctgcacctggtcggcgta

SEQ ID NO: 28281 - DNA, 1034 bp, Medicago truncatula
  Intron number 2 from transcript Medtr3g093390.1 (locus Med tr3g093390) derived from phytozome v7.0 (chr-ID MtChr3; po s 22181946 to 22182979)
actaccaaggttggtgttgtttgatattctttgtgcctggcactcttttctatttgacattgctgacatttatcattaattttataaaaaaagttatctcttgatgaagtttataaaaaaagtgagtcgagagtcgagagaaggttgtgataattcagtggatatgtacatgattcaattgtagatgacactagacttgaataagtagagttatctcttgatgaaccagaattaaaattcttgttttctatacggatgaatggatgatggtaatgagagaggagactcactcggtcaacaataacattagacaaaacttgttttgagttcttttagtgatgcttttgttgatattctaacatagggatgaagaatagattgtggtttataacaaaactctacactttgttttttgatcacaagtattatattttgtaaattatgatatttataattatatattaatgaatgcatatttctttcaagtattttacatgcatttaagttttattataattttttattaatgtatcttaaccgtatcgcatcctatcctaaatttcaaaaacttttgcgtatcagcgtatccggatcgttttactttcacacccgcaccatgtatccgggcttcatagattataggccgagtaggatggttaacgaccgagtcaggcttaataactagattagtatggctgagtaacctcccatgaacaatgaactagtacctaacttcccctctaccaagaaactttactgagaaccatttcccccaacctctttaaatagagaaggcttatctcatctaaaaaggggaactgattatttactgaatagccactgagacaaaaaccctgttgtgatcctagttattaacagggacagtaacttttcttgtttagctgataagaaagagctttgatttaatactccaaactaaattgatttgctgatatgactgttcggattaactaatttcattttattatcttctgttagctcttcttgaccggggctggagaagatctggaagt

SEQ ID NO: 28282 - DNA, 823 bp, Medicago truncatula
  Intron number 1 from transcript Medtr1g023990.1 (locus Med tr1g023990) derived from phytozome v7.0 (chr-ID MtChr1; po s 5499105 to 5499927 reverse strand)
aagattgtgtaactgttgtttctgggaagcctcaggtgcattttctctcaacaatgtgatgacgattatgcttttgatatagattttgattggtgaatctaagggagatctggatccttgattgattgcgtaattgaagaagattgattctccatatggaattgttttttgtgatctgatgatgcttacttgatttggatgttaactttttttgtcattttgattgggatattttgaggtcatgtttggaaaatcagcttaattaagcgcttatagcttaaaaaaaagataaaataaagtcgaattgttgtcatataagctataagttgttttcataagctagtcttaagagcttatgaaaataagctggaaacaacttatggtcatggacatgtcataatctctctcaaacaatttctttatgtcagtaaattagctcaaataagccaattgaaatagaccttgactatattatatatttggttgggttggtttgggtaattgttggcttgagagcacatattagtgaagtgtttggatgcttcaacttaagaattgggaaaaaaaataatttcaaatgaattgaaatgatttatgaatttttatggtaatgtttacaatttggcaaaatcttacatgccaagtgattggtaaatgaatgatatccttaaactcatatccctttcaaacaagttttcttccctctgcaatagtttgtcataatagtatttcattaagtacctgaaaaatttgggttgaattatatgctaatggttactatgatacaggtgcaaattggtgctcattcctttacatttgatca

SEQ ID NO: 28283 - DNA, 963 bp, Medicago truncatula
  Intron number 2 from transcript Medtr1g064680.1 (locus Med tr1g064680) derived from phytozome v7.0 (chr-ID MtChr1; po s 12600852 to 12601814)
tgtcaccttcctcttgttgtggtatgccatgatcatatttgtaaatgtcttcgattggtaagtttaaaaacaattctatgttatctcaaagtttataatttcatttgtgttataattagtggtgtaaatgctttggatcaacccatctacaactctatatgatattgttaatcttatgatttctttataataatgcgatttgtgtttaattatatgttctttaaatttctttgacagccttagaaggttagtttgctatttgaagatatggagaagtacaacgtcacttttctacttcaatgaatcaaagaaatacggttatgtaaaaataatcatttcttgtatgtatgaaatttattgtaagaatgatgtgtattataaagtgaacctgtattagttagtttgtattttaaataaaaaagactaaagcgttaaatcttaataaataagaaacatttatggtaacattatattatatacttaaaaaaattatagattaagataaggagttattgattttctttatgtttattgcattcagatggacactcggtgtttgtttgttcactattttcaatacgataatgtgtataaattacgaataaattttaactttgattaaaattgtaggaaaaaataatatataattttatcttttcgaatgacaccaacaatatagcaaattaaccttggataaaatcatgtattcccttttctctatgaaaactagaattacctcactcgatatgaaaatattacaaaatgactcaaaaatcataggcaattgctctaaaactcttctatctaggataaaactaaataaaaattattgaaaaatatgtatgaataacgtaagatcacatgtcatcatttgtcatattactgttgtggagctaccgatgacctaacctagtaacgttgcatgttaagtattgtgattgtatcgtgagaggacgtcttcat

SEQ ID NO: 28284 - DNA, 943 bp, Medicago truncatula
  Intron number 1 from transcript Medtr2g091650.1 (locus Med tr2g091650) derived from phytozome v7.0 (chr-ID MtChr2; po s 20705222 to 20706164 reverse strand)
gggttgtgctggatcctctcaagctaaagctggtaactttatcttctttctctattttgcattgttatttgcttaatctgaactcacatatttcatcttggattcttttcaaaatctcttctttatgaattatgtttcataatcagttctttctcaatgttgggttgctttcaaaatctgaatttgatgatagcttgaaaaatttcatttttaacatcaagaacaactcaattctatagattcttgtatatttactttattttattttaacaactttattttttttaatatttaatactattgaaaattataccctttgtgactatattgataacatttctttttaatgttcatttatttatttatttattttttcaatctaattttgtttggttgctgctaatggttttctttgataacttgcaaatatttgaattttataatgtgctaaaattaaccgttttactttgtctatttctcttatttgtttttttgtaaaaaataaataaatctgattggtaagtttttagttaattgtggattgaaattggtttatcttgattttcatgtgaaacaggcattgaaatttggattagtgtaattggaaagggtaaatattattgattagtttaatacctttgatattctaaattattggtagttttctggattggatttttgatatttttgttgaattgcagtagtttgttttaagcatttcataagaagaagaatgacgatgatgatgataaacaactttcacattgtgtaaaatgtctttagataatgatgatgatagcgattgttcttgtcattcgttaattcaaatgcttgttcctgatgcaatgttagtttttagaataaagtttaatttcggcttcctttaacataaacttgaaacaattttaacagggactgtaaagaagatccgtaagcctaagcc

SEQ ID NO: 28285 - DNA, 647 bp, Medicago truncatula
  Intron number 1 from transcript Medtr1g096440.1 (locus Med tr1g096440) derived from phytozome v7.0 (chr-ID MtChr1; po s 19742131 to 19742777 reverse strand)
ttttcttgttgagtattgtatgtttgacttgaggtaatacaaaaatgatcgttgatgcttaaatttatgaatgatttgtttgatagttattgagtttatcataccaaaacgggaaaattgtacccgggttttgatttgtgtttatggttattcgtattggtgagacttaggctacctttacaaacacaaggacaattcgtccatatttaaatttttaaatttatagattgaaactctccttcctttggagaaaaaaaattgattcatcctctttactctccttttataccctttcttccctcttatctttgggaaaaatgccctaattttcatttcactcccacgattttatttctctctgtcatcaaactcccgtcatcatcttctactccttcaattaaaaaacccggaaaacaaaattgattcatctacactcaaaccctttctcccctctcatttatctcttactgttccctttcattatcctttatatattttacatctttaccataataatcatttttaccataaaaaaaacgataaacaaacaatattctttagaagaagaaaaactttgtaacatagtgattggatcatcacaatttggtcttaccaattcaaatgtgattggatcatcacaggagttg

SEQ ID NO: 28286 - DNA, 611 bp, Medicago truncatula
  Intron number 2 from transcript Medtr3g098420.1 (locus Med tr3g098420) derived from phytozome v7.0 (chr-ID MtChr3; po s 23824594 to 23825204 reverse strand)
tggttcacaggtaactccagtttttttcttttaatatacttttgtcttcctctgtgtctatatgattactgattttctgttaattctgatctagcatcatatggtatggttcccatttccagaacaatgatgtcaagagtcctgtctatggttcttgcttcaaatgagctttcacttttgattaccgtctcgtcatttttgtaaaggtttcagctttgcttgatctcttgtaattgcaatatatccgtcgtaaataacctgatgtgttgtattttttcttgtaatttgggtgtccctttctcccatttttgagaaatatcaccttattttcatctctccgtatgcatttatcttattccaaatgctatgaactgttctacatatttggccaaatttgagagttaaagaaagatgcggaaagaagaaaagtatctaaaggaaaaaggatggtctttcatcccgtgatttgccattgcatttctttctcgccccaaacaaatgccttttcatactaagatcttgtctgaattcttgtatcagttgtataattaggatgacacaatcattattaatatattctaattatatctccctaatttaagggatatcaa

SEQ ID NO: 28287 - DNA, 509 bp, Medicago truncatula
  Intron number 1 from transcript Medtr3g030640.1 (locus Med tr3g030640) derived from phytozome v7.0 (chr-ID MtChr3; po s 8354397 to 8354905)
aaatattaaacaaagtgagtttctctatttttatttatttaggagtattttggttatttgaactggacttttttgctacttcattcttttttttcttgttattcatttttgttgggtatgtgatcaacacaatttcatgtgaaagttatcttgttctaaatttaagatatatttctttgttatctctgcaggtcgcaacatttataattcataaaattttataagatgatgaagatttggtttacgtttgtgcaacaacatagcggttttttttgcattacatcaaattttggacacaatgttccaaatttttgagaaggaacctacaccctgtcttttgaagtttataatttgatgtgctcattttttttaaggttgtgggttggttgaacagttcgatcatcataagggttcttgagtattgattttccctcaataattttacaaattgtatgaattcatgtgtatttttctagtttacaataaaacttctttcatattaaagtagg

SEQ ID NO: 28288 - DNA, 536 bp, Medicago truncatula
  Intron number 1 from transcript Medtr2g010100.1 (locus Med tr2g010100) derived from phytozome v7.0 (chr-ID MtChr2; po s 2374342 to 2374877)
ctgcttcttccaccgtcactgcctttcgttcggtagcttctctttgctcttctctgtcgtggttgcttcctttacattgatcttctgctttcgttcgtttcgttatagctttggttttactcttctctaagaattttgattcgcttatgattttctagggtttttgttgttatggtgtagatcttcgaattttgatctttcggaagctcgttttgtaatagaattttgagcctgtttggataaacagcttatttgcagctcataacacaagttatgcatacgtttagataagctatttttatagaaaaagataaaatgaagttaaattattctttagcatgctataaggtgtttttacaagctatttcggatagcttacgaaaataagctgtaaatctcccaaattgtctcacaaacttatgcagtagataagctcaaataagccaatccaacacaggcctgttgttcaattttaatagtctcacaaacttactctgatgttgtattgcagttgacaggcaacactaaacctgcat

SEQ ID NO: 28289 - DNA, 986 bp, Medicago truncatula
  Intron number 3 from transcript Medtr2g080710.1 (locus Med tr2g080710) derived from phytozome v7.0 (chr-ID MtChr2; po s 18675158 to 18676143)
agagttaccgttgaaagtggcgaagctaccctgaagtatgtaatctagtatttctcacgagtcgtctttacttgtctttgttgtggagattgtgtatgattttgttgttgctatcagtgtcacattcttgcttttcctttaatttttatttgttgtttccatgactattgttatgatcacgatttgcaatacagttaatatcaagaggaaagttcacccctatcttgtttattaccctttgcatgtttgaatttcagataagatatcccatttatctcgataccttagagatgtcttcttttattcgaaattgccatgaaattctgaaaaaagtatacatacaacatttgtttcatgttaaataaatatactcacgggaacatacatgttgaaaacgaatatgcccatggcagagtagcattcccatcagaatgttctttggaatgtcatcgattcccaataatgtatttatattaacgtgaaacaattaccaccttaatgctgtccacgtgtttcttagaagaggttaactaaactagaactgtaatgccccaaaagtgttactttaacagtagactaaccattcatctcactcatcacttgaaactggctctcagccatttgttatttatatccgtgttcccatgttaaatcattataatggcaccctattatcaaattcaggaaaattttgcagtagaattttccatcagacgtgtgttggtataaatattaatctttttaaataataatcttcggtatgctgcaaatgattttttaaataataatctctggtatgcgcaaatgattggtgctagatgaggtgttagcctagttgggatctctcttattacaatgatgcctcttcttgctttcaatgttttcatttctatatgaattttttagaaatattctcatatgccaggcctcctaatatcatcatgggatttcttttcctatctttgtaggtataacgtagctatcaa

SEQ ID NO: 28290 - DNA, 475 bp, Medicago truncatula
  Intron number 3 from transcript Medtr2g082950.1 (locus Med tr2g082950) derived from phytozome v7.0 (chr-ID MtChr2; po s 18949822 to 18950296 reverse strand)
ggttgcaaaagttagaatcttttcttctctaattgataagtcattatgactgtgttgtattattatcgttatacatgtatattttgaattcaagtggcttttgaaatgttattatcatgagctttaacttcgtgctgaaactgttatattcatcttgaatatatattctatcgatggctactgattacataaaacagcgatttgttcaaattagtatgttacataatagcactatagcgcctgcctatgtaactgctatttggcaacactttttattaatcccgtgttgcataataaaagtggtttgttcaaattatgttaagctatagccgctattttgacaacattgattcgaagtcgctgcagttattttcttttaactttgtatcagtgtaggatatgttttttatatattgctgatttgagttcaaaatttgtagtgttccacagctgaagactgtcgttcagttacttg

SEQ ID NO: 28291 - DNA, 718 bp, Medicago truncatula
  Intron number 3 from transcript Medtr2g009650.1 (locus Med tr2g009650) derived from phytozome v7.0 (chr-ID MtChr2; po s 2169263 to 2169980 reverse strand)
ctgcagattttgtacgttttcgctttcttattttttaattacctacaatttcatgtaatgtaattgttatgtgtttagattttataatcatgtcttttaataaaattaatctatttaaatctgtgtttaactttaaaatgaaatgatctatgttcttgtgtttttattcttaaagcaattatgatatctcatacatttatatcatataaaagttagaaataaatcatcaatttagtacctaaaatatcactctcactttaacttagttcctaaactacatgtataccctgcagtatatgaaatccgacgttttaggttctaaagtatataaaaattggtctcattagtcgcttcgctagcatcttaacaccaaagtgatagattaaatgtacttttcatgacttttattaattttatatactttagaaattagattggagattaaattaaattaagggtttattataaactttagtgttaagagtttttcaactcaaaacttaggtttagaaatattgtctgataatatccacacatatgtagtctttccttgagtaatatatgatagagatgaaattgattttgagagtttacataaaaaatcaaaaacgaagaattggatcacatttctgtttacaatgatgatgatgcgtataaacattaattgtagtttggtttcttaccgagtttggtttttcttttttgcagtgcggcagtg

SEQ ID NO: 28292 - DNA, 588 bp, Medicago truncatula
  Intron number 1 from transcript Medtr1g046330.1 (locus Med tr1g046330) derived from phytozome v7.0 (chr-ID MtChr1; po s 10763657 to 10764244)
atttgtttggcacctattgcttgcttctttgaaaggtgcatattttaattctctttattatttttgtgtccttggctatgtatatcatttagaaagtgactttcttttttaatgaagattgttttagcagtgtcgaatttgcattttggaaatgaatatttgtatgataattgatcttctcccatctattttgctcattcccgtcaaatagtcgagtgtgagttaacaaacgcagatgcattttcaacgtgagttaactcacataggtgtatttttcagcgtgagttatctcacgtaagatgggaatgagcaaaaatagatggaagaagggcaattccctatttctatattgaaatttcacataattttgtcaaattaaaattttgtttagtatctctatcgagagtcactaattttgataatactacccctcatttacttaatacatcaatagagagacatagacatgaaaaccccactctattgcattttagcacttacatttgtaaaggataagataagatttgatgattttctagttgatttttttttttaataattttatattttacagggaaagcaagataa

SEQ ID NO: 28293 - DNA, 807 bp, Medicago truncatula
  Intron number 3 from transcript Medtr1g111500.1 (locus Med tr1g111500) derived from phytozome v7.0 (chr-ID MtChr1; po s 23777220 to 23778026)
ccctctaagcattcatttttcattcgtgaatcaaggtaagcagatgaaaataagtattgtttagtttatctaacgtatggtatagaaaaagttagtgggatatctacatggctatccttagctcatgagattttatctctcaaggctacacctacactatcttaagtctgattttttggaaggatgataatgttgtgtaacataactaaaataaattattaagaattgtttattttataacgaagatggattttgcagatttgatttgtacatttttattcccttgtgtttccttaattaggtggtaggtagtctatatatttgaattttaaacaaactttgtaatcaatcttattcagaataatatgaagacagagagaaaataatatggtatgtatttttatcccctcgtacttccttagtaaggtggttggtattcccttgtatttcaaccagtaatgtctcgtgtaaaattttggaagaccaaattgaatgggaaatttcccaattagttatgcttctccatgtcttttttagatcttttttttcctttcaggcacaattctcctgtccacaatttccatcttttcacttttggttgcatcacattgttgattattgttatgatgttcttctttaagatggacgatgttacaaaaacgtggttgaaaaaaaatacaatctttcttactttgaatttgctgcttcacttctgtaaccagattatttttggggattatggaatgtggctctaaatccaactgtgttgcctgaattttatgtgcagatctggtgtgaggcacacaa

SEQ ID NO: 28294 - DNA, 1006 bp, Medicago truncatula
  Intron number 5 from transcript Medtr2g005840.1 (locus Med tr2g005840) derived from phytozome v7.0 (chr-ID MtChr2; po s 430537 to 431542 reverse strand)
gagcactggaggcagctcctgcggtgagagatagtctttgttttattagaagttatcctttatgttttcagattttaaagcatatatttgattgttctgtgttttgttatgcgttatgccttgaatcaaatgatagttattgataaatttggtctttgctgtatagctttatacactaatcatggttgaatatttcatgtgatcccaaaaatcaaggataaccattctgttaatgtttagtggctgaaagcctgaaacagattacgttcacatttcataggatgaaaaactgtaaaacggaagatgaattctatctggttggttaatttttggctagatatacatagagtagtcaatattctgtattcaaggatgactaatatgatgtcaactgtcaagaattataaattataaagtataggttttttgaatgtttcttaaatgtgtttttttattctgccagagattataagctttacatgttttagtagtttcccatctatactttcttatttgaaagggatatgtgccatgtcgaccagcagcatttattaaagttcatgatttttgtagcattgtttaagtaaaacaattaggaccccattgatttggaagtttgatctaattataaatttctggttcatttgaaaggagggggatgatgtgagactgagtctttgttagactatcgagcccgggtctcgaggcctattgccattgaactctgcttcgtgataactggcaacatctatgtagtgtgaatttcagttctgattttagttgatttcatgatgcaaataatgaaacttttttttgtagaagttatatcctctttccatataaaatattttccctgttatcgttttctccgttttttggtctttatacatgaaaagaagtaattaactgtttcatgaccatctccatctagttgatgctgctgccatatacttgacctgatcttttttgattcattttgataattgtttgtctttgctctaattag

SEQ ID NO: 28295 - DNA, 949 bp, Medicago truncatula
  Intron number 1 from transcript Medtr2g090650.1 (locus Med tr2g090650) derived from phytozome v7.0 (chr-ID MtChr2; po s 20259863 to 20260811 reverse strand)
ctttgcaagtttttccaaaagtatttcaaggtgagttccttagttagttaactctccctttgggtagtttgaatcatgtcattgaaatggtgctatttacttttactcaatacaatcgaggttttaatggttatgcaaagtcatgataatgtgaacgaaattgtatatgatatgaaagttgtgaaagtattgatcacgtgaattggttctagcattaaaacactaagcaagacaattgatatatatactaatataaattatttgaaagaaaaaatggaaatgagtaacatgctcagagaaaaaaaaaatgcgaaaaatccgtttgctacaacgaagagataatgtagcctatgaggtatggctcatagtaaaaaaatgtgaaaactctgtttgctacaacgaagagataatgtagcctatgaggtactgctcatagtaaaaaaatatatgaaaactctgtttgctacaacgaagagataatgtagcctatgaggtacgactcatagtaaaaaatgtgaaaactccgtttgctacaacgaagagataatgtagcctatgaggtacggctcatagtaacaaatgtgaaaatgttaccgtcgctacaacaaaaagataatatgatctatacgcacatagtgaaatatataattaatgacatgaactttaagttcagaattttgattatgattataagtatgtgtatgaataagaatatgacattatgatagaatcgtgatagtattctaggtagtgaccctagttatccctgatcgttcaattatgtaggataaagactgtataaacctgaaatggttgagattagaacagatggcgatcctaggttccctgagattgcctacaacctaggataggtggaactcactgaaacatcatgtctcaccccgatctcttttatttatttcagatattcaggttactatacgacatc

SEQ ID NO: 28296 - DNA, 1052 bp, Medicago truncatula; identical to SEQ ID NO: 27912
  Intron number 2 from transcript Medtr3g019210.1 (locus Med tr3g019210) derived from phytozome v7.0 (chr-ID MtChr3; po s 3735632 to 3736683 reverse strand)

SEQ ID NO: 28297 - DNA, 744 bp, Medicago truncatula
  Intron number 1 from transcript Medtr3g113670.2 (locus Med tr3g113670) derived from phytozome v7.0 (chr-ID MtChr3; po s 28594929 to 28595672)
gaccgacaatccctctgtttctttccatttttaaggtttgtttctgtctctttatcttcttcttattctttttgttattgttttattttaatttaatttaatcgattcattttcataccccccgaatctaaacaagggaaaaagacgaaacagagaaaaacaataaaacccctcctttttgttgtgtatattcctgttttttgtttttgtttttttgggttttgacttttttttctttctttttcaaaaacctttttgtttttgttacattattattggttttgtttttgttcttttctactttaattgtttgtgtccaacggtttgggagatccaatggacattctttgtgatgatgataagaaggaaataaaattagaagaagccaaaggtaagaaaaactgactattgaaaattatggtttatgacttgatctgtataatctataatctatgaaatgaaattagttttgtaaacattattgtatcttcgttatttcaatagcaaaacgcataaatttactgttttttgttaccatttcatcaaatgttatctgtttcatttcattcatcaatgtctttgttatgttatataaagcataaaatgaattatagttatccaaaaatacaaattttttttttcgccttctccttgttggatctgtggtgggttttgtttattttgtagatcatgtgtttgatatttgttgtcacagggattctggatcctctgagagaattaaag

SEQ ID NO: 28298 - DNA, 651 bp, Medicago truncatula
  Intron number 3 from transcript Medtr1g069020.1 (locus Med tr1g069020) derived from phytozome v7.0 (chr-ID MtChr1; po s 13948501 to 13949151)
gtctggtttggtttgcctgattgttatatattcattatgttgttagagaaactgaattaagactgtttagagttggaattattgattcatattactgaagagacgtcatgatatgtagatcagaagatccagtactgtattaatattttgatttatcatttgcttactgctatgagcattggttcagacttcaaatgcaagcatattcaatacacccttaagcaccccactcatgactcagctaaggatcatttttatttctcaaaattgagaagtactggattaaaacattttactctatctttaaatcatatctaaagtgagatgtttccttattccattcaatacatttatatttaattcatcaccttttgtgtcatttttccatcttaaattacttcttattttacttgttagattgaatgcctcatttgatttacttttacaacttatgttctttttggattacaaatgtgtgttttatacaatgtctccatgttgcattcttcaataaatttttcaatttttattttatttaagttgtgaattcaactttcaacaccattatacaagggattgagaatagataaattgggcccttgatgaactgttaagcttgcctttgtgaatatcttgagagaactggtccat

SEQ ID NO: 28299 - DNA, 467 bp, Medicago truncatula
  Intron number 1 from transcript Medtr1g025100.1 (locus Med tr1g025100) derived from phytozome v7.0 (chr-ID MtChr1; po s 6153496 to 6153962 reverse strand)
gcgttagtatctttttcaatctttctatttgatttgattcttcattttttattttatttttactttttttgattcattttttatgccttaacttgtaaaaaaataaagttatgcttgatgttaaaaagtagttgagaatcttatgtcaaagagttgttgtaatttttatttttttaattcagtttagtttatttgttgattattatttgtgactttttgttacctttattctagtttgattctgttttttttaaaaaagttgctttggattttgttcttgtcatttgcatttatatgaatcttttgttagattcagtatgtaaaagtgaagtgaaacaagttttgatatttttttttatttttatttttttgggtttgaagttaaaaaattcatcttttgtttacagcaattttttattttttgttttgcagctgaagcattgcttttggcttttcagcactacatt

SEQ ID NO: 28300 - DNA, 818 bp, Medicago truncatula
  Intron number 1 from transcript Medtr2g010950.1 (locus Med tr2g010950) derived from phytozome v7.0 (chr-ID MtChr2; po s 2748295 to 2749112)
ctttggttttcccattcaaacaacgcaactctagggtatgtatctctcttttttctcttctttttcgatagatcagatcagatcagatctgtgtttcttttctaattatttaatgttagtgatatagatcggattcattatgatttatttatgcgcttcttgcattttgatgatttctctaaaagctttaatttcttgttcttattttcttcaaagatctgttttggattcttttaccgcgttattgctgtattattgtattgtagtcgagttttgatctttaattttgctgaaaattgggattaaacaaggctgatatgtctgtctgtaattgtggtctcattgtttggtgattagtatttctctttgacatatttgaatgtgtacttatgctttgatttaatccttatgtcgttaagtccgttatttgacaatactttactttaaatcgtgcaaacaataacggtttgttatagttcctttatgcttcaacgttgctatatctgctatctgacaacattgattatatcccttatggagagactaaggtgcttcttagaattctaaccatagtagaatctgaactaatacctggtcatgatttcacaattttttcacttttcgtagtcattgaaactactattcattcagacttttaaaagttatgcatgattatgtagaaaggagagaaaagtcaagtggctagcttgataaatcatttaagcttttcatatcattttcatagaatcacatatttactagtgtttgtcgcatggtttgcagctttaggtggacaaaagaaggtttgttgtagaagc

SEQ ID NO: 28301 - DNA, 834 bp, Medicago truncatula
  Intron number 1 from transcript Medtr3g030090.1 (locus Med tr3g030090) derived from phytozome v7.0 (chr-ID MtChr3; po s 8089240 to 8090073)
cattccactaaggtgcggccggtgggaaaaatgaaaaatattatgtgctcatatgaaatccttcatttggtgctagacctaagaaagtatatacaacaatgcatatacttagattatcattgtattgtaaaatgatgataattaaataagacaacaatgcatattatttagattatctttttctttttgttttagttgtatctccatgggcgtattacattttctcttctaccatacctcttatcataatagctttaacaattaagtttaaaaatagctttgtaaattctaagcctatgattacatatatatatatatatatatatatatatatatatatatatatatatatatatatatatatatatatatatatatatatatatatgtatatgtataaagcctcacttgggagtaagttatcaaaccaactctcacacatattattattgaaaaatcaattcaatctatctaaaattaaacaggagtaggcttgctaacatactcttaaagtgggaatagacttgttaacttactcctaaattgagagtagatttgctaacttactcccaaagtgagagaaaacttgctaacttactccttcatgtttttgagtgtgagtatgaaaggttttttggtcaaaaacaagtgggagtaggcattgctaacatactcgtagggagtagacttgctaacttactccttcatgattttggatgagagtaagttagcaacccccgtatgtatatgtatatgtatgtcataattgttagactgtattgtcaaagtgtttgtttagacaggtaaggtggaagctaagactgcagaattctc

SEQ ID NO: 28302 - DNA, 1001 bp, Medicago truncatula
  Intron number 2 from transcript Medtr3g122400.1 (locus Med tr3g122400) derived from phytozome v7.0 (chr-ID MtChr3; po s 30429698 to 30430698)
caaagttgctcaatcagcgcaaagataagcttaaggttcttttcaaattgtctgtttctgtattcttatcatttagttttatcactagacttcctcttaaggactttcgtattctctacttttttcgttttctacatcttattgatcaataaccttcttcgtgtgttttcttgaataatgtcacaaagctaaaaagacattaaaagaaaaatccccgttctactctccaaagttacataattggttttcttctaattaggtaactatttgtctgatcatccctaatgaacttactcaatatggtgccttggtgttcatgttaaatgcttgatgaaatgggctgtgaaatactttagacaaattaacttctaattcctcagagtcctgtctttcgagtataattcttcgttaaggttacttttatgtactgaattttgggttcggacctaaatatttgtatctcagctttgctaggtaactagtaactactaaaccttccacaatcacactgaatctggaagaattaatagattatctaggctttgaactctctacttcacaactttggactaccatgacatgctaattacctgttatattacctgatcataagttcatcatataagttagtaatacttgaactgcatccataataaaaagtttagctaaagtataagtttgcgtaaaatctaaaatgtattaactaacagtgtcccaactagatcaaacttactaaatgttgagctctttgatccattaggatagataaaataaatcaactaaacaatatcgatattagctattgagttgtttttaactagtgtcagaagcacaggttttgacatacgtaattagatggcttcttctgttagtgtgtttgatgttctgactctaacacataagtactcaaaagtcaaatacgttgtttgaagactgtttccctactctttggtattaatattaaagggaactgtgagacttcttttccaacctgctgagga

SEQ ID NO: 28303 - DNA, 857 bp, Medicago truncatula
  Intron number 1 from transcript Medtr1g100460.1 (locus Med tr1g100460) derived from phytozome v7.0 (chr-ID MtChr1; po s 20878714 to 20879570 reverse strand)
ttctgcgaaggttttcttcgaagaacgcttccaaggtatatcattcatttctatatctctttttttcatttcacctttactagatcatcttgaatttaaccttcgtctttgtaatttatagaatttgaattttccgttttgcattgttgcgtgatttcaataatgtgatcgaattttcacgatcggtgtttttataatgtgatttgaatctcgatctgaattattagatttttgatttgatctgaactgtcgttgtctggagtagatctgaacacgtgtgtactgaacgtgatgatgttcatttgaaaattatttggcacgttttttggttaattaatctttgatcatggattagtgatatataaacagcagtgacgattaactgtatttgaatttccatttcattttgtttacaatccttttaatctcatttctgaagacgttaattgatttgagttgtgtgtccggattaagtaatggtagtttttttttttttttactttgaattatttgtctctgtttttgtgtgtaagaactatttagattaacttatttgagcttatctagtggcataagcatctgtgagactctacggaagaacgtatgaaaacactttatgaaatgttcataagctgttttcagtttatttccataagtcacagcttatagcatttccgaaatcaatttgagctaatcaaacagggccataatattattactgtaagaactgttctgtttttccttttttggtaaggatagtccatattcatgggtaattagtatatagtgcatattttataatcatcattttccttatttctaactcgtgtgttgatacattatgttgaatgctaaag

SEQ ID NO: 28304 - DNA, 639 bp, Medicago truncatula
  Intron number 3 from transcript Medtr3g087640.1 (locus Med tr3g087640) derived from phytozome v7.0 (chr-ID MtChr3; po s 20934474 to 20935112 reverse strand)
gacacccaactgtaagtattggatttttttattttaaactcctgtcattttgttttgcttggtgtttgtgattaaactaatttcttatctgtttgtggtcttctacgagatcagtctttatcacatcacaaaacaatccacacccaattggaaattataaactaaaactaatttcttatctgtttgaagtcttctgtgagatcaacaatccgcacccaattggaaattataacctaaaactaatttcttatgaggtcttctacgggatcagcctttttcacattttaggttataatttccaattgttgggtggggattgttttgtatcagatcagatcataggcccccaaatggattccatagaaagctgtaaatgattcagtaattgctattttgtcgttcatgttgaaattaagggtcaccaaacagtctgtaaatgttttgggaagttgtatttttttagctgttgtcttttcttcaactttaagtacacaatgtatgttctgtaaagtagtagtgttaacagttgtgttttatacttttgagcttttcaactatgttgttgtcatgttttattaagcataaatgttacaccatgtaacagggttcagctgaagttgtctacaatagaagaagtga

SEQ ID NO: 28305 - DNA, 639 bp, Medicago truncatula
  Intron number 3 from transcript Medtr2g005810.2 (locus Med tr2g005810) derived from phytozome v7.0 (chr-ID MtChr2; po s 426179 to 426817 reverse strand)
cctctgacgattctgactctcaagacgaggaggaggtcagcttcatcactttcttttctcaattttcaacaacttctcaagacatgtttataacctcttttcaccatatttagggcctgtttggataaatactagcacaagcacgcttatgcataagcttccgcaagttatttttatagaaaaagataaaactaagttatattgtttttatgtatgctaaaagctgtttcaatcagctatattggacaacttatgaaagtaagtaaaaaaaaaacttgtaaaaattgtcataagctgttttcattagctcttccataacttatactcagtggataagctcaaataaaccaaaccaaacagacccttaagttaatatgagatagcttatgaaaacaacatatagcttataccaaaactattaaactttatctaatattttgctaccaaaacaacttacaacttatacataagggcttgtgctttaagttgaaagtaagttgtttatccaaacatgcccctgctattacaatggctgtaactaggaggaccctgttgttgttgttctttttccatctattaatatgttcaaaatcaattattgtaggacgttgtcgactcagaaggtggaagtgaaagctc

SEQ ID NO: 28306 - DNA, 417 bp, Medicago truncatula
  Intron number 1 from transcript Medtr1g124920.1 (locus Med tr1g124920) derived from phytozome v7.0 (chr-ID MtChr1; po s 27368228 to 27368644)
tgcagatttttataccgcaaaccctaaaaaaagaggtacataagttttttcttccccgttttgtttccttaaattaagttgtttttattttttacggatttcattaatcaaaatagtagcaatacaatccggcaacaaatcaaaaacttgagcgttgaccgtatatagctgtcttagttaattcgtggactgccatattggtttgccttctatagaactcaaccaacgagtttgaacataagtggaaaaaaaatctctaatgattaaaatcatagggtagggagactatgaagcacagacacttttcagtttttgatggtaaaagatcaaaaactgctatatatgtgttgctttcattctgcatctcaaattattttaataggtagaagaagagaagtaccctataacactagggga

SEQ ID NO: 28307 - DNA, 545 bp, Medicago truncatula
  Intron number 1 from transcript Medtr1g130010.1 (locus Med tr1g130010) derived from phytozome v7.0 (chr-ID MtChr1; po s 29225337 to 29225881)
tcagttgccggaaaggaaaacggtgatggtgtgagagatgagtgagaaacgaaaatggaaggaggaagagaagagagagtgaaaaggagatgtaaaaaaaaagaagtaaaaatattgtatattgatacgtggtgtctgtattgtgttagcatttgtgtgtcccgttatcacggctgaaaacaaaaatataactccttggcagcagttataacatacatatattttcactttcaaaatggatatgtgaaaaagaagggagaatagcgagacagtaatatgtgagagaagcaccacatcttgccaaaaacggcagtaacggatcagtcttaccctttgttagtcttttttccgttccattgtccccaaactaagtttctttctctatgttttttaatgcttacgatcaggctacacattcttctttccaacttctttttcgtttatatttcaatcttctttttttattttctcttttgattgatgatgaccatttattttttgtagatacaggggggataacacgtgggagaagagaatttacaagg

SEQ ID NO: 28308 - DNA, 977 bp, Medicago truncatula
  Intron number 1 from transcript Medtr3g012940.1 (locus Med tr3g012940) derived from phytozome v7.0 (chr-ID MtChr3; po s 2295920 to 2296896 reverse strand)
ctagggttctaatcaggcagaggcacatcaggtatattcatttttttatgttaatattgaattaatctgattatattttttatcgaagttaatctgtcttgttgatttttttatgtctatgctcatctggtaatttatttgaaagaatattttagatttgtcattttcagtttatatacaagcttgcataagctgtcttcttaagctgtagtgaagatcgtgtgaaaataagctgttttaataaatagtcataaaacttatgccaatagataagctcaagcagaacctgtatcattttgaaaaacactctcacgtgctagtgttttctgaaaagattagcttattcttctgcttgtgtgttacttaatgtttttgtatgatatagtttatgtttagatcattgattgtctctaccaatgttgtgtttgttgtgcacatattaatttattaactagcaatgtctagtgatttattgtttgtattcgtctattgatggaaaaacaggtaatcttatctagtaggagcataggggcttaacaagtctttgcttgttccctttgattcaatacatgttttgtggctcttaccccatatctgcttttaacttttaacttttgatgttctgatatctaatggtactgcatttcccgcgtagcttaaattttatcaatatattctttgtatgactgcattgttcaagtaatggagggctcctcaactatggtttttctgattaattaaaatactcaaatgtcactaattttttaaatgtgtaattttatatcatttttacacctaaaactagttggtgtgaatgaaatgaagagaaatagagagaatgtgcttatgggtacctgatgttttttttttttccctctttctatttagtcttgttcaaatatgtctgggcatggatgataatgttattttttggtttcatagggttgggaggcaggttgtgaacatcccatccttca

SEQ ID NO: 28309 - DNA, 1019 bp, Medicago truncatula
  Intron number 2 from transcript Medtr2g114580.1 (locus Med tr2g114580) derived from phytozome v7.0 (chr-ID MtChr2; po s 27120659 to 27121677)
acactccatctaaggctaccaaatctcctaaggaggtttagataggtgtcttcaggttttaggtttggtgtgcgagcatatcttatgtagcatagataatacatgtatatagcataccaaactctatgattcataaggtttaattcaataataaatggaaacattatatttttattcattcttgattttaagaaagttcattaatagtcgttccctcaaaaaaaaaaattaatagtcgtgatatattgggttgtacctagatctccatgatctgtgtgttggtgtattattaatatgctataattcgaactggtttgaaaataaataagccctttcgaatcattttggggaaaagatgagaaaattattgttcaattaattcataatttaacaaaaataattgttttttttcttcatattataacaacatataaagttaaacagagaaaatgtcatgcttaaaggcttaaatgatactccctccattccttttctttttatgttttagaacttcaaatatattccaaaacttttgatgttttagtgaatttattattgtgttctcaagtttatccttgttggaaaatacaataaactattaaagtagttgtgacatttgttttatcacatgtgaatttaatgataaataaggacatttaagtaaaaaaacacacaaatgtttatatactttaattactccttaaaacttgtgtcaagagctaaaacatcaaaagaaaatgaatggagagagtactaattggttttttttaagggttttgttaacaagtgtcatcatgtcactttttaagaatacacaaatacaaataattgatgaattttaagtagaaaaaaattacattttaaagtttcaatgcattgaatgcatcatttccaagacaacatatcttctttagtcttcttatcaagtgccttgaaaggcacttgttaacatttccttttttttaaattggggggcatttgcagattttaaattgtttgcttaaaagtgttgcgagaag

SEQ ID NO: 28310 - DNA, 768 bp, Medicago truncatula
  Intron number 2 from transcript Medtr1g087040.1 (locus Med tr1g087040) derived from phytozome v7.0 (chr-ID MtChr1; po s 17409511 to 17410278)
aaggtttagagtgggacattgtcttcatagttaaggtatgtgataatattcagaactttttttttttgtcttgcctaaaaacaaaacaagtgcatgaatatatgattgtgatgtttttgaaacagatgctcagatttctatacctgtttatccatattatccttggacaattatatggccaacatttaggatatgtttggttgtgaaaggaggaagagtgaacgatgagaaaaatgtgagaaataaactagattcgacttattgtttggtaaatgagaaaaatgagagcaatagaagagaaaggagtgtgtttaattttttttctccctgtacagtagccaatccagggtttaaatggaacgtggaaaagaataatctctccctccttgtatgagaaactcattgaagattcagttgcataattaccaaataatgcatttcatatagccttaggatatatcttttttgtgatctgaatcttctgtatgattactttgtttatgaatggtaatttattgcctcctcaacatgttctctcatgttaataaaaaaagttattcaaatgttattatttactcatgttatctattaataattttatggctggtgtttacgcctggttaaccaagtgttacagcttaggtgagggaggaatttgtctaattgcaatttgactgccttgtttgggggtcaatttcttgttttgttcaaatttatcatgaaaacaagtatttccttgacttctattttggtatattaaacaggcaa

SEQ ID NO: 28311 - DNA, 277 bp, Medicago truncatula
  Intron number 1 from transcript Medtr1g076880.1 (locus Med tr1g076880) derived from phytozome v7.0 (chr-ID MtChr1; po s 15488084 to 15488360)
ggtatgtttgtgttgacctcaaagtcaaactactggatgcatatgtagcaggcttttgtctttaaaaaatatttatacgactattttgtaacaatttttatatatttctcttacagttacattgtatttatatttttcttttctcttttagctcttggttgtgtttgttttaaaataataaagtacgaaataaataattgttttaaaaattgtttaaaaataattgtataaatatcatttaggttggtcttccattgctaccaccatagttataccc

SEQ ID NO: 28312 - DNA, 602 bp, Medicago truncatula
  Intron number 1 from transcript Medtr1g099420.1 (locus Med tr1g099420) derived from phytozome v7.0 (chr-ID MtChr1; po s 20304213 to 20304814)
gaaaacttcttgctgatatttttccaaaatccccggttcatgtgttatcatacctttttttaatgagttttagcgaatgatttaaatttgaaaataggagtaattgaatgtaaccacgtgtgtcgcacattggacatgcattcgatttgaaatgtttgtgctgatgctctttttcaaaaccattatgatccaatagaaaaacaaaatgttagtaggcaatgtagtattcataatgctgtcttattctaattgcaaggtgaaaattgtttttctatcctcaaagaaaaattgaagcttgttcttcactgatatagctttattactattttgtatccccctacctttactaatttaataaaagcagtcacgcctcttgccaattattacaaattattttcaattgtcacatgttgtaaagtaacctaacctgtattgtcattctaatcaattgagcatgcttgttggtgaatcattttacgaaattatatatggccatatcttttcgctttaccattgatttgttaatgccgttgaaccctggtattcatgttatacaatacttctcaagatgagcttccaaacgaaaggaaaattgtcaaatt

SEQ ID NO: 28313 - DNA, 817 bp, Medicago truncatula
  Intron number 1 from transcript Medtr2g049500.3 (locus Med tr2g049500) derived from phytozome v7.0 (chr-ID MtChr2; po s 13530290 to 13531106)
cttctgttacttctgttaatccttccaccaatcaggtcacactttttttcacttttttattttattttaattttttttaaaagtttttttttttttcttttgcaactttgcatgcatgaaagaactgctgaattatgaaactttgatcttaaaactgaaattaaagtgtcataagtaaagatttttattaaatttagatgtaaatgtaaatgaaaagaaagatagcttagtgaggactccctccaattctaattataagcaaaattgactctttaggattcattcaattaatgatgtatgtggtttattgtgaaccacatacatcattaattgaatgaaactaaaaaatcaattttacttataatttagaaacggagggagtatagcttataggacggtccagagtttaattctggacaattgtaaaatgatcattaatattatcttaattaataaaacgtttcctcttgcttaattttgttttttaatttaaaagggaagatatattttttattttttttagtattttttgtttttgtttttactaaacctgagtgattaatgaaagtttagtgaatttggatttgatcttgattgatgattgaaatacaagtgcatatttggatttgcaatgaatttagcagaatcacggtgtttttattgtttttgccaaaattagttggatttcaaatcaatccaaacaagcagttagttgttttcatggtttttggcaattttggatttcatttttatgtatctgattgttgttgctttgaatttagactattgctacggtgacggaagcaactgtgataga

SEQ ID NO: 28314 - DNA, 740 bp, Medicago truncatula
  Intron number 1 from transcript Medtr2g008960.1 (locus Med tr2g008960) derived from phytozome v7.0 (chr-ID MtChr2; po s 1857019 to 1857758)
aaaggtagaggttgtagtgcatgaccctttttaaagagcaattaaatttaaagcgttgattttgatcaaatggttcagattaattcctctcattctaacagctcttctcttttgatatgccatatatatatatatatatatgggaatgctacaacacacccttcaatttatatgaaggtgtgtgttagcatagaacacctttttgttaggacaaaactaaccaacattcctttttgaaaataagccaagctgaagggcaaatatgtaattcagagattatttttaatattattactattattccagttattctctcccttctcgtccaaaaaaaacaaaaattatcttcttcctcaatcaacgcaggtgcaaggaaagaaaaaaattggggtttctcacctaggatcactgtattttaattctctaatcaacaccaagttctcttattattcaattgtatgtatgctttcattagacactttcctttaaacaaaaaagaaactattttttttttttttaatgttttcatggaagaaagaccaatcgaacctaagaaaaaatatacataagataagagaggtgttcctgttttggagaattagacatcaaattttttcttcaaaattgtccttttcttctatattctttctcgtttctgacttgtaagtctgaaatccatgagagcctaacggagtgatggtggagggtggagagagagagagtgaaatttgctccaggga

SEQ ID NO: 28315 - DNA, 212 bp, Medicago truncatula
  Intron number 1 from transcript Medtr1g042160.1 (locus Med tr1g042160) derived from phytozome v7.0 (chr-ID MtChr1; po s 9581663 to 9581874)
aagtcgctatagtcccaggttcttgcctccttcacgtatccaaaagaaactttgattttcttatcactatattgttgagtaaaatcacaaaatccttttaagttgacattttaataataataaacttagttgaatataatatcatattgattatgatatgttatgttttctgacaagttttttatagtgttcttcaaaacagggttgtgcaa

SEQ ID NO: 28316 - DNA, 519 bp, Medicago truncatula
  Intron number 2 from transcript Medtr2g011180.1 (locus Med tr2g011180) derived from phytozome v7.0 (chr-ID MtChr2; po s 2832322 to 2832840)
tccgacatacgtcagtgttcaacatccgtatgacactcatataatacatgtcaaacaagtgtttcaaaaagaaaacaaattttttttttttgttttgatacacttttactcttagacattcctatggcgcttaaaactgtgtcgaagtagtgatggtcaatgaggaaattgaagatattaaattcaatatcatcaatttttattttttattttttggtatagtagatgggatgaatgaggtgaaaaattgtcatgtgttgtttaagaactttgtaccaaatggctcaatttagatattttatcgaaaatattcatatcttacttaattatataaatataaatgtcctatatttttaaaattgcaatatagacatgtccgtggctatgtttatgtcggggttcatacttcatagctcaaaaccaagaaaactacatactagagtataatttatggtatggtttttgagtaaatataagataccagaagatagcttccagtaagttgagggcatttggagc

SEQ ID NO: 28317 - DNA, 689 bp, Medicago truncatula
  Intron number 1 from transcript Medtr1g121070.1 (locus Med tr1g121070) derived from phytozome v7.0 (chr-ID MtChr1; po s 26308074 to 26308762 reverse strand)
ctttgttcttgcgtatcacacttcttacctagcccccaggacatgcatattgttagagatatatgacgtgctattagactctattgggtgtttggtccttgttaccctcattcttcataatcaagttgagtttacactagatagtgtttggtccttgttaccctcattcttcataatcaagttgagtttacactagataaaattgagctatgctagtacatgattcgagtctataatgctcttgcatgaagtggatttttcatctaatttctaatgttacttggctataccaccctttttctccaacataattgatttttgtaccctaaacaggaaatatggtagctgaacaaatataaaaaagattaaacacaacataattgaatgtttttcgcttttatcagagatgcagttaagaaacaaagaaaggggtgggaaaggatagatgataggtaaacaggacaaagacataaggaaagtcaaaatttctgggtattgaatcatcagcctgtatgtattttcttggtgcatatatgaatttttgtgtgacatacttggatattcccaattacgatatgttttttttttgtactagcataatgaaacattagttccttttcctttctgttactgtctccctcgtaaatatgttgccttaataatgtcacaggagcttcaatcatatcgtt

SEQ ID NO: 28318 - DNA, 670 bp, Medicago truncatula
  Intron number 1 from transcript AC235748_6.1 (locus AC2357 48_6) derived from phytozome v7.0 (chr-ID AC235748; pos 19 109 to 19778 reverse strand)
tatcgagttggatctcactggtggaggagttcgaggtgcaaagaaaagaatacgacattgatatgtgataatcaaggtcttttttttgaaaggaaggtcgttaatattttttttttaaggaaggaaggtcgttaatattgtgtttggcatatgcgattgaaacaaacaggtctataactatattgatgtaaatagtctataatttagattaaattagttattcaatgaataaaaaatttgttttttgtttatgataatgatcaaaaggcgtatataattattttttttgaattagcattggggaaaatcgaacatgagaccttaaggaggagcacactcccagatcccaagcaaataccttgaggagtatataattatctagtttgttgttttttccttattaatgactagagggagtatataatttttttttttttaataaactagagggagtatataattatctagtttgttgatgaatagtcaaataaattaaacaatacacacttttttttttgttacaaactatacgcaatttgagttcaccctttgtatctcatatttaatatttaattcatgaacaagttatgttgatgaattgtcaaataaattaaactatacacaatttttggtagaagccagtttcgaaccaagagcttcaaggttgaaa

SEQ ID NO: 28319 - DNA, 811 bp, Medicago truncatula
  Intron number 2 from transcript Medtr2g008340.1 (locus Med tr2g008340) derived from phytozome v7.0 (chr-ID MtChr2; po s 1521159 to 1521969 reverse strand)
aggtgtgttataatatttaacaacattaccttttcattcgttatgcatggaaggagtggaagttcagtaataaatactaacatgccttagcataagtctcatgtttaacttggatatccatcatacaaaatgacaacaatatagaaggccgtgttagtcatagcattcaagtaggatagttgaaacccataaatgtttcaagttttaagggaagttttaccacttaactgtaagacattctatgttgtgtgtacggaacaaaatgcagggcagtaaaatgtcaacgggaaaataagattattgttgctgaggtgagaatgctatgctggatgaggtgtcatacatgacaagatagaattagggaaaaagaatcggtagttcctttatagaaacggcggtagaatgttactcaggtggtttgtacatatgccgagaagtgcatagaagcacctttaataagggtagatctgatggaggataggttgttagttagagataaagaagatcaagagaaaacaataaataaaacgaatgagaaagatttttagtcaaatgttctatctttagatatgaattatgacagttgatttatatcgttgtttggtaaatataactgactacacctaatgaaaaaatctttagttgttgattattgttttacgtgaaagaaaaaaaaactgcatctagtatacaaactaaaattgttgaactgttataactttgggtcccttgccctcaaacattgtgtctaagtttgatttttctctctcatgtagaccaacaaactgtccagcaatactcttgttggata

SEQ ID NO: 28320 - DNA, 550 bp, Medicago truncatula
  Intron number 2 from transcript Medtr3g077390.1 (locus Med tr3g077390) derived from phytozome v7.0 (chr-ID MtChr3; po s 18235064 to 18235613)
ggaaaaatattctgtagctatttaccatctatttaccttgagttctttgcttccattttgtagtcaatgacaacccaaatatatgtaacaattggctcgaggctgctcatcaacctacattatccggttgttgagaagtttaagacttagtaagtttgcattatgatttcacaatacagtgttagagtaaattattatttcacaatttgatttgattgtttttaactatgtttcttgaattgttgtcgtgaccttaacacttctcaagctcagagtgaaagcatcagtctgaacttaagttagagttcggcttcttctcaatgtattattacaacgatttttccaatctgtctcaggttaggccaattgttgaatttataaacttagtcaaggtctgcttttttttatgcacaaacatgctttgaatttttttatacacaaattaaaaatatatattgcattattctttatttcacgtgcataatttgtgttaggatacatattgcatcactatttggaaagcaactaaattcaatcctaaccagtttgg

SEQ ID NO: 28321 - DNA, 783 bp, Medicago truncatula
  Intron number 3 from transcript Medtr3g142720.1 (locus Med tr3g142720) derived from phytozome v7.0 (chr-ID MtChr3; po s 36649233 to 36650015)
tctccaattcctacctcattttcgttaactgccaggtaccacacactctgtttttgttttaatttggggaattatgatttttaatttgttttttggattggattatgtggttttgatttttcaatgcaaatacttgagtgagactgtattttaatcatattaatattgactttgttgtgtgataaatctgaacctaacttgttgatctggtttggtttatgattataatgatttgatgtttctttatgacctgggtaattaattggtgccgtgttttgaaacattctgttttgcaagtattcaataactttatatgcttttagtaaatttgttagaatgtgtctccaaagttgcataccggacactataaattgtaaactttttttttatccgcatattgttattaaggaagtttttattattcagaactgattcttagcttgtgtttggattggccttctcgtcacaatagttatatcacgtcacaatgtacgtttaacgttaaatttaagaaggtacaaattgcggctttggattgccgcatgtctaaaggagaagataacatgcacacaaacacatttaatacaataatataacaagaaccgtccttgcatgtgtcgtccgagtaacaaccagacattgaagacgctatgtttctcttctttacctatcattccgtgtaggtatttgctatttagttggtcagttgggatttgaaacagggattttattttttgtgggatgattttttatacaagggatttggcttgagtgaaataagga

SEQ ID NO: 28322 - DNA, 338 bp, Medicago truncatula
  Intron number 1 from transcript Medtr2g091060.1 (locus Med tr2g091060) derived from phytozome v7.0 (chr-ID MtChr2; po s 20446610 to 20446947 reverse strand)
caatcgtgtggctcctgtgcaaccggatcttttaggtttgggctttaggtttgggctcaagtttctttttacgtttttttgcttttttgctacctgcaccctgttcttctttgctatttgaaccaatgttttgattaaaaatcttgataaatttcctagaaaatccatgcttacttcttgacattttcttgatgttttatggtatttttgcacattggaattggcaaaattcttgtatgattaatccatggcattttaattctttcttggattatttcttatgattgttttgtcaattctatcattgatttgtgaacatgtgataaaggccatttgat

SEQ ID NO: 28323 - DNA, 572 bp, Medicago truncatula
  Intron number 2 from transcript Medtr2g007370.1 (locus Med tr2g007370) derived from phytozome v7.0 (chr-ID MtChr2; po s 1097813 to 1098384 reverse strand)
atactgtttcagtcttttctttgcggtttgtttgggtaagtaaatattattatgaagtagttttgattactatgttatgttaacttgctccttaattatcctttgaatgaagcttttctttcttttctgtttttgaagagaaacaaaatgtcgagtctgcatgtactagtagagtcatgaaaatactttgcatatgatctcaactcgtgttggaggttcgatattgtgtgtgtatgagcgcgcatgtgagcatgcatgcgtgtgcgcaaggacatgcaacaacacactttgcatagacacgtaatggtataaaccattatggtacacaagtgctatcccataaaattatcgtgacgatcatgtgtgtgtgatgttggtgtttgtttaggtgtggtagcctgactattttacttttccaattactactattttttgtgtgtcaatttgcatttatatttcttagtttacatatgcatgttctttctaaataattgttactttatttaaaggggctaaggctttggtttccatatgtagaggatcatttgtccaaaatttctacttagaatcct

SEQ ID NO: 28324 - DNA, 385 bp, Medicago truncatula
  Intron number 1 from transcript Medtr3g151500.1 (locus Med tr3g151500) derived from phytozome v7.0 (chr-ID MtChr3; po s 40195234 to 40195618 reverse strand)
ttatctggtagatccaaagtgtgaatcgtctcaaggtattgttgttgatcgatcgcattctcgttttgattattcgatctgtgttattcacattattatatgcgttttttttatcaaaattcttattcatgttttgattcatacatagatctgagtattttttatgcatgatgatgtataatcttgtaaaaatatcgtatgatttgtttttttcttcgttttttgcattctgttattttgtgatttactttgttgtatgatgcatgataatagatatgaatcacttatcgaaagctgagtttttttattttctatttttaatatatggattgaattgaattgagttgagttcgtttgatgcagatcgaacggtagctgttgaaga

SEQ ID NO: 28325 - DNA, 645 bp, Medicago truncatula
  Intron number 1 from transcript Medtr3g009800.1 (locus Med tr3g009800) derived from phytozome v7.0 (chr-ID MtChr3; po s 1562297 to 1562941)
tcgtttctccgtcgtccttgctctttgcttcaaaggtgagtctattctttcattactttgctgttacaacatcaagaatccctaaattaattttaaaattgcaaccttctaattatttggttatatgaaatcttctaatattgatacttatgttcatctcaaggtcgatttgtgcattgtatctcttcttctttttttaatcagttttttttttaatgattatttgaaaaccccttttgatctatgtgctaaaaattgagttttttttgttgggtttgttgaaatctgaatagtagtttgaatttgataaatattgctatttaaacatgtttaatgattgttgtttttttaatttatcagagtgatccttggttctgagtatgcttgatgataatttgctggattctattgagtggtgaaatggtgattgattattgagatgttagttatttttagctgtatataatttgtgttttttggaatttggtatttgattgatatgtactggtttgaaaagtagtgttttttgttggaggaatagattgtttgattaattatgaattagttaggatggatttgcagaataatatgcactattcttatatttatgttcatttcaatttggcctaatttttgcagaataat

SEQ ID NO: 28326 - DNA, 535 bp, Medicago truncatula
  Intron number 2 from transcript Medtr1g064780.1 (locus Med tr1g064780) derived from phytozome v7.0 (chr-ID MtChr1; po s 12661932 to 12662466)
aagttctaaaacgtggctacaacttcatttttacggtaagtttctttagtgcatgtttggatgagagaactttgttagaataatgtaatctcatagggttgagtttattaaaaatatctgttgaaattttcctataaaaaaaaaaaaaagaaatatcggttgaaattgtgtgtttgaagattcaaggacactaatttttcaactcaaagaaaaacactaattttgtgttttctaattaataaataaatattttgactgaaagtctagttaattgtccttgctaattaagcaccctaactacacatcaacaattttttacgtaaaatgaaaaagaattaaaaatattgtaaatgctttgaaagttttttgaaagataatgactaatttatttaaaaaaaaaaaattagataaaatattgcatttttttgccaaaaatattatttattctcacttcacttgtaactgcattttcacctatatttttatttgtgtcattccattttctaatatccctaattcaattttcaggacactg

SEQ ID NO: 28327 - DNA, 444 bp, Medicago truncatula
  Intron number 1 from transcript Medtr3g037090.1 (locus Med tr3g037090) derived from phytozome v7.0 (chr-ID MtChr3; po s 9965537 to 9965980 reverse strand)
acaagggtattcaaaatccattacagttgaaaaaggttatacaaattgaagacatacatttctcaatttaaaatgttacattaattatattttactttgtgattagacctaatttatcaaagttaaatgtggtaatggtgaattgggcaatgcattattttttttctcgcatatcattgagcttacaaattaaaagaaatagaggaacggaaaaattattaataactaaggtagcacttttataattgagcttacgtatcattttacaattgtcttctataagatttaaatttcgttccttgaagatcacaaggcaaactcttatcactgaactacatctcatgacatgcaaaatcaacaaactagttttataacacatgtatcacaataacaaaaaaaaaattatagagcatatacttataagtttgatttttggtctagaac

SEQ ID NO: 28328 - DNA, 545 bp, Medicago truncatula
  Intron number 1 from transcript Medtr3g087570.1 (locus Med tr3g087570) derived from phytozome v7.0 (chr-ID MtChr3; po s 20896958 to 20897502)
ttgttggagagctgtccctaagctagcaggtctctcctttcactccaataagatcatgaataatgttgttcccacatcaaaggatgctggaaaacacctctaaaataccaaaataacctcatcggcagttaactgctgatggattttaaccggcggtagttagctgccgaagaaaattgggttaaattggtgtttctgctagccttcacaataataaacagcaattttctaagatcattgttaaaaaatttatattttggtctttgttttcaatttctttccatttttcaaagacaatgaaatcaagcatttaagatgtgaaatagttttaattatgcattttgattatgagcaagtatgaaatgtttgagcttgtatatgtttctttaacttcattattttggtgaaatggtaaagtaaaaaaaaaagtttgcatttttaattgaagtggttagtataaagttttcaatactttgaccttggtctaaaaattgatatgaattcatgcagggttgttaaggtgtggaaaaagttgcagattgaga

SEQ ID NO: 28329 - DNA, 729 bp, Medicago truncatula
  Intron number 2 from transcript Medtr3g087570.1 (locus Med tr3g087570) derived from phytozome v7.0 (chr-ID MtChr3; po s 20897582 to 20898310)
ctcaacttggcaataggttctttctatatccatttactctgttttctctgttttgcatgctttgtagtaattctttgaaagaaagaaaaaaaaaacattttttttaactcattaataaactaagatagtgctctattaaaatattagactaggttcatctaagagaactatttaaacatttcttaatcatgccaaatacaataacttaatagaaatgtaatcatgtcaataatacacgctcttcatgttgcaatttgtttattcatcacaaaaagaagacatggtcccataatatattgcaattagaaggtgtatgaaaattgtgtaccaagtcttttttttgttatgtttgtattttttttttaaggtaaaagaaaagaaaatattcatgattgctgttctataaagttgactccaaatgggaatcgtaaatattgaataagtttaatgaaagacatgtttgtcttataggttaatgtttttatttctgaacttctatgacatttgtttaagatggccgtgaagtcattattccttttggaccttatgatgaaatcatttctataaaaaaattgctagggttacttttattactttatagtggtctagctcaataataagagtatgacgttgtaattttaagagtcagagttcaaatttcatccgatagaaatgtaaaatgattattaatgtcactttgattaatattaattcttttttcttatgcag

SEQ ID NO: 28330 - DNA, 933 bp, Medicago truncatula
  Intron number 2 from transcript Medtr3g076510.1 (locus Med tr3g076510) derived from phytozome v7.0 (chr-ID MtChr3; po s 17694588 to 17695520 reverse strand)
gataaccacaaacaggctatatttggtatcttgtgagatgatttgcctccttttattaccgagtttttttttgtagagacctcatatattgtttcgccaatcttcatacttcattaggttctttatttttgctgttttgactttgtgctttttgagggttttggtttgcccccatgtatatttatcctctttttttattatgtatattattatggagtaggcggtattggattgaggttgattagaggtatcaaccaagttgagatgtatgacctttccactattagaatctctcgatttttctgcggaattaaaacaaattttataaggagagcttttggaattaaaaaaaaaataacaaaatgtttattaaaagtataatcaattgagttttgttgaatccaagattatttgaacttaagaccaatatgatttaagaccttaaaattgaccaactagctagataaatattgattgttagcatgtcatattatatatttatagttaaatagacttattttgaggcctttttattaacccaaaatcttgaggcctaaagcccttgcttggatggcttggcccttaggccagccctggaattcacaacacactacaaggacaaaaattagttgcatttttttatgtatgttcttaactaaatattcattttttgtggtaataacaaactttgagacaatcttgtaaaaaaaataaaaaattgagaaaattgtgaatttaaagaacaatcataccaaaaacatctaaaaaaatgaaccaagttttttccccatacaaaattaggtcaaacctgtagtgctcatagccgtgatgtttttttctctaaaatcgaaatccttagggagctccattctttttactcttgttcctattttgataggaaaattagttatcacaaagctatcgttcttggtg

SEQ ID NO: 28331 - DNA, 813 bp, Medicago truncatula
  Intron number 1 from transcript Medtr1g124970.3 (locus Med tr1g124970) derived from phytozome v7.0 (chr-ID MtChr1; po s 27407337 to 27408149 reverse strand)
tggggcacgaaatatccgaagtactcccctgcctctcactttctttattgttgaatgtctgtatctatttgttttgataacctgatgtttttattactatgttatggcacaattgctgtgtttttttttgttggggaacttgacattgaccaaaatgaaaagggtagacctggaatctgtttaccaggaaattactgtattagaaatttcttcttagtggttctactttttctattttagatattgattacgattagtgaccatattttgttttgaatgtgcttatgtgtatctctatagcattgacacttctaatcaaagccgtgtctggtgtccgacaccatacacatgattacatttgattatgtcactttctctaattattaccatgttaacgtgtcaatttcgtgattgatgtccatgtcagtgctttgctggggtgtgtgtatagtgtcgtgttcttcatgtcattgctttgctggtgtgtgtgtgtgtgtttatgcctagatgtgctgtcctttcactgaatggcccgagtatgttctctcatagtgtgtgcttgttttattttatcactttttcttagaccatgatcggcatttatttcacactattgcagctttctgccgacatgattggataagaatggagttggaattaatctttgaactcataagtttttagttagcatagcttgaattatgttcgtttacaattataggttatctttacattatatactaaaatgctatttgagctctttgtttcagaaattcctgaaagatttataacttttgccactgtggttgcaga

SEQ ID NO: 28332 - DNA, 968 bp, Medicago truncatula
  Intron number 2 from transcript Medtr1g013740.1 (locus Med tr1g013740) derived from phytozome v7.0 (chr-ID MtChr1; po s 2640506 to 2641473 reverse strand)
gtcggagctaaagttaacggtgaatctgggaagaagtaagttttatctattgattttgattgatatgatgtgaatattgtatgctgaactagtatttgttaatttgaaatattgggtttatttatattttgaattttgtgttgtctttgttatgtaagatgaattgtaagcatataagggctgtttggattgatttatttgaggttttatactgacataagcacttctgagactattgtatgctgtgctaggtttgagtaatttgaaagtttgggattttatgttgaattttgtgttggtttatttgagcttatatacctacatataagagctgtttggatcggcttatatgaggttttatactgacataagcacccgtgaaactattgtatgctgtgttaggattgattaatttgaaaatattgtgattttatgttagaattttgtattggtttatttgagcttatataccaacatataagggctgtttggattggcttatttgattttatagactgacattatgttcaggacaatttctgaaaaagctaatgacatgtttatagactgttttcagcttattttcacaagctcttcaaaacagcttattgcttatataaaaacaataactttatcttatattttgttatagaaatagcttatacataagcaactcatgctatcaactacaaattaagctgtttatctttatccaaacagggccatattaattttttttcagtttgttttatttgggcttaaattgtcttgtccgttattttatctggaattgcatgagaaaaagaaattcagcatgttttgttttactgttttgatgaagttagatgtgtgcagttgctaatttttcatttcggggtcaaacttttcatttcggtggaattaaatttgatgctgtgtatttttgttgtattctttcttaacatttattttggcttttttcaggggct

SEQ ID NO: 28333 - DNA, 575 bp, Medicago truncatula
  Intron number 1 from transcript Medtr1g107070.1 (locus Med tr1g107070) derived from phytozome v7.0 (chr-ID MtChr1; po s 22507824 to 22508398)
gagaagttggagcaaatcggcgaaggcacttataggtgcgtaacttttactaattctaaaaatgctatcttgattcacataggttattttattgaataacaataatttgtgcttcaatttttgtagttctgtttattgttactttgtttgtgtacgtgtgatgtggttttctttggaacacaatatatgtctgatttgattcagttgacatttaagcgagaagattataatggttttatagttctactttgatttgctttttttgttgtgggaggtagggtattaacgtgtacttgggaagcgtatgtattcaaaaaccacatgtctcgtgattacttatatgttgaaaaccacttgtggccattcttctatgttttagactttcatatgtgtactgcttgtattgttttcctacacttcaatgtagcacccataccgctacactactataacgttttgaggattggcagctacactattgctactgactacatttgagtcttgttgaagaggtgggggttcagatttccgataaggcaggtggttaagagggaaaggtgcaggcagggaaggat

SEQ ID NO: 28334 - DNA, 1012 bp, Medicago truncatula
  Intron number 2 from transcript Medtr1g024490.1 (locus Med tr1g024490) derived from phytozome v7.0 (chr-ID MtChr1; po s 5819874 to 5820885 reverse strand)
ggaacaaggtatgtattcttacacaaaattttgcattacattaaaatggtaaaaatcaaaagtgagtagtgattattattacttgagttatgattaaaaacgtttatgaagtaaaaaaaaatagtaaaagtaaatttttgtaaaaattttactgaaacgcgccaggtaggggtcgaacctacgactttctgcttaggaaacagacgctctatccactgagctacaggcgcttgtttgtttttgtttctgttagtatttgaattaaataatgatgatatataaatgtgtttatttgaagtttatgatgagactttttttttctctctcttttattaatagaccaattcttaattaatcttttccttttagtggaggacggttaaaattatagtcaaattatattttgtttgtgcttcaaaactgtagcatttttttaaggaaaaaaattcataacatgttaaccactacattatgttgcatgcatgaccctaaccaaccactgtatattgacttgttctgttagtagttacttgttttgtcagcattaatttggtctttgtctcaacataagcttgttaatattagttcaacatcttggtctacccaacccaaagtcttgttttctaagaaacacttttcctacgttacaatcaaagttgctttttcaattctttgatgaaaaataatttagattggagaacacacacctcttgtaaatttggaccaaataacaagtatctttcaaattttttacataataaataaatttaaaaatcttatcttatcttataattataaaagtcggtcatatataatcttgttagagtgtgtctaatatattttactctcttcgccattaattgatactattatcttaaatgaaaagatatttgttttctttgttaaattataataacatagataaaaaaaaatttgaaaacaaaataaaactataacaatgtaaataattaaataaaaaatagtgttgattttgcagggattgacaaagtat

SEQ ID NO: 28335 - DNA, 748 bp, Medicago truncatula
  Intron number 2 from transcript Medtr3g080500.1 (locus Med tr3g080500) derived from phytozome v7.0 (chr-ID MtChr3; po s 18967963 to 18968710)
gatcacctttcgtttctcctcgacctcataagaaagttagaggtatttttcagttttttttcttttctctttttacatatacatattggattgatgcaattttctatgtaaaaagaatattgcacacaattaaattattagagaaaaatattcacatgtgaatcattaaaatgctcttttttagacaagctacctccaggaccttgcatgaaattttctactggtaaatgttaatagttagcaaaatttgtgattatgttactttgtagagttacaaatttgaactctttaacattttgattagaactctttcagcattacgtaattcactaaccaagctgcgtacttagagtacctgtcaaagcaactgattagttctccttgtagttttgatatggacaatagtccttttgttttatgattcaaaaaatcaagcgaaattttggaccgtccgatattgataaaaacaactatcgatgttctgactgtggtgtggtaccggctgccatttgttttagggtcatgttaacttgtgcccttaaggcacatgttaagctttctacaaagagcaagtatttattgagaaacattaaatttcaatcttgtgagaagtaaatttgcacaatttacgatgcataatttccatctttggaaccttaacatatgtccaagttaacatttccctttgttttatattccacacatatatgcaggtgagattaagaaaactgctaaaagaacttcatca

SEQ ID NO: 28336 - DNA, 935 bp, Medicago truncatula
  Intron number 2 from transcript Medtr2g071460.1 (locus Med tr2g071460) derived from phytozome v7.0 (chr-ID MtChr2; po s 16431199 to 16432133)
tcactgttgatccggcatttgtcgatgtacgcaactttctttttcaccctttgtaatgttgttaggattatatttattactccctcctttccgttcctttataattgtcacttttgcataaatattttgtttttaattaactgtcgttttcaaagttcaatgtatcattaaatgtgactttacctatattacccttatatatttattgcatagagagaaatatatgaaatgaagtattaaatgattaaggatattataggaaaaggataaattgttgtatcaaaagtatttgttgtcttggtttgtgtaaaaagtcaaaatgtgacaattaaaaaggaacagagggagtatttatttcaaaagtaactattatgttttttcttcaatgttttataagagatgatgcatttcctcaaaaaaaaaaaaaaaataagagatgatgcatgttaggttgtatacttagttttaagttggtttctacttcattgtagcatgtaactaataatcttttgtatgcagtcacctcatagttaactggactgtgagtgacataatctgtgcaattcttttttctgtcctcgatgttccacgggttcttcctcacgtcatatccagtccaaatttttccttacgcatttctgtaataattttatattggttaggctccggttgaccttcgttcttgttagagaaacatgtactaaagtatgagcaaaagccgaggaggctctttaaaatacgatattttacatcattttctaaactccatgacattattgttttagttatctaagcatgttaaaaaatataactgtatgatgatacttttacatttcaaattctaccagtagttctaagtcttacatttctttagtaacattgtacttatctcctttttttctttctcctcatgtatcgctagtttgttggcaccg

SEQ ID NO: 28337 - DNA, 765 bp, Medicago truncatula
  Intron number 2 from transcript Medtr3g039870.1 (locus Med tr3g039870) derived from phytozome v7.0 (chr-ID MtChr3; po s 10692942 to 10693706 reverse strand)
atcaaaggttcgtgaaattcatcacattcattttttcttcgatttttttattttcttctttttagaatttttttctttacggtaatagttagttacggttacgattcgtagtgtagacgacgtcgtttcaatcggtgctgtatttgtttacggtaacggttctgaatatttgaggacgtcgttttactctgattactctgttttttgaagttgcaacgataactgagaagttccattccaacgaacgaaattcaaaatctacaaatagaaaataaatgtttatttctcctaattttttattcaatattttttcttcttttaattttagctgaaacgacgtcgtgtggttctttgctctgttttatgattttatatcggaaagtagctgcagcaccgaccattctgatggaaggtgttcccgacattaagcgtgtgtcagtgtttgacaccaatccgacactatcatacaaacacctaccactaagttattttctcaaatcattatctgtatagacattttctatttgagtcttgtgtatgtgttagtgctttctattgcacggataacagattaatttcttttaacagccaaaatttctaataaaataaatacgttttttttctctatttttttatatttaatttctcttcttttttcttctgattttacgtttttagttgctctgttttgtaattttggagtacttagttttttgtggcggtggttgcattgtagtggaaagttaattccgagtggaatcgctg

SEQ ID NO: 28338 - DNA, 968 bp, Medicago truncatula
  Intron number 1 from transcript Medtr1g025680.1 (locus Med tr1g025680) derived from phytozome v7.0 (chr-ID MtChr1; po s 6406280 to 6407247 reverse strand)
gtactactttatcacaaggtacttgtttgttacatatattctcttaaggaagtttatagatgtctaaaaatttaatttgttatgttttgaaaaatgtcttttattgaaatatttatttatggataaatgatgaggggatgatattttctctattggttatgcaaatgcttccaaggttttcaatgaaatgctgctttttcaaaagcaaaatcacgagcaaattatgtggtataggttgcctacaattcattcatgttaaggaagaatataatgatttttgtggtccaaatgcgttaactgttttaggggatgtcttttaaatttttgctcaacttcttgagtgcatagattcataactaaaaaaaaattaaacaagcagtaaatgttactttatcaaagttgaagaatttgaatccttaactcatttagttattttatcactatgagaaatgttgtaccaaacagaatcactgtgacaaaagttgtaaaaaataaaataaaaaatcactatgagaaatgttactttgacaataattacaccaaatttgtacaaatttagtttttatttgttttttttttttttcttttcaaagtcacatctataattataaatgatgtatatttgtataatatcaacttttttatattcaaagaacattagtgcatcactattcttaaataaaacaatgttatttcaacatctaaaaatcaacaacaaatttgaaaatcgtataaaaatatataatttatcagtaatgatatgactagagaagagagaaaaaagcaataaaaatccaaatgacacctaatctgtataaatatacggtgttggacaacattttagtcgtcaacttgtcattactccataattaaacaaccttattgaaattgttaatagtattttattatcttggtacatatgaaatatcacacaaggagagatttggtttgtgcaggaaaaagcaaca

SEQ ID NO: 28339 - DNA, 579 bp, Medicago truncatula
  Intron number 4 from transcript Medtr1g103500.1 (locus Med tr1g103500) derived from phytozome v7.0 (chr-ID MtChr1; po s 21570810 to 21571388 reverse strand)
tacttcagctcactcgtaatgattagtcaatgtaatcgcctcatgtcatatctaggtatatgcataatctctcacccccctaaacattaataatcaggtaaaaagtatactttgatagaagaggtgtgaatgtgctaactctgggaatacttgggctttcttggatcattaatatccaattcatttttattgggctgtgcttgactgtttatcattagattaaactttacttgaaaatatgtaatcatgagtcatgacatatggttaaaattgttggaggtatggtgatggtaatgacagataaatctgtagcattttagcttgagggatggcatttcatgaacacgagtacaggaccgtgtttcttgaattctgtaagtgctgcatggtaaaaagatgcagtagtagtccaaccttttccccccaaaaatgttattttttttttaacttgcctttgtttgaattcaacttgcttgactaatttgttgatgatgatttgagctttgctatagcctggcattttttagagggttgatattgagatgtttagtagcaggttttccaacgtctactgattaa

SEQ ID NO: 28340 - DNA, 661 bp, Medicago truncatula
  Intron number 1 from transcript Medtr2g100560.1 (locus Med tr2g100560) derived from phytozome v7.0 (chr-ID MtChr2; po s 23462908 to 23463568)
agacgtggacgcttcctccatcacataacaaacaggtttcatcatctctctactaaattcaattcatcactatgatctactacatagattaattactatatatatttatatttcttgtcacgttaattcttatcttcacatgcatggtacttttctttccttttttatgttatcaatgttttaacaaacattcattgttttctcctttttatgtttgattcttttcacgatcattttctttccctttcaagcgtttttggttgaacacatctatcaataataacagtttcaacaatttgattatttttgtttcagcttagatcgttgttttattttttttcattgtagagaaatatgttcatgtttttgttttttcatgacaaaaaatatattcttgtggaagaatttagaataatatttaatattcattggtcaatttcttcgattatttttatgctaatgtttgtctgtatggttagttttgatcattaaattatcagtttctttattgatgcgttacccgtttgattttgaaactgcaatttattagtatataattaatatcacttcaaaaatatttgactgcaattttattgaaattttaatttttgatgttgattcaacagaaaattattcatcagtggcttaaagattattcaga

SEQ ID NO: 28341 - DNA, 804 bp, Medicago truncatula
  Intron number 4 from transcript Medtr2g100560.1 (locus Med tr2g100560) derived from phytozome v7.0 (chr-ID MtChr2; po s 23464649 to 23465452)
gagagctttgccaactgcatttaaactattcactggttggtttctttacaactttatttctttgtccatataatgatgagtttaaacttgccatgctgtcagtgtaaaaagtttcaacgaatggtatttatgacttcaaaagtagttgcaattacagttatatgtttttaatgatctaacaattatgattgattggagttatatgctatatagtttgttgatactacttttctgatacttcaaaaacaattagttatctggttcctttaattgtcttctaggaaacaggttcttaagacacaattacaatatatgcatgtgtcatttataacacataatgtttttacaatctgtgaaatgtgtttgttttatgaaagattccccttttgtacaaacaataggccattcacctattttaaggggagcgaagattgatcaatcttaagcaagaagtcaaacaatgacccgtttagtgtctgtttggattggtttattcgagattatctattggcataatcatttgtgttactgtctgagagagcttatggaaaccacttatgacgtccataagctgttttcagctgatttgcataagctcctcaagacagcttaggaaaaacagcttgtatgatgacacgtttactttattttatcttttattatagaactagcctatacatgaacacttatgataagtgtgtatgctataagcacttaattaagttgagcagggcttagtgtaacctcatttacttttcaaagtatttttttgttgaattattgtagcttcattgtaggttcagc

SEQ ID NO: 28342 - DNA, 394 bp, Medicago truncatula
  Intron number 1 from transcript Medtr1g126920.1 (locus Med tr1g126920) derived from phytozome v7.0 (chr-ID MtChr1; po s 28402368 to 28402761 reverse strand)
atttaagtttcatccacaggaatctttcattcaaggtaaagtatgtttgagacataaatgaaaatttagtccgtttcatcatattgcggctgactaggattgagagaaattcaaatctcacgtagagtatgcagcttctattttgattcttagttccatctatacaaaagaatcattcttggtcttttaatgtgatttaaaataggaagcaacaattagaaatatttgaagcataggttccgtgggggatataatataataatatattagtaaacaaagcataaatgtatatcttggtgtctttatgtggaaggaaaacttcattgacatgttgaagaaaatcttaaattattttcaacatatgaaattgaagagaaacgattgaacattccaa

SEQ ID NO: 28343 - DNA, 1041 bp, Medicago truncatula
  Intron number 1 from transcript Medtr2g103600.1 (locus Med tr2g103600) derived from phytozome v7.0 (chr-ID MtChr2; po s 24175963 to 24177003)
ggaaacaagattgaagcctaatctcttcacttggtgtatgtttaattttttttatggtgtcctatgttaccatgagtaactaaactctttaaaattaggttgaacgatgaacctatatgcaattgtgttgaaccatgttatccttggtgtaattttttaatgcaatttgaattatgtttatttaatatttggttaaaaatgtttttggtccctttaaatatagatttttcgttttagtccttcaaaataatttcttcgactcctaaaaaaaaattcaacgccacttttgatccttacttttaagtcaattcttgtgtagtctttgtattttttcagtaattttagaatattataagaatcactcccatgatttttttttttttaaaataacacatgaattaaatatgaatatttttcgttttttacgcttaaaaatttatatttaattcatgttttcttaaaaaaaaaaaaaaatagaatagtttttgggagagatgcttttaatattctaaacaattctagaaattttcattcaaaaataggaagactatgcatgagttaacttaaaagtagaggccaaaagtgatgatttaaaacattttgaggactaaaaataaaataaaaaattaggacgactaaaaggaaaagtttgtatatttacaaggaccaaaaataaatttaacatttgagtcataatccattgacaccatacgtaagttaaaacacctacatcaaatctcaaccattaaatctaattaattcaatacataacacatgatcttagtttttgatgaatctctccatttcataacctgtttatacatcaatgattaatcatggtattgattccagtttcattaatcaaaagtaatttcaatttcttaatcgaaaaccatgtatgggtattgtaaatttgggtcacccaaattgggtgtttgctatttatggttatcattggtcttaattgaaagcttcaattttatattctaattcacgttaattttaatttattaatcttctcaaaagtaaggtctgcaatca

SEQ ID NO: 28344 - DNA, 300 bp, Medicago truncatula
  Intron number 1 from transcript Medtr3g123330.4 (locus Med tr3g123330) derived from phytozome v7.0 (chr-ID MtChr3; po s 30917358 to 30917657 reverse strand)
actcatcactcagaatctcccaaggaccggaagtggtaattccctcttgttttttcccttcaaaatcttctccttttcctttgcatcgattcgtctctaccaatttttcatcaataatcaaaattcacactttttcacgttcttctttattctctttttgaagaagttgatttgatgtgatgcatgcttgttcccctttttcttgattctttagatcttttttttcttattcagataaaattaatttgtgggtttgacttgaatttttctgggtctttgattttgtggcagtgaaagaaa

SEQ ID NO: 28345 - DNA, 705 bp, Medicago truncatula
  Intron number 3 from transcript Medtr2g122210.1 (locus Med tr2g122210) derived from phytozome v7.0 (chr-ID MtChr2; po s 29265326 to 29266030 reverse strand)
cagaaagcagtctcattactgactatactcttaaagtaagttatcatttaatttctcgacaatatttttatttgaaggttagaacttataataaagagaagaaaataatcagattatactagactagattccaacgttgttcccccacatgcaaagtccaaaccacgttctgaggagtgaggactatgctatcttatattataaaaaatataaaatctagtacttttttcaatgagcaaaactatttaattaaacttaatcaagagaaaattgtacaagtactagtagtagtggtaccacttgatccaatgcaaacactacagattacatatacgagggttaaagtggacccacctggaaaacctcttgtttctatctatgtggattatctatgccaataatacattcttaaaatgtttaagagcaagtttgacttttaaattataataggtttttcaaaagataacttattttaatttaaaaaacctctttaaagatatttttttaagtaaagaaccataaacttgttataattataataaaaaaataaaaataaaaaactcttattaattgaaacatatctgctgatataaaaaaatgagacctatcttgtaaacattaatattatttaaaatggcaggccttatgatttaattatgttataaaaattgtttgttgtgttgaacagatactagggcttgatat

SEQ ID NO: 28346 - DNA, 955 bp, Medicago truncatula
  Intron number 1 from transcript Medtr1g081230.2 (locus Med tr1g081230) derived from phytozome v7.0 (chr-ID MtChr1; po s 16083732 to 16084686)
ctgagtaagaataattaaggtagtgatatttcctctttgctcgtgttaattaattacctatatccattctggtactacattaatttctagattgagaatctactccaaactaagttaggcaataaattccctcaaaagactagacaccaaaaagttttgatctctatcgtctcacattgataaagatgcaaattacattttctatatattacttttttttctttcttaatatgtcaatgtcaatttttattgtaaaatttatcatgcttaacattaagtatgtttaaaaatacttatttgatgattaaattaaaaaaaagttaaatgatcaaataattataatttatttccctaaaaaaaattataatttattaatagcgcagacattatatattttcaatgtatataaattaaattcaaaatgtcaccgatccaatgcattttcttataatttaattagaaacccatatatgacccaattttactcctttattctaaaaaaaaacacaaatagtgtagaaataatttttgaaataaaaaatgataattagtgttaactctttgtttcttatgcaaaatcattcatgtagttggagttagactgaatgtaagtaaaatttaactattttttttttgaagaataagaattattttattcaataaaaaaaaaggctctactgaattgaataattaatctcgataaaactcaagtaataattagtcaagttttctcaattgttttacttatttttttttaatagtaaaaaaacatccttttgagaaataaaaaatgttaatagcgtagaatactagtccatacatagtatgtgaatggaaggtaagaaaattggtttgattccaattggataggatatattccaatttaataaaataaataaaaatttccttaaacaaaaaagtggaagcgggaatagaacgcgtcgcttacacctca

SEQ ID NO: 28347 - DNA, 921 bp, Medicago truncatula
  Intron number 1 from transcript Medtr2g038970.1 (locus Med tr2g038970) derived from phytozome v7.0 (chr-ID MtChr2; po s 11012407 to 11013327)
aacaaggttttgccccatttctcactttattaattttatcttaacatatgaatgatttaagtataaattgcatttttttttttaatatttagtgttggttttagattagtgatgaatttcatctcagtggaaaaacatgaatgaaaagtttttttttttttttttttactaaacgatgatgaaaagttgaatatagcattgttagaaacctgtatgttgtttaataattggggaaaaacccaaatcccacattgagtcgaggtttcgattgaaaatgttaggttttgtaagaatgagttagactaacacattactaatgactagatgtcttcgctagttatttgtatcaatgttttgaaaaccgaattggacattgaactggtgaggttttttagtcatgattcaactgcattaaactgggacgaaagtgcgtgttgaacaagttaaataaccgaatagtagatagtgccggttcatggtttaactggttgaaccatctggttcggtttagcttttttcttggtatggagtttggccaggagctaagtaaagttggccaaggattgttttatccaagattcgaactcgggttctcctcaatgagttgtagttaagtggtgtttatttatcacttgagcttaatcacttggtctagtttttaaaacattggtttgtatacatcatagccgagtactgtaactatctcagtcccgctagtcctaactaagcactttgaggttttgggtcatcaagtaatctgttagatcattctaggcttgctttgtctctttggtcatcaagtaatctgatcctttatttggtgcttaagaaagaaaaaaaatattttgtatattttgtctggtttttatgttgcatgcttgtgcagtgaaagcgcttctctgagcattttaattcactttt

SEQ ID NO: 28348 - DNA, 854 bp, Medicago truncatula
  Intron number 1 from transcript Medtr3g059020.1 (locus Med tr3g059020) derived from phytozome v7.0 (chr-ID MtChr3; po s 13133181 to 13134034 reverse strand)
tgcattagactgttcactactctgactaatcaagtgtaattgttatttaggaaaagaaagtaagaaattttagaactctgactgaacaagaaaaacataattggagtgtgagtttgagtgataatgaagcagctcatctcatccttgttaaacagtttgatattgaattctattaatactagtacatatgtaagctctcaatattcttatgtacttcggttagtcagatctacatcaatgattagttttcaggtaatgcctttgcatattacttcataattgatgagactaaccaaaattgcaattactttcattctattattcataactaattttcaggaaataattttgacgacaaagatattcggtgtcgcttaataagcgtcaggttataaatgaatatgcaacatcataaaaaatgacacctaaatgatatgaggaaccaaaatccaaaacaaataaaagtaaaatagggagaccaaaaaaccgttttttaagctagggtagccaaaacttcatattttttaaaataccaaaagtgcatttaaaggaaattattattttacgggttataattttttttgggaggataatttttccttttactattcatttataaaattggatatttgtagaagaaaatataatccgttgaatcaatcctaacaaaagataagagagagaaattatctatatgatcagattgattttgacaacatttgagcggagacacccaagaagatattttctaatcattataaaaataccatactatataattctttccttctttttatttaaaaaaattcttttctttttttacctttccttaaatatgcgagttgtgtgtctaa

SEQ ID NO: 28349 - DNA, 463 bp, Medicago truncatula
  Intron number 2 from transcript Medtr4g011420.1 (locus Med tr4g011420) derived from phytozome v7.0 (chr-ID MtChr4; po s 1649241 to 1649703)
ttaaggagttgggcacctgtgatctttatccacaagtgagcaaagatcctttttcttactattttgcattacgtatttactttgctgtcatttatgctcacattgtacaatctcttaacagatttttgggaacaagcatatttacattatttagtaattctggcattttgacatatttatgtcagttttttttatatttatttttcatttttattaaacctggccagatattttaatgttttgatactgtatgcaaaaagtctgttattgttttataggattcaattgatcttcgccattctactgtttcgaatactcacaatgctgtttccagcagttcccataaactaatgttttctgcaatggaatgaacaatctacaactcctattgattgtgaatgtttgtactagactgttactttatgttgtttttatgtcctcttgttgcagttgactgaacaga

SEQ ID NO: 28350 - DNA, 492 bp, Medicago truncatula
  Intron number 1 from transcript Medtr2g006960.1 (locus Med tr2g006960) derived from phytozome v7.0 (chr-ID MtChr2; po s 888999 to 889490 reverse strand)
aggtaatcttaatcaatatttacatgcatgttggtagaacacacatttaattaatctcctttgaaaaatgttacctatcattcaatctaaacaagaaaaaaaaataaaaaaatcattacatttcatataattaataaacttatcacaatacttttactagaaaaagttgaatctccaaaccaaaataaaataaaatatgtgtatagtttcatctgggagtattatagaaacatcaaaacgagagtcatgcaagtgcaaatggtataagtttgcagagacattatttgatgtgctgggatgtggatttgtagcgtgatacccctcttcttcacactcgatgtatgtgtatttcaccactagtcttacaacaaaataagacatcaatttgatcttagttctcaccttaaatcattgccatgtttttgtgatatgttgtggtgatgatcatttggtgcatgtaggaaccaacatcacccttagggtttgatcaca

SEQ ID NO: 28351 - DNA, 472 bp, Medicago truncatula
  Intron number 2 from transcript Medtr2g009520.1 (locus Med tr2g009520) derived from phytozome v7.0 (chr-ID MtChr2; po s 2101987 to 2102458 reverse strand)
ttgttcaagtactcttgtaggtactacttgaaaaaaatttacttacttgttttatggtgaaacagatagactactagaaaagaaaagaggtcttagatctcttaacaatagacaaatcaatagaaacttgtgtaaattgcatgataactattttttgtataagttgcgtgataactattttttgattcatttattttatttttgttgggattttatgctgaaaatttgagaatgttatgtttttcattgttagatgttgatttgtgagaatgttagatttggtgcttttgatttcaatgaaaaattgggattaagaatagtgaaaacaattatgtacaacttagtgatgattctagtgttagatctatggctatatttgatatccacatacaaatcttgatcttcttctcttcttcctttatggtctcttcttcctctctcgcctcttttgaagttgccgaaaaacgtattt

SEQ ID NO: 28352 - DNA, 697 bp, Medicago truncatula
  Intron number 1 from transcript Medtr2g009520.1 (locus Med tr2g009520) derived from phytozome v7.0 (chr-ID MtChr2; po s 2102495 to 2103191 reverse strand)
tttctgtattcttcccgaccttatcacggtaagtcttctttgattcaaaacccttttgctggctcggtgtgttatcaacaattgtactgattttcgacaattgttgtatttatgttctaaaacccccaaaaacaacaatatgtatacatcacatatgtaaaaaccgcaaaatctctattatttcgttctaaaaaaactcatacttagatttttatttttgttaggttttggtttttctcctgttcattaaatcttaaatttattgtgactttgaggagattctctaagaaatttgaggtattgggtattttttttaggagaaaacttaggtacaattccttaggtgtttttcgtatggttcttaactaaaaatacatatttttttggatataacaaactttgagaaaattatggattcgaggaaatcatggtgaatttagttaagaaccatacgaaaagcacctaagaaattgtacctaagttttctccttttttttatagtatgctttgtttttcttggtttaaaatttgcttgttgtgttagatatgatgagggatatatacatgtatggttatttcttgtagagttacataatgatccaatttatttcatccaatttgtgttgtttcagttgatttactgttttagtttcataacttttgggggttttgattttacagagtgagatagctaagc

SEQ ID NO: 28353 - DNA, 512 bp, Medicago truncatula
  Intron number 1 from transcript Medtr3g080280.1 (locus Med tr3g080280) derived from phytozome v7.0 (chr-ID MtChr3; po s 18837844 to 18838355 reverse strand)
ggtctctttcgcacccaagggttgttcttcacgtgagttccactttcacaaccatcaattttttagtgtttttctctgttgttgttttattgtcttcttttttattcttgtttgctttgaaaattctattgatgagtttgattctggtggtttaggaagattttagggtttttcttttgatttggggaaaactgtgtcactagccaaaatctcacaaagaagttttctatttttgaaaaaagtgaattggattaataattttcctaattctgttgctaatttttaatttttttaggttgtggttagtattataattcaatctttgtttctccaccttttattttattttgaggtgttttagtttaacagatttaacattaaagattattggtgggtttaatcatccttctggctgttatgagatgcttatgtctaaatccctaagtttttatttccttttatttttttgtgtacaagttcaagatagcagtagagcgagcaagtggcagacc

SEQ ID NO: 28354 - DNA, 365 bp, Medicago truncatula
  Intron number 2 from transcript Medtr2g046520.3 (locus Med tr2g046520) derived from phytozome v7.0 (chr-ID MtChr2; po s 13028322 to 13028686)
cttgctgattgtgccgttgttgttgaggaactgttagtcaatttagtcattgaaattatacgaatttttatatttgattctagtcgctgaatttaacaatactttgaaaactattcatgaaattgaaaattttcaatcatcggtcaatttagtctttaatattgtcctaaaaaacttatgtgatagaaaattttcaatttttgtaatgattttgaaatttccttaatttcaagattataatttaagatattaaattggtatagagtattaacttcttagcctgatgttttttgtatgttattaaatggatgttttttaaatgatatgaaggtggaaagcattggattttgctgctcttagaagaa

SEQ ID NO: 28355 - DNA, 976 bp, Medicago truncatula
  Intron number 1 from transcript Medtr1g008960.2 (locus Med tr1g008960) derived from phytozome v7.0 (chr-ID MtChr1; po s 1000261 to 1001236)
ttgtctgcataagcaaaacaggcaagttatatatttgtgctaagcttctgtatgatcttatatatatgtttttgataaaattctctatgatcttattgatatcttattgtaacatgttatttttatgaaaggctttgtgttggaattttaggcatgcaaattttgctttgagggttagagaatcattcttgttcttgtgagttttttttttttttttgcttttggtaagagaaatcatgaaagttgaatcatctgattctggcttatttgctcttggtaagagagatcaaacaaattaaaacttctattaaaattctgattccatttgtgacgtttatgtgtaatttgtttttgttatggatagattcttgtataccaaatcttcttgataaaagtcaaagaatcttgattatattatattctaaaatctaaaatacactatgatattcattgggaggaaaatacgtgctgttgaaatagttactggaatttgttttgtaaatttattgattgactacgaaaagatacatagaaaaattctgcccaatttgtattctacaatgacttttgaaacatctggttacaccaaggatacatattccttgcagtaactatgtcacaaagttaccgacaaccaatggtcgagatcgttaaaaactgattactgacttggtgattgtttaaaactggtttggtaaatatgtaatttaaactgtctgatcacaaatcaataaacgagattgattattgcgtgcaaggaatcttgatccttacaccaattggagttgaatatggacctacttttctgttacttttttctttttcggataaatttgattgaaatgattatgtgttagccttactctgaataaactggcgattttgagtttacgtctacataagctttgaggttttgtttgttggtgtggatagattgcatctagtgtttctaatttattgcctcctgattcaacag

SEQ ID NO: 28356 - DNA, 865 bp, Medicago truncatula
  Intron number 1 from transcript Medtr1g146830.2 (locus Med tr1g146830) derived from phytozome v7.0 (chr-ID MtChr1; po s 32594906 to 32595770)
gaagtgatattcgtccgtacagtcttcaaaccctttttaatccaggctttctgatagtttatattttagtgatccttgtgaaacaataatggaccacagttcattaacgggcaatagtctaatagaccctcgattctgttctcagtctttgttattctttaattacatatgttgaaattgcgtaacttaatctgtactatatttaaccatgcaatgtttaagctttatgatggagggagggttgggtgctcaagagcaattatggtttcattagcatagctgtagatgttaagtttgagtttttctgccactcaatcaagtgtctgaaaatttatagctttattctctttcttttctttgctttccttgaaaccttcttcccatacttcattagcatggctgaagcaacgactaattgacacctttgtttgaaactgtttctgtttttgaggttttggtggtgagcagaatatggtgtgtcagaactgttttcttggttggtgtttgaggcttgtttctgaacttatttgagatttttagtggattcctttgtctatcttgcatagcaattagttcactcttgagcttatgttctttctttcataatttcttaaaaaggaaatcttccctttattatcttcaaagagaattataattgtcaccccgtgatcccatattagagcgagtacaaagaatgggaggaaattttgtttatttatttggccagcttaaactgtcattcttgtgaagcatgccgggatagggggagagcggagattttcattccttgtttacatgggacaaaattgtttggcaaataaatttactgtgcggttacaggtggatatatcatcattattgtgcc

SEQ ID NO: 28357 - DNA, 932 bp, Medicago truncatula
  Intron number 1 from transcript Medtr3g156300.1 (locus Med tr3g156300) derived from phytozome v7.0 (chr-ID MtChr3; po s 40961958 to 40962889)
acacttccccttcttctttctttttctcttaccaggtaattcaattttcattcctctcaatttcctttcatttcaccgttaaattcaatcccccttttattagtttcatattcgaaaccgattatctgtttagttgctaattgtgttacttcgtcccaattcaatttcaaataattccattgtttaccatagaaaacccaaaattaatcgcgttttctcaactgcagtatgatattataggataccaattttaagcttctgtattcatcatgaaccaaccccttttattttggttcaattttgcactctacaaaaagaggggtaacaaacctaacattatgtcagcagcattccattcatgtttgtagagaaactcatactgaaccagtgttatcaatagtggatggtgtaaaatagataatgtattgaaaaatttattttctttggtcaagtagcttagtggctagaaattcacccctaaagtaaattgtggggcatttgatccggggttcgaaccccggcccctgcataccacaatatccctaccaacctggacttgaaaggtttacttattatggtaaatataggagtaatagtaatactcattcactattcagtttttccatgtttggtacacatgcagattctttagtttaagtattaagaaaaactaaaattctaatattttccactagtgccggccggtatatcagccagcagatttttgaatagcagccaccatggtcctaatagagaaactaggattaggatagcctcacagtgttcatagtgaattttgataaatctgataacattgtcaacccttagtaaagtaaccttaatttgaggtactaaaatttgcacatttataacttcttcaatttcagactcatggaggctatcctatttggcttaactgattgtattttctt

SEQ ID NO: 28358 - DNA, 588 bp, Medicago truncatula
  Intron number 2 from transcript Medtr3g139540.1 (locus Med tr3g139540) derived from phytozome v7.0 (chr-ID MtChr3; po s 35936152 to 35936739)
caagttggttgtaagtcatggaatggatatgcttttcctgtcattgcgattcctactgtccgtaacacttctattatctaatgaagatgtttgaatttaaaaaaaaaaaaaaaaaatacaccccctgttacattgatccatagatatgtatgcattaattcagccattttttgagcggcaacatgttctcattcctaactcgaattttcttgatccttatcaacattatagaacaaacttttaatccttatcaaggaggttttcactctatcattttatttttctaagctaaactatttaaatataatagaaactaaatgaataaaatgtggaacaaaattgtaaatccaagatttaactatcttgaaaagaaacagatttgcccaagccttgttttacttttttttttagctttcattgattgcgaaatgaaatgaaatgttgaagccttgtcttactaatgcatgcgttgtatatttattttagagtattactttttccaccctgttgatttctcgcgcgctctgtaaaattttcaaaaatgcccagttgcagtccggattacgtaatccgaattgcatcagcacc

SEQ ID NO: 28359 - DNA, 711 bp, Medicago truncatula
  Intron number 1 from transcript Medtr1g149430.1 (locus Med tr1g149430) derived from phytozome v7.0 (chr-ID MtChr1; po s 32993085 to 32993795)
tcgacgcagcagatccgatagagggggtaagtggaaaattggtgttgttaatgttgtgtgagatactgatggtgtcgtggctgtggctagctgcatgcaagttcttttattatccaattcaaaggtagctgaaactttagctatgcggtagagtttgagatttgcaaaagatatgtatttaatgtatcttgtagcggagtcaatgtttcaaatgtagtcttggcgctaaatactcatcaacaatcatcttcctggctacgttggctatatttttagggattatattaattttaatgtttgttttcataacattttttttttgcatgttatgcccaaaaccaaccatgcagcccattattttgctcgatatgctctttatccggattgcaagtggatctcgattgttttctcttgcaaataagtattttaataagttgtatgaggaaatcgggtatccttgttgtatgaggatcttgattgtgttgggacatgaagggaaatcggggaactgtccacatcgaggctagaacaaccatactagcgagagagacaccacactcttacacaaaaccttaagacaatgagtttatgagttctcttacttataatatgttcaacctttacttttctatccgatatgggacatataactcacacttgcacacaacatattgcatctttgaggtggatacaatcgtcggtggtgtatcc

SEQ ID NO: 28360 - DNA, 532 bp, Medicago truncatula
  Intron number 1 from transcript Medtr1g106090.2 (locus Med tr1g106090) derived from phytozome v7.0 (chr-ID MtChr1; po s 22023678 to 22024209)
gtcgttcggaacttgttttctctgaatcaggatccgtaagtttctcttctcaaatcaacatcccttatatttttctattatgtatctatctatatatctataataaaatttctgtttgctaattttgttaataaaacctaatcatcttgcttaatcatatctgcataagtttgatctgtgtctgtttacctgtttggcatctattaataatcatgttatattgttaatgaaaccaatttttagttaacttaattttgttacttttcagttataacaaccaaatattggtttttctttctgtcttcatacccattttagtattattaaattaacatttttcatattaatacttgcagataagggtgttgaaaattgaaatagcttcttttctctttagggttctatacttcaaacaacgttctttatgatctaatctatcatttgaggtagttgattgaaaaaaaatattcttgatctactttggttgtgatgatggcaacagcgggtgtagcacctgcttctggattagtag

SEQ ID NO: 28361 - DNA, 843 bp, Medicago truncatula
  Intron number 1 from transcript Medtr2g022340.1 (locus Med tr2g022340) derived from phytozome v7.0 (chr-ID MtChr2; po s 5965346 to 5966188)
catttgtgtgctccttttgttgttcttgcataaattttgtctgctcctttttatgtgtgctattttagagtattgttttatgtttaagatttaggtatgaattgtttgccgtaactccttttactcttattgttttcttacaaatcctacctcttcaaatttaccattctgattgtatgaaacatcatttttctctcggtaaattaaaaaaatatatgacttttttgggtttggatgggtaaatggcttacggatttctttgaattagtggggggtgcaaaaaagaggttcccttaggtcgaagatgaatgaataattgggttcaactcttttaaggcccaaacgagatagctattttactacacccccctttttttagaaatagcacctcctctagatttgttagtgttatttcattcaacctttgcttttggctattatctgaaccacgaaggatgggtgagtaacactcaaaaaacaaaaataataagttaaatgaaacagatcaattgttgtatgaagacagagatttagacaactcatttttgagtgaaaccaattgaattcgaaagctaacttaaaatatcataataagttttgtagtttaatatttgttctgtgatattttgaagatgtctaaaaggtgtatatcttgagctagaaaaatgtttaaacactttatttagttagacataaaaagaaaaaaaagtagaaaaataataattaaataatcactataattttaaaatgattatatcatgtgtattttttgtgtgtacgactaaataaagtgttcaaatttatggtgactcattttcgcagacgatcccaccacaacagcta

SEQ ID NO: 28362 - DNA, 221 bp, Medicago truncatula
  Intron number 1 from transcript Medtr1g013100.1 (locus Med tr1g013100) derived from phytozome v7.0 (chr-ID MtChr1; po s 2226797 to 2227017 reverse strand)
tggtctcaaggaaacccaactttctggtactaattttttttcttttcttatttatcatttattatactatttatatttatttatttagcattttattctttttaataagaactaattaacatcatgattcctcaaaagaaagagtctttttcttttcacaatttgtttttgacactaattttgttgtggtttttttttttgtaatgatatatagtgagaca

SEQ ID NO: 28363 - DNA, 866 bp, Medicago truncatula
  Intron number 1 from transcript Medtr1g121270.1 (locus Med tr1g121270) derived from phytozome v7.0 (chr-ID MtChr1; po s 26387812 to 26388677 reverse strand)
aagaggttatttacaattagattttcattcgttgtttccctcttctattttaatttgttcaattgcaaagcttttttattcaaagtttgttacaatctgattattcaattttttaaagcataagagaagttgaaactatccgaacaaaatgagtcataggaggtgttggggatcctatgtttcctcctttttggtgggttttactatgacaatggtctaaacttgattcaacgaggaatgaaaacatcggcaacatggatattcttctgctattgattacaagttgttttttgttttatccaatattttttattttaaggaacacatttgtttttttgtttgtttgttacaattctatttattccttggattgctgctattgattacaggttttgctccttcatattgttgtactttaattttaatcgcttcttattgtatttctatttgctaatgatgcttattctttgtgttgcaccatctactctttttaattgtttttgtgctttacatatactactgccaatatagattttgtccaatttcaaagaagccaatatagattttgtccaatttcaaagaaaattagattccgcataaaaattgattattaccttggcaggagactttgggattcattataaaatcatatttcagggattgacatccgccaactattctatcttaattcataaggtttaatttttttttaattatttttacaaaatgtctcaaacatattaaatatttgttagtacttctcctaaaaaaatatttgttggtatcgaaattgttgagtagatacatacgttagcggagtaaaaaaagcagacagacggacaagagagagagagagagagagattt

SEQ ID NO: 28364 - DNA, 819 bp, Medicago truncatula
  Intron number 1 from transcript Medtr2g122860.1 (locus Med tr2g122860) derived from phytozome v7.0 (chr-ID MtChr2; po s 29631177 to 29631995)
ctagcaggcctttcaaggcagaagttactgtcaaggtaaccaattttattattcttaagtctctctttgtagtgacatatttgagtttatctacatataagacactgtttagtaaaacttataaaaacagcttatgacatgttcataagttgcttttaacttatttcaacaagctctcttgggataatttatgaaaacagtttataacttttataaaatcagtttgacttcattctatatatcttttattataaaaaatagtttatacataagcctttatacattaagcttaagctgtttatataagttctactaaacagttgtaacttttctttgtggaccatctttctgaagaaggcatcaagagtacacataaatgctaattcataatctgtttgatgacttttcttccatttgcacctaccatgcatccataatccattatagttggtgggtattaacactggcagagagttctctatccttgaaagttgaaagtccagttggcttttcaacttcaaaataactgtgttgtttctataaattggcaataacaagtttgttattttattcatttattattccgaacctgtatgtttctatatttagtccagaaactcaattttaatacaagttagcattagcacatgggatatggttggttactataccataaatttaataataatattgtagtatatctgtatttcaatacatatataatatactccactttgtaccaaaaagaaaatggtagtagtattgtttgacattgtgattattaattaataatgcagagtttggcagtacataatctat

SEQ ID NO: 28365 - DNA, 636 bp, Medicago truncatula
  Intron number 2 from transcript Medtr3g103950.1 (locus Med tr3g103950) derived from phytozome v7.0 (chr-ID MtChr3; po s 25700070 to 25700705)
aagactgtggtggttgatctcagcttctctggaatgtattatattgataactttcaattatggatggagtatacacttcttttagttttactttgaaagaaaaatatcatgcttttgtaattgtctggtagaaatgataggatcatattatatttgtttatttcttaaaactcttctatgttaaggtgagtgtagattttgatcaattaccttctcatgataaggatttgtggactgacttcgtagtaagactattggattcctatcatctgaaagttgtatactgtttgaattcaagctacctccatggcaccattttcaagttacaaggaattcatctctattttgctaacatgtcattccttcaggtcttataaattgttgtgcagggaagtttaatttactgttgaaatgcagaggtaatctgcattctttgttaatgattgttgccttttttttccttttcaaattaatgaaatcgtgtttctccgttcgattgtgttatatattgatttcaatttatttttcttttgagttagtgaatgatgaaattcttggtgagggttagtaacttgaagtttatgttgtcatctacatgcagcttggtgagggttagtatcactgctattggtgata

SEQ ID NO: 28366 - DNA, 453 bp, Medicago truncatula
  Intron number 2 from transcript AC235665_40.1 (locus AC235 665_40) derived from phytozome v7.0 (chr-ID AC235665; pos 219969 to 220421)
ttcatcttttccggtttgtctcttctcctcagtttatgtatgtaatttattttataatttatataaccctgataatccgaagtttgaccattaggtaaatgattgttctagtcaggatttgaactcggatagtactagtactttaaggcttaaaaattaatctgtataatcttaaatcgtttattcttacaaatatttacggtctacatatcaagctattcccaaatttcgattttgaaaagagtcgtgcttgaacaaacaaaacatgtcttattatccttttcaattataaaacaaagagtcaagaatagcttttcattagggaaacttctgcatcctaaaaatactttgttcccgctgcacatgaatcagtgaaaattaaaaaaaactaatttccacttttgattcaatctaacagacaactggttctctgtacttttgggctgcacattt

SEQ ID NO: 28367 - DNA, 540 bp, Medicago truncatula
  Intron number 1 from transcript Medtr3g016950.1 (locus Med tr3g016950) derived from phytozome v7.0 (chr-ID MtChr3; po s 3426368 to 3426907)
gagttttggaaactcctatgctgttctgttcttataacattttcttcggcagttaactaccgaggttttcctcggcatttagctaccgcggttttcctcggtagttaactgcagccggatatctaaaacttcgacaattaactgtcgaggggcatttgagtaatttactcgtgtgacacggccaaaccaaatgtgggaacatcaattctctacaaaaattagttaaatgagtttcatcacattccattcaattccactacttttttacaaaaccaaacaataagatgtggcaccatcccactccattccattccattccactactcaccaccaattcaaacatagccttggggagaaaagaaattgttatttttgttattttccttcggttcaaaaataaaaaaattaaataaaatagatcttttttaccgaaaataaaataaaataattaaaaaacagtaataatcatgatatttatattgatgtgttaatttcttgagaatagatcgaagaagctcctttccgacaaaacaaaggttc

SEQ ID NO: 28368 - DNA, 955 bp, Medicago truncatula
  Intron number 2 from transcript Medtr3g016950.1 (locus Med tr3g016950) derived from phytozome v7.0 (chr-ID MtChr3; po s 3426869 to 3427823)
atagatcgaagaagctcctttccgacaaaacaaaggttcgcatcatatctcaattttccactctctttattcatttttttttatttttttttattttttttctatctgttttcttctctatttttctctcatccagatctataaattattatcaaattattacaacttgatcatttttgtgaaattatcatgaaattaaggccaaattttacatgaattttgagaatttgttattcttttgaaccctaatttctggcttgtattcaggttatgaaattgaaattctagttgaatttgataaaattggttattttttaatttaatttagatgcaattgatttcatttatgttaatttggaggatattctgtttgaatcctaattctgggttataatttaggttatgaaattgaaattctggaagaatttgacaaaattgtttaatttttatttttatttagatgcaattgatttcatttgtgttaatttggaagatattttcttaaaaccctaatatctcggttgtattaagtaattattttcaatttccatattttattttcaaagggttcatgatttaacttgtcaatcatgattttattagttagcgacttaatgtgcccatcatgattttattattttggttttggaattactgaaacatgttggctataatattgtatgatgtttatcttgctttgtttttcatcattgcttaatgcagcgatcctcattggttaaaaacttaaaatctggatattattggcttgttaggattgttactgaatttcatcttacttgtgttatatgtataattgtgtatgtgtaattgtgtatatgattaatgacacaaacacacaaaacttttggactcgagcagacactggaatattacatgcctctgattttctgtttcttttcttttcttgatatgataggttttagttggtgaaaac

SEQ ID NO: 28369 - DNA, 295 bp, Medicago truncatula
  Intron number 4 from transcript Medtr2g092600.1 (locus Med tr2g092600) derived from phytozome v7.0 (chr-ID MtChr2; po s 21193926 to 21194220)
gcaatttcgaaatcagagttcatccttttgattttgtacgttgtacttcttttttctatctatttttttttctttccaattttattaaaattctttgattgaagaatccccaatattcatttcaattaatataatatgaggccctttttttggtatgctgtcaattgtctagctctggtcctgatttgtcctcggtggtgtgatggtttatgttttgcaccttaagctagtgtttgttgttcctgttttatttgtttcagactgattttttttttggtcttgttccggtgttgta

SEQ ID NO: 28370 - DNA, 449 bp, Medicago truncatula
  Intron number 1 from transcript Medtr1g093460.1 (locus Med tr1g093460) derived from phytozome v7.0 (chr-ID MtChr1; po s 19001587 to 19002035 reverse strand)
atttgtccaactaacaacattacttccgaccccaagtattttcccgacaccaacataaccaaaaatcttattgttaatcccaattttattgaattgaaacaatcatgatagcttatatttgcagaaaattctttaatattgaacaaaccaaaccatgtataaatttgaactgatttactattatatgaatttatgtatttaattctgtatttaactgttttaaacttgttttcaaagttgtcaaatatcacatcagtttcagatttaaaacgagaaaagtctcatacctgaattttttttattatgacattctttatttattttggtgccatgtacctattctattcagtatatatacctgaatataatgtacctcttctttatttattttggtgccctgtacatcatttgcaggtgccaaaggtcttacttttctccagctttccaag

SEQ ID NO: 28371 - DNA, 529 bp, Medicago truncatula
  Intron number 1 from transcript Medtr2g110220.1 (locus Med tr2g110220) derived from phytozome v7.0 (chr-ID MtChr2; po s 25840672 to 25841200 reverse strand)
gtggtccttctcactctctcgccgctaagatcctcgtgagtttcgttttctctctcatttcaatgcttgaaatttttgtgttgtgaaatgaaaagtgtacaatagcaaagtattatctgttttgctaacgtgcgcactgtgcgttctgatgaacgttgaatttgaaccatctatgttacttagaatgaaaattaaaagttgagaatactcatttttttttttttgtgttttacgtgttgaataagatcaaatattgtattggttcaacaaaggttaatgaagaacctaatgcatcaaagtgagtttggttgataatgttcgagtggaaaattattgtgttttaccgtttgtatatagcaaaagtgtcacagtatgacttgtacttacggtgtttgactgtttactatgtaaacacagtttggaaaattatagtggtttgaccgttttttaagtggtcttttatattaatcctcgaattcgatcttttgtttctgtttcaaagagtctagtggtaacatttacgaacact

SEQ ID NO: 28372 - DNA, 414 bp, Medicago truncatula
  Intron number 1 from transcript Medtr2g032980.1 (locus Med tr2g032980) derived from phytozome v7.0 (chr-ID MtChr2; po s 8889728 to 8890141)
ttctcaaagacgcagcgtttctaaaaccctaatcggtacgattctctcacttcgtttttcaccaatcaatttctaaatcaaccaaaaaattcttcttcttctttttttcttctttatttcaatcctaactttgaaattaaacttgcaattttcattttaatcgctatgattataataattgtatcacatgttagatttacccccaattttaattctagggtagaaaattcatttgcttgcatttttggtgacccatttggcttctaattatcatgcattgattactttcttctgggcaatctatgttgtgatttgttaatatgttaatgtcactcaccttacttacttaaaaattatgttttggttttttttttttttgcgaaattaattttagggtttgtgctaagagaggtt

SEQ ID NO: 28373 - DNA, 545 bp, Medicago truncatula
  Intron number 1 from transcript Medtr3g136310.1 (locus Med tr3g136310) derived from phytozome v7.0 (chr-ID MtChr3; po s 34385434 to 34385978)
cagaaaatctcttgttcgccacgcttctcttgtaagaaacgaatctttgttttttagtgtcttgtgttttcattgtgataatgatgttacttttcttgttttggaacagttattacagcatttattacttttcttaaaatgattcttatcttcatttctacttttttaacttcattccttttttttgtttccatttgtcactttgatgtactgagagcgtatagtttaagctttggtttggtatttaatgtagatagaatctaggactagaatagaaggaattttttgttgggaaagagagattggggaagttgaaaattagacggcaacaacattatgatttattcatctcattatgattagctgttgattatgttttgtgggttcagtttgcaactttaggattgattattgattatcagttttagtagggttatttctggagtagtataagtttatttctgcactgaaaaaagttcatctttctacaatttttttcttcattttattgatgtgttctttcacggaaaaatcagcagacgaaa

SEQ ID NO: 28374 - DNA, 518 bp, Medicago truncatula
  Intron number 1 from transcript Medtr2g120750.1 (locus Med tr2g120750) derived from phytozome v7.0 (chr-ID MtChr2; po s 28480173 to 28480690 reverse strand)
ttctcttcagttaattagtgcaactaaacctggtaatttcttcatttcatttagttattattactctcattcacttgtcactatactatactttgagtgtgaaatgaaggatgtattttaattatatatatgattatcatgaataactaattatgtcattgtttgacaaaaaatgacggataaccggtaaactatttaaatataaaatgatataacaaagatgtttatctactatttaatttttttcaagtaaaacgagaaaaataaaactaagagaaaaaacagtaggcaatatgttaattgaattagtttattaaaataagttataagctaataattttttttataagatcctgagaaaaaaatattatcaaatgagtttttttttttttttttgtcatataaactgataagttttttttttcctttggtacaaatataaacttataagttatccagctataatttttttattttttttagggacgttatcaagctataaacttaaaatccgacat

SEQ ID NO: 28375 - DNA, 637 bp, Medicago truncatula
  Intron number 1 from transcript Medtr3g104470.1 (locus Med tr3g104470) derived from phytozome v7.0 (chr-ID MtChr3; po s 25969940 to 25970576)
atattgtcactttgcatacaaaatcagctgacattgtataaacttttcatgggaagtttcccatcattaacaatcttgatttcattttccctcaaaacaagatttcatcatatattcactaaaaccgtaattcaattcataaagaatacattttggaaatctattcaggctactataataaaagtactatatgcaaaataaataaaagtaacagcattgcacacatgaatgtcaatagggggggggggggggggggggacggacaaatttagaggcatagtcatttccaacctcatccatgcacaaagaacatttctctcaagagaacatgcatgtgaatatcacaccttcttgaatttcttagctcaagtataaaattgtcgaaggtgcgcataacaaataaacgataaaacgacttttggtaagcttaagatgataaacataatgtattcataacatcaatatttactgtatagacctttgtttcataatggtttactttacaaattaaacttttatgaaactcatattttcaatgtttttttttttgtttttttatatatttgaaacatttaattttataaataaataaacttttaatttgatgatacaataacttgtttgagtcacttcaacc

SEQ ID NO: 28376 - DNA, 889 bp, Medicago truncatula
  Intron number 1 from transcript Medtr3g030990.1 (locus Med tr3g030990) derived from phytozome v7.0 (chr-ID MtChr3; po s 8597534 to 8598422)
gacagatctcagtttgtttgttttcacactttcaggtaatctcttcatttcttaacaaaagttaatctttcaaattatgttatgtgatttgttccggttatacttatatttatatttctcttcaaaaaaaatttatatttatatttaagttaattatgataatgatgaacgagggtgtatcaagtaggggtgaacatggttcagttcaggatgaaaactgaatcgaactgaactgtttgctaaatctaaactaactgaactgaactctttgcattttgaattgaactgttccgaactgaaccgaactgttattattgatacttttgaaaaaaatacgaataaaaataaatgaaattgaattgaactgtttcagttcagtttcagaactgttagtaatggttcagtttttttttttggttcagttcagcagttcagtttttggtttttttgcccacccctagtatcaagtgaacccaattactgggttggacattgtatttattatatacaatgaacccaaagttcaaaatttattaaaaaattttaaaaacataaattgtgctgacttaataattggactgagtttgtgcaagaattattgtgtataagaaaccagagaaataactcatactctttgtactttttcatttctaataaaaaatttgatttctaaaaacaacagtgataaagaaatataaaaggcacaaatgatttagttgtagtaacaacgatctttcttcgttgcttgcaatgaagatggcatgtacatacagttgttatttattataactgaatagtgtgtcattaattaaacaatccattatttttgtttgacagaagatagattatagttttgcagtgagtctcttaggatttgactacaaatatc

SEQ ID NO: 28377 - DNA, 979 bp, Medicago truncatula
  Intron number 1 from transcript Medtr2g088270.1 (locus Med tr2g088270) derived from phytozome v7.0 (chr-ID MtChr2; po s 19916154 to 19917132)
ttcctcaacaccccttctcgccgattctctcttcggtaaataattttacacttaatttcatcaacattagatcaatcaacttctgtttatgcttcaattgtatttactttagatctatgtgttgattttcatgtttttttttttttttaatatgccttttgatgtgattatgtatgacattttttaattttgatttggattaatggtttttttttccttgctggaaattattcattgttaatttgtttgaacacaatattaattattatttttttccaattttttaattactatgtgtttgttcttcttatttgtttgtgatttgtaattgtaatgaactgatcttggtgttgtaaatgtgaatcgtattaatatagcattaccatcataatttttatgattatgtgttctatggttgaaggtcactaagttttgaactgataataatataacttgattttgtgatttttttaactattaaaaattataaactgagatgtggatgttttgtcaatttgtttgcttttctattcagataaattggttatttttatctggatattgttcagtattgattttctcgttatttgtttgaacacgatgttgcattgttttctcttacatgaacttggccctggacatgacaccgacattaacacgtcgacacacaccattaattatttgagaaattcacataattgaatgaaatgacacaatgagttgtacatcggacatgttgtcttagaacactaaacatattatctgttttgttcaattggatgttgttagcctgtatatttagttgcttttattattttgttattaccagttgtctgatactgaagcatattgtttttattttataatttacttttgacagagtaatcacgataactctgatgtactttatctatttagctaaccagatttttttgacatttcagctctaacaaacttttctttgtggaccttaaagact

SEQ ID NO: 28378 - DNA, 700 bp, Medicago truncatula
  Intron number 3 from transcript Medtr2g088270.1 (locus Med tr2g088270) derived from phytozome v7.0 (chr-ID MtChr2; po s 19917321 to 19918020)
tcgatcgtatggtttcattaacacttatctcattgtgttgttgatcttcactttgttgtttgcttaacataaaattaatattactatcataatttatgaagtttttttaaatatatataatatttgatagataaaggctttttatctataatatttgatagataaaatctttttttaaaaataatatttataggtaaatatgtagtatgcctgtctgtcattgctcatattgattactgcatgaattcatgaacacattgactttggtttttgtttgacaagaaagtattggcatcataattgatatagcttgtattttttgtaattttgataggtaaaacctatttataatatttagaggaaaatctgttttttccctttatgatgctgattgtttttatgtttcattattaataattcctctacgatgcattttccttattgttgtcatgtttccacttatcccatttttcagattattaagatataatttaaatttggcgtttgcttgacaataaaatattaatgtcacaattaaattttttagttacttgatagagaaagactattcttaatactgtaatcttttgccatgttgttagaccaaatttgctagtttgaataataataaaaataatttattttctgtgtttttttatttgcaggaaaatctactttgacagattcccttgttgctgcc

SEQ ID NO: 28379 - DNA, 675 bp, Medicago truncatula
  Intron number 1 from transcript Medtr1g107840.1 (locus Med tr1g107840) derived from phytozome v7.0 (chr-ID MtChr1; po s 22852626 to 22853300 reverse strand)
ttgtagaagataggcaacttggtcatactcttaatgtgtaataggaccaatatatttatctctttggaaactatgtttattaaagaataaaaataatgaaataatatattatacgtttgcttcaattaattttcaccaacatttttctatagctaatcatcatatattcaccatgacaatgatctttatttctttctcaaaaataaaagttctcattacttccgatgtaaaaaagttcctttttatgcactctggtttttcttgtaaaccactaacttgcttaaaggtggatatttaaatcaaaaataaatacccgtatcgtattgattttattttttttttgacaagcgtatcgtattgatatataagtaaaaatatgaacgcatgtataaattaaaaaaaaaatagataccatacagaaatataaatataaattaaattaatttggaataaatcattgtaacaatacactactcactaacctagtttgtctctcacacacattggctcaagatagtacatattgcatcatttatttcttttaattttctccattttctattccatccactccctccattacttttttcgattttttttcttctctctcataaagtgacaaaacttcttcttcttcttccttactttaaagctttatcacaagttaggattagg

SEQ ID NO: 28380 - DNA, 713 bp, Medicago truncatula
  Intron number 1 from transcript Medtr1g086870.1 (locus Med tr1g086870) derived from phytozome v7.0 (chr-ID MtChr1; po s 17332432 to 17333144)
ttttgttaggatttcttactgattcacgacccaaggtaaccatttgtgaatttaaaacttcgtttttctattgatttatctgcgtcactttagaagtaatttaattgtgattaaattcaaatgtttgtaataatttgatggttaccattgattggagccatatggatgcaaaatttgcgataactttagtgcatatactatattctatattatatgatattgttgtaattgatatcatcattttttaaagactgtcttacttagttgatactatcctaatacaagttgtacattgcctttggtttggtttggtttgatcctgcgtagtgttcaatcttccactacagtcattttgcttacagtttttttcgatgaaaaggctctagtttacaattgttgtttataaggaagatgatttataatttgtgtcttttttcccccttttcatctctaacattcaaatatagagcaataaacactttgttcatgtaatagttgggattgggacatgtttcaccattttaatttgctgagcttgtgtgtgtattgtgtagaaattttaaattttaaatgttgtggacttttggggtaaggggatgtagcatggttacatgaattttgatttgttttctaaattctggtatatacttgagtggtgtgtgctgactagttcttgcaacaggtaagaaggcaatcccatctgggcctccgtg

SEQ ID NO: 28381 - DNA, 694 bp, Medicago truncatula
  Intron number 3 from transcript Medtr2g033850.1 (locus Med tr2g033850) derived from phytozome v7.0 (chr-ID MtChr2; po s 9354552 to 9355245 reverse strand)
ttatcacaaacgttgacactggcaagacgttcaaggtaagtttaaggttcgccactgttctactttgatagcattggtcttgtgcgcatggtgttttgtgttgtggatctacttttattttttgctacaatcttggttttttgcaactcgggtagttcattttttatagatatatgactcaattcaagatgacatttttgataatctacaattatagttattgtatttaagttctatcttacgatgaaggaataaaaaagatataccaaatgataggatctcttaatactatttaccctcacattatccatttcttactagtccatggattcaagtctctaaacagtgcatatattcaatttcttaattgatacttcctactagcaatattgactcttttttcaagaaacttattctacaaagaaatatctaagaattattatcctcttgcattaccaggtattgtcccctcattttgtacttttttctaaaaatattgctacgacaaagagtagtactagtttttgcttttaccagtttaaagaggcatggaaaatgactgaaaacaatatgcagtggtgtgtactcataagatcattttcatgtctctgctttaatttattgcatttgaaactagtgattttgttgttgaagcttttcttctctgcaaatgcaggttcctgattcaattgaa

SEQ ID NO: 28382 - DNA, 683 bp, Medicago truncatula
  Intron number 2 from transcript Medtr2g029530.1 (locus Med tr2g029530) derived from phytozome v7.0 (chr-ID MtChr2; po s 7874601 to 7875283)
cgctcgaccaatataagagggaggaaaaggtatcagattcaaagaaactttatcctttttaatcttggctgtcagaaacctcaatttgagtttttaaattggccccaatttctttaatcatgaacataaatcacttcttataataatatgttttaggcttctctttgttctagtttgatttcattggtcttctggacatggtgttttgtgttttagatctgttttttttttttcctttctgttacctaatcttgtctttattactcaatttattaaaaaaaattataaacgtatggctcaattcaagattgcatttatgataatctacaattgtagttgttgtaattaaattatgtcattggaaaaataaataacaaagattatccattttttaccagtccatggattcaaattcttacttgctactacttcttactagcaattcctattagcaatattgactattttataaagaaacttctcctacattgaagtatataattaaccctacttctaatattagcctcttgcatattcaagtcttgtcaccttattttgtactttaaaaaaaaatattggtacaacaaagaccagtagcttttacttgtcacctcatttagtgcactcataagatcattttcatgtctctaaaatgcaggttcgtcgtttgcttggaagacata

SEQ ID NO: 28383 - DNA, 628 bp, Medicago truncatula
  Intron number 1 from transcript Medtr3g025550.1 (locus Med tr3g025550) derived from phytozome v7.0 (chr-ID MtChr3; po s 6636339 to 6636966 reverse strand)
acctctacaagctccaccgtggcattgcatcttcagtatgctgctattctccgtttcttcaaggccttcttcgtatttatagcttaaatttgatcaactgtttcacaccatcatctaatgatgtcttgatacatcaatataaagttaaccttcctaggcagtggttttgttagtcaaactttatggatttggatctatgaagatgattttttgttttgttttggatctatgagcaaaatatgcaatgaataataaagtggattaattaaaaataaatgatgccagttaatagacaatggaagaagaaaaaagtccacttgtgttcattggacggtggtgggtttgatgctgcttgtggttgtggtgggtgagtgaggatggagggaggagagagaatggtggtgagagagtatgaaaaaatctagtgttgatagattactattagattatgttcttcgattaatctaatggtcaaaaaatactttcccatggtgggaaacaactcccctttcccattctaaaccccacctgtcaactgtgctagctttttgctacatttttatgctttcttggcattagttttctatactcacccttgcttctctctgcagcatcaagcttacctcat

SEQ ID NO: 28384 - DNA, 704 bp, Medicago truncatula
  Intron number 3 from transcript Medtr1g146400.1 (locus Med tr1g146400) derived from phytozome v7.0 (chr-ID MtChr1; po s 32355032 to 32355735 reverse strand)
gggaaaattcaaaccacttatagaaaaatacacctgtaagactattaactttatcatcaattccatctgagtattgatttggtgtagtttttactttttattactcttcttgtctttctagttagtatcatactgctttgaatatagaatgtgtatattgcttcaagtttgcaacacaaacgcaaagtttaatgtaaagtgatttatatttgacaagttctgtttcaacagtaagtttataataaattcaacacaaaatttgaccatgacacagaagcaacattttctcacttaagctaacatgtgtttggaagtaaaatcatgtttgcttagaacttagaagtgactaacgcccttttttttcttccgaaaacacaattgagagctccatacagaggttaggagctcttaaacatcaatccaaacacattcattgtcatttgataaaagccgtaacatggcccccagttaattgtttttcaattagaaaccctaattctttatcccaaaaaacaactcaaaacccaaatttaatcagctagagtgataacaattactaccgctatagcggagcctattgacttgtttatcaactcccaaataacttatgttatatgttcctcttgaaatcagaaacaaacttcttttgtttgtcttattatggttgtataatatgatttcaattaattttatttgaaggtttg

SEQ ID NO: 28385 - DNA, 680 bp, Medicago truncatula
  Intron number 3 from transcript Medtr3g113900.1 (locus Med tr3g113900) derived from phytozome v7.0 (chr-ID MtChr3; po s 28717752 to 28718431 reverse strand)
ccaccttccaccttgaacgaggtccttctatctctcacatgtttttgcagtcattctttgatgcatgccacacttatttttctgaatgcttacatataatagtcagggcaatggaggaccaacaatgacatgtgaaattgcttttgggcagtttcttttgaataaatgtgtcttttcacttcctaagctgtgttttcctttatttttttgttgttaagtagaataacttatttcctctttcgtgtcactcttttccccttaaccattttgagttctcaagggagaaattgattcagactatctgtattttagttggctatatgatatgaggacaaactttccatgaaagcattgtaaagaaaattttaagtattaatttctacaggaagaacggagtagagtacaaacaaattatttccctacttgtctggtttatggtaaatggaatttaaatttttgaacattttttcaatgaaactcaagggttaatttaaataaaccacatcccctatctgtccctgaattctacgagttttgtcattgaagttgattatttcttttaggttgttcgggaattttttcatttgttactatccttgttgcctctctgctatcgtatattcttctttaagtatgtattgttttgatgttttgatcaagtgaatttttgcaggtcatca

SEQ ID NO: 28386 - DNA, 580 bp, Medicago truncatula
  Intron number 1 from transcript Medtr3g113900.1 (locus Med tr3g113900) derived from phytozome v7.0 (chr-ID MtChr3; po s 28718683 to 28719262 reverse strand)
agctttgacaggtaattaagtattggcaggataaacaaaggaactgttactgtggcaattttttttaatcactggttcagcattacaggcagttttctgcacagaatactgtttaggaattagcggattttataattcccgactctcttgccctctattaattttacaatgttaaaatctgaatatttttggattataataatttacatttttattgacacatcttctctcacaccctctctttactatgcgtttctttcacgtgttacgtcttcactttttttccctttctcttatacgcaaattgccttttattttttgcagtatatattttttaaatttaatgacaaaaagttaatactatctgtgagaatattgtggatggttggagagacaacttatgattgttaatttgctggttgtaacgtacagttttttcaaacactttattagttttctcatggtttgatttgaacatctctctatgcatgtgaaatacatatttataataaagaatgttcatgatcaccttcattgtttacgaagttttgttgatattgcagaattcttaattctgcaa

SEQ ID NO: 28387 - DNA, 297 bp, Medicago truncatula
  Intron number 1 from transcript Medtr3g123570.1 (locus Med tr3g123570) derived from phytozome v7.0 (chr-ID MtChr3; po s 31057438 to 31057734)
atttgcttattaccgaaaacaaacaactaatcaaagttaagttttcacggctgagatcagatcaaatcgtcactctgtctagttttaacctttttgtttttgcaattacaatacaaaagctaaattataattataagcggctctgtctttatctaatgagatattttaaatttttattttattttgagagagagagagagagaatattcacatttcacacaactcatctttgcgatgaattaattaagtgtagcacgctaactcttgttcttatcctcttcttgcagactgagcttt

SEQ ID NO: 28388 - DNA, 851 bp, Medicago truncatula
  Intron number 1 from transcript CU179634_25.1 (locus CU179 634_25) derived from phytozome v7.0 (chr-ID CU179634; pos 90078 to 90928)
gaggttttgcagctctcttcaatttgacaatttcaatgccgttcttcataaaaaaaaaagaattatttcaattgccgaatgtgttgaatgtgaatcactttctggttatttgaattcttcttgtaaacggtgcattttatctcttgcaatacactcattgtgggacaaggtaggcattttgcagtcgtggagatggttgcaagtacaatgaatctatgagctgaagtaatgcttttagctcaagatacagttttccaaggttaagatagtgaccctatagatcaatccctttctagaaaagccaatgtagctttgtgttcaaatgcgtccatacagctgatgcttgattggttgaatatgatcaattgatgtctgcttccttctgccattcttgtcataataatttaactgtgccgatcgagcaatgcatttgagagtgatgattttgttgaaaaacatttaatggtccattgggatagaatgcaaatgttgatcttaagttcgaattaaatgtctgttattgcattcaagggacagcttgctatttttctcttaaaatcctagtgccaaatgacatattgaataattgtttatgagctatagctggtgaacatgttgaaacaattctcatggagataatcccatgcctagagaagaaataggacagtaaattctgtaactgtagtatataatctggccatttctacacaaaagaaaccaccatctagttggaacttgactttggaaatggcttttttcacatgaacaatgagggaatttttacttgatttcttctgttcttgcaattaactgttctttcatacttttctgtgcataggttggaccagaat

SEQ ID NO: 28389 - DNA, 561 bp, Medicago truncatula
  Intron number 1 from transcript Medtr4g006440.1 (locus Med tr4g006440) derived from phytozome v7.0 (chr-ID MtChr4; po s 861345 to 861905)
gatcaaaatcggaggatgtaggtttcatgcagtttttttttaatctagaaaaaccaaatataaaatttgcgtgaatgcaggaaatctgcatgaattggaatccctattaaagcgcagtatatggtaggtaacattctgagtaaatagcaaagaaagaatgtctcattcacacacaagcttaggtatgcgtgcatttgaagaataagaatgtgggttttcatggagaatagagaatcaagggggtgaagcacaaggagttatttgtgttttgcacattctttgaaccaagggttttgtcattgccacgtttacccatgttttcctctaaatttgacaacgattaagaaagtcccaagaataaaagaacaaaaaaaagtgtgattcaatgatatctttatcattttcgtacttaagtgttatgcaaatttgtataagcttccatgccttttttgcaaagtttcatgccttatgggaattgtgagtttttgcataaattatgcaacctttttttgttgttttatttcaggtcaatttagggaagtgcttttcaatattcttcaa

SEQ ID NO: 28390 - DNA, 655 bp, Medicago truncatula
  Intron number 1 from transcript Medtr3g136150.1 (locus Med tr3g136150) derived from phytozome v7.0 (chr-ID MtChr3; po s 34256051 to 34256705 reverse strand)
agtggaaggtatagcattatcgttgttgttctttggccttgtttggttaaacaaatcaattaggcgcttatgtgtcagtcaaactattttcataagttataagttgatttgacaagctatcctaatatgtttacgcaaataagatgaaaaacttcatggatatgtcgtaagttgtttcaattagctctcataaacaaacttttaaattttatgtcagtagataaacctaaataagttaattcaaatggactagcacttgttgttttctataatcttaaaatcatatactctctctgtcccaaattatacaatattttgggcatttcacacgtattaaaaaatgtaattaagaataaggtccacaatgttgttttgcatcacatctatgcatattgcataaatttagaagatgagactttttgtgtagttgtgtagtaaggcaattcttgaccatatataatataatcagagcccggaaagttaaagagacttaataatccatatgaaggaaaaatttaagatagtttgttgaatttccctatttgattttttcttctgacaatttagtcttcaatcactattatatgcgtttgtaagaagtttattaagtctctaagctctctcctaccttcgtttaagcagaccaaagctactc

SEQ ID NO: 28391 - DNA, 659 bp, Medicago truncatula
  Intron number 1 from transcript Medtr2g026780.1 (locus Med tr2g026780) derived from phytozome v7.0 (chr-ID MtChr2; po s 7365757 to 7366415)
ggtcacgatctccgatctctttcttccatctaccaaactctgatagctctctctccattatgaacacagattgccgccgaaaaatttatttgtcgcactgatccacgcacatctcgccgactccgcaaatgccgccgcaacaacaaatgaccttcgtaattgtcaccggtaactcactttctcccaccgattcatgtttcatgttcatattgattgtgtgaattttgctaattttgaatttgacattagggtttgaattatagtttttcattgattttgtgtaaattatcattgattatcaattacagtatagccaaaatggtttgattatcaattttgtgtaaattttgctaattttgaatttgacattagggtgtgaattttgtgtaaattatagttgattttgatatgtgattgtgtgaattacagctttttcttcattgttagaatagttttttttttctttttttcattgttagtttttgtaatcgttactttctctgtgtttcagtctcaattcaataccttgcaatcatgctacttctttgtttatgttcttctacttgaattatggatgaatttctgaacgtttttttattttaattcttaccttttaatgttctgaactttttgtttttttttttaatttgtaggttcta

SEQ ID NO: 28392 - DNA, 586 bp, Medicago truncatula
  Intron number 1 from transcript Medtr1g073850.1 (locus Med tr1g073850) derived from phytozome v7.0 (chr-ID MtChr1; po s 14820096 to 14820681 reverse strand)
tttggcttaaacgtgaagatcttcaacctgtaagtactatcatcaactcattcttatgttcttcttcttcgttttattaaatgtgattttagccgcttcagggtatgtttggattgacttatttttgagcttatgaaaaatagtttatgcaaataaattagcttttatgttaattcataagtttttactaacgacaattgtatcttcataagctgttttttcataaactaccttgacaagcttatgaataagacataaaagcttatttatttgttttgcataagctcaaaaataattcaatccaaacgtgtccttagcaacagcttttgaatttgttgggactggatacaaacaaaaatacttgcagactaaacaacaaagaatgctgtaatttcagaggctaaaatcatatttaaaattgttattattattattttttttttttttgggtgttgtaattgtgttgatcattttgcttgaggatatgtcgtttatgaaatgtggattgtgaagtcattattgtgatgatgaaattgtggattgtgtgataggtattttcattcaagatccgtggagcttataatat

SEQ ID NO: 28393 - DNA, 894 bp, Medicago truncatula
  Intron number 1 from transcript Medtr3g148900.1 (locus Med tr3g148900) derived from phytozome v7.0 (chr-ID MtChr3; po s 38831263 to 38832156 reverse strand)
tgtgctcattgtgttccaacataaaaaaaaaataaaaaaaaaataaaaaaaataaaaaaaagagtcatttcttaacataaccaaatcattaagatactattgttgatatttcaatagccatttggcttaattctaatgcatactaattaacttttcacggtaaagtaaaaaacaaaactttttttggaagcaatataatgatgaaatctgaaaacttcaaaatcagtcaaattactattctctttgtcatgtttcttatgtctgcttagtggccaaattcatacaaatcacataaaagagatgcaccttttgtttttagttatttttaccacttttaagcttgtctctttttggtctcgatcaatattggatagcaagtacaaaattgtttttaacatgtataattgaccatgttgagtaggacctaatcctccttagttaacactaattagcaatgacgattacaatgtaaattactgatttgacaacaagtaataataagtagattgtaagtaacccttcgaaaattggacattatattttggcttaaccatattgcttattacaattctttttttttttcttggtattttttatgtgtcttttattttttttggtttgatagagaaagatgtggagggttgattaacgtgttttttggaatttgcaaaggaagggatttagatgaaacagttatttgaagataaagttggtccaattgaacgtgtttttgtttgggatcattcattcagatgcgcctcgactaggcaatgttgttataattttttcattttattatattatatgctctttgattattgtttgtaggcaaagtaatattttttccccttagttgcaggcaaagcagtatcttgcgttgggtttttctgcgac

SEQ ID NO: 28394 - DNA, 800 bp, Medicago truncatula
  Intron number 1 from transcript Medtr1g093890.1 (locus Med tr1g093890) derived from phytozome v7.0 (chr-ID MtChr1; po s 19276718 to 19277517)
tttaaacaagaaatcaaacagaagaaaatcggaaggttgaattctatgattcgatagcttgataatgcattcatttttaacactaatcacatgtcatgtgtgtttgtattcattattacttgtagttttctatgtgtaattatatggatatggaggttttatttgataaatagttaagttaagggagtggcctggtggtatatgacttgggacataaagagtgtgctcttctctaggtgctaacatttattgagttgggccagtccatataggttttgctctggcttcaatttggcccgagccagtggatggtgaaatgggtctcctggattactcggtccttggaccagataccgagttttcagaaggaaaaaaaagttaaattaagaatggattttaggttttttaggcagtgacttctctactatttaataattttggaatatttgtagtatcttgttaccgttgtttatttacttggccgaagtgcttagttgaagtcttgtagagagaagttgactttacatcttgactgggactgaatcttatatcttgaaattgtgtttgaattggaatatcttagaattaagatcgtataaaactgttgttatcttaatcgatttgattgacagcgacacaatttgttttcaatgttggatgcaatagcttggttcgttgcataatgtcttgtcatgctagttagtttttcctacaactctgttgaaactgtatgtgattatgcaaacgtttttcatgtggttgcagttcattcgcaagctcagttaacaagctatcaaaat

SEQ ID NO: 28395 - DNA, 715 bp, Medicago truncatula
  Intron number 2 from transcript Medtr3g102440.1 (locus Med tr3g102440) derived from phytozome v7.0 (chr-ID MtChr3; po s 24972519 to 24973233 reverse strand)
gtattgaaacaggaccagatttggaaagaccaaacgtgagatctcttgtccaaagcttctctaatgttgttttgattagttaaattgttgccaccattttgctaagcaaatatatgatatgacatatcacatcataaatatagtatattttttaccccaaaatgtaggtagtttttgaatttctaatcactctatctaatctttttatctatctactgctactttcctcctttctcaccagtagattttgtcctgccgccttgcctggaagatttcaataacaaaccaccttgccgactgctgttagagtagtaggatacaatacaaggcagttaaagtagttagaattggttaggttagtttgttgaggagagacaattaaattaattaactaaacgaaagatagtagaagaggattgagtcattgagttctctagaggattgatttctctccatgttctgttctttttcagttcaataaaatcatctttccttttcattcccaattctccattgtaaattctttacaaattggtttgacctgcctcttctcttgcggggaagaaatggagaatgaggattgttcttgaaaggaggtttagtgttatatattacagccccactcatggtgatcaaacactattgagctgaagatgttaaaacaaccaacgaagatgcagagacccggttgtgacaaaagaagggttgaggcgct

SEQ ID NO: 28396 - DNA, 599 bp, Medicago truncatula
  Intron number 2 from transcript Medtr2g033930.1 (locus Med tr2g033930) derived from phytozome v7.0 (chr-ID MtChr2; po s 9393840 to 9394438 reverse strand)
acaagggagccaacctgtgggaagttgtgaatcaggtaaactttagattaatggattggatgtcatcgattctaatgttgttaatcccaaatagcgagtgggttgttgcgccaaaccccaaaactatagtggtatagtagatagcggaaaaaccactattgcaaagtcactattgtcaatcttggatagtggagcacagttatgcggttgtacatcacaattgtgttgcttcatataaaatgtgttttgtagttttatttatacttgaacaatttagtttattttataaagagaacttcagtaacatcgttgtagaaaaaaaaatgaattcaaaattcttttagagctacttactttaaatgtaaaactgtctttaataataatcttctgtgtttgtctatatattctatatacacagagcatctaacttcagttcacatttagaaacgtataatatttaattgttcttgacaatttcacttttataattatttcaaagttttacttataactcaaattcctattgttgtttttatttgtaaaacatttggttttctttttcaggcaagatccaagcttcagcatcatagtgctgcaat

SEQ ID NO: 28397 - DNA, 767 bp, Medicago truncatula
  Intron number 1 from transcript Medtr3g139010.1 (locus Med tr3g139010) derived from phytozome v7.0 (chr-ID MtChr3; po s 35634535 to 35635301)
gttgaagttgaagcatcactcagactcagacccaggtaaagctcattgtcccctttgcgttgcgctcactttaagataattccataataatctctctctgccactttccgtttcatttcaatttcaacccaaacacaagcatggttcccgttactcattatctttgacccacttttcttttcttttctctctcttcacaaatcacatgctattccaattcacaaaaaagcactgtttttatttatttatttattaccgaaatggaatcacacacaaaaagaagattgaaaactctgattgtgactcttcctcacaccactgcactatattcaaaaaaattcccttttcttattgtcctttacttcttctgcacactccataacaaacccacattttttacatcctaaaaattcattctttgtctccaattctataaccccttttgtccagattccccttttaccctctctttcctcttaattttcccaatttgttcaaaaatttcaccttttccaaattgggtttgttctgcatgatgaattattgctaatcaaatattaaaaattatttttttggtcaatgaggaattgtttataagttatatagattttcaattgcttggtgatgaagagaagcttttgtttttaaaagtgttgcatagtaaaaaatataaaaaattcttgttttgttcactgttttagtggtggtaacagttatgggtggtgagggtagagttgaagttgtgagtggcaaagggtgttcgaggc

SEQ ID NO: 28398 - DNA, 993 bp, Medicago truncatula
  Intron number 1 from transcript Medtr2g092650.1 (locus Med tr2g092650) derived from phytozome v7.0 (chr-ID MtChr2; po s 21245371 to 21246363 reverse strand)
ccagacttttaggttttggtttgggcctatttcctgtacgtttttgctttttcttgctattcacaccctgttttcttgctgattgaacccctgcttgctcatttttttctctcaaaaattctagaaaaattcctattgtttttagttcatttttggtttattttgtgatgcttttcacatgttaaaaaagtgatgaaaatatagatgtcattttcttgtttaatttgttcttttcgacctaattttgtgaatttcttgccatattttttctcataaattttggcacatgttatgaacaattagtatacaattttatgatagatgtgatgttgattttatgattgtgctactgttttggtatgatttgtgtgtttccttgcatttcaagcaacttttcttctcaatatgtcttggttattttcaccatttcttcaccattgtattgattactttctctatcactcatgttatatttttcatcttgtgttgctaacattgttgactcatgtttcactcatctcatagcatctcaccacatcattctcatttctactagattaggttttatttcttgcaattctcctttttggtatttccaatggttatgtaatattttaggctagtttaaattcatcttttaaattcttgcaagactatagcatgtatttaggactcgatgtaaaggactatggacactataagtgatgtacaccgacacgagcaccgacacatgcacataccccacatggatattctagatgcatgattagggaatgtatgtttagatgtatgcttaggttttacaacgcttagacaaaaaccattttccaaaaaaatgtgaataacctcacttgaaaaccttttttccaaattaggagtcaaaactcctcttttttccttttattttcttaagtaaaaatcttaatgaattttaatcatacttagactttattttgcaaaatagctaattccacctcacattttccaaatctc

SEQ ID NO: 28399 - DNA, 964 bp, Medicago truncatula
  Intron number 1 from transcript Medtr1g009380.1 (locus Med tr1g009380) derived from phytozome v7.0 (chr-ID MtChr1; po s 1251694 to 1252657 reverse strand)
aaacgttgagaggattgcgaatttggctttggcaggttagttttttttttttttttttaaaattattgtttagtgtgtttttattgtgtaaattttgtatttttatgattatttttggtacttttttatgttattgtttttcttcaattgggggtaattttattacgtgggtgtgtgttaatttgtggtgttaatgtatgcttaatgttactgaagtgaaaatgtttttgagttgttttagtacaatgtagttgctgtttatgttctctagtgacagtactatgtagattagatgtgtgtgttccgtgcccaacacgtgacacgtggttacattaaatcactcttattttcttaaattatttctagtgtcaatgtgtcattgtcagtgtcgtgtcgcgtttgatgtctttgtcagtgctttatagcatgatactgttcagaataaggggggccttgagtgttgatgtgctaagctatgggcttgaatgagtggaaaagtgattgtggtatagccttagagggtttagggagtgtttggatgaatggttcaattaagattttattaattattcactaagtgcaagttggtttttacaaatgaagaggaaactggataaactattttggagagctttaaaaataatttgtttagtataagcaattttgaaagttcttataaccatttatttacagaagcgcttatgctataggataagtctaaataaccttttttagacgctgcattagtagggcctgacatttagacggttgcactgttgtttggtttttgatgaatgaagttataaacaagtgatgtttgtagtttcaagttctttgtttctaattttactgtatcattaaggcaaagtcgggcctttttttttgctggtagatattttgtcatcaaccatttgtatcttctctcgcagctttaaccttagcacctcttgttgtgaagataaat

SEQ ID NO: 28400 - DNA, 837 bp, Medicago truncatula
  Intron number 1 from transcript Medtr2g038300.1 (locus Med tr2g038300) derived from phytozome v7.0 (chr-ID MtChr2; po s 10701491 to 10702327)
cagctttgggaagttactggctcacgtaagtaattgcaatcttcttgcttttacaaattattacacaaaggagaaaagtattatcaattaaagtggtatatattgtgattattttacaatttttcttggcaaattttgaatcatgctctttgaaattacaatgtcaaattattcatataagttgacactccatagacatgcatattcacgtaaaaaaatgtgttccctcaatacttaaaatacaaaaaatattcatttacatatgtgctttttgtgcccttctttgtgcgtgtttggattgttgaagaatttgacaaaatcacattgtgtcatctcaattttgacaaacactaggtgtcattatgtttttgttaaactcaacgtgattttaaataggaaaaatcatctttggacattcaaatactccatttatacattgaatgagaaataaatagatagagcgatttgatagatatgatatattagtgatgtgataaaataaagggataaaatgaaaatgaggtagaggtaaccgacgaatttatcaaatgacttttgattggtttatataagcatttttcaataaactattcattttaatttgatggcttgtaaaaactattttcaatatgacataaaatattcattcgcagcttctgaccatgaaatgtgctcctcctccagctttcgtattcgattctccccaataccaatttaagcggactagattacctttttaaaaaataaaataaaaaactacaattctatttatttggatttgaatttgatgttcatcatgcagctctcacgcctctgggtgagttcattaactccgat

SEQ ID NO: 28401 - DNA, 998 bp, Medicago truncatula
  Intron number 1 from transcript Medtr2g034380.1 (locus Med tr2g034380) derived from phytozome v7.0 (chr-ID MtChr2; po s 9576928 to 9577925)
gttacagtacgtgcaattttcccttcgatctaacattttttttactcatcttgttcctttctatgttcaattgattgcatcaattgtggtgtttttgcataaactgttaaaccctattttttttcgtaattgttggtatgcaaaccctagatcacttaatcaccgtatggttattgcgtatttttaatattcttgcttggattggtggaagtttatgaaaatagtgacttaaattgaattttatgtaaggacttgattttattggttgtgatttttttgggattaaaaatataattaatcctagttgtttaggtgaaatgtatgaaatttgaattgattctgtacgttgaaaatctgaccaggtcaaatattcattttagttgagcaatgcgatgatcttcttagtgctaggttatagatcatctattttttttttttttattttttttttatgcattttgctatagttatactcaaggcagttaaaattcagatttcatgcaaaatcgggaaggtgaaggaaaatcataagaatcgaaacactagtcatatgattcactaagtgtaatcgcagacatgtttcaacaagtaatatgggtgattccaccaaaataggattatgtgtatacttttactcttgaacgctgagagcaagcataatcgccaaattgcggggttttacgattcatatcggtattttaacaaccacggtcattgccatttaactctttcttttttttgctttgagattgggaaaagagagggttgtgtatttgattccaacgtataaaacttgtatatagtaaacaagtgaaacaatatatgctaactacgtgcgttaggtaatcttccggcatctatgtttttagaggtggcttttttaaattataatttcatcaactgatattgcttttgttgatgctgctgctttagttcactagcggcatatagaagaaatgtctgactttttggatttgcagcttattgtgttgttgcag

SEQ ID NO: 28402 - DNA, 580 bp, Medicago truncatula
  Intron number 1 from transcript Medtr1g124650.2 (locus Med tr1g124650) derived from phytozome v7.0 (chr-ID MtChr1; po s 27212753 to 27213332)
ttagctctacacacagctcagctaagctaacccaggtacatatttttctttctattttttttaacacaattaaaccatcagttttcaggttatgtgctaatttcttatttcagtttcatcaaattttttactttaatttcttcaaaaaatttctattatgaatctgacttgttagatatatatttattttcttaattctttttttatttataagcctttaaatatttagcttacatatttacttttttatattctgtaaatttcattttgctctgtttaccaggactctgtttcagattcatccctatcttcatcatttcaattttttaaattaacatttttcacagtgaaaataaatttagaaatcaataacaattttgttttaaagtttgcagattcaatctcaacatagcaacctagtagttattgtagtgaaatagctacaattttctatgagatgcatttgtttgtcttattctgtcaaatgaaaaaaatttgaattattattttttggtggatgatgatgaattggatactaagatgagtttggtaacacaggatttaatacttgattggtatc

SEQ ID NO: 28403 - DNA, 595 bp, Medicago truncatula
  Intron number 2 from transcript Medtr2g007970.1 (locus Med tr2g007970) derived from phytozome v7.0 (chr-ID MtChr2; po s 1341858 to 1342452 reverse strand)
ccgagaggcattgtccacggtccaaccttgttgtagtacatctacaatcatacaatcaaaaagtctataatgatatcataggaagggaagagatggttgatataatttaatgcgtgattaaattttcaaaaggcagcaaaaataagactacacaagcagagctgcctttccaagatagctcattgtaagtaattgtcatgttcacttccagccagccagattgaccagtgttgtcaattgtagatggtggaaaatagtggattgttcaaatttcgctacactacagcattagttgcaatttgacatcattttggacttaattgcgtatcgctggggagcaatagcggtttgtcaaaattccgccacgttgtagcactaaagcactgctatagccactatatgacaacaccgattcatcatcaatgtcaataatcatgttgatttgggcatcaaatataattttgattattctctctctcaatccaagcacaaaatataaccaatatccaagttctactgtttctgggagagggaaaagttaaactgataatattagatagcacaggttagttgtaatctttcattcttttttttt

SEQ ID NO: 28404 - DNA, 829 bp, Medicago truncatula
  Intron number 2 from transcript Medtr2g071220.1 (locus Med tr2g071220) derived from phytozome v7.0 (chr-ID MtChr2; po s 16347339 to 16348167 reverse strand)
ctggtgcttagaaaaatttactatgagtgtgtattgatggggtaatttgatgtaaaattccatacaatgtaatattgcccatactattttgcaaaaagaaatgattgcatcgataaacggataaaaaaaatgcttggtttgatcaacattttatcatattttcagcaaaaattttatcttttatttttttgtaggcaagaaatttaatcattgatttgttattggtaaaaatggcttatatattcatgatagatatttgtacatggacttgaagtgtagactgaaacgattattggtacaataaagagaatataaaataaagagaaactatttaaaataaaaagttgaataaatgaaaggttgccaaatgagatgggagacgtgtgttttgcaaaactacaaaagttattttgtttgataaaatcacaatgacgccatgattatgccaaatttattctaaagtagatggttcaataagtcacttgatactctaattacaactgatgatgccactcaaaagcagttagttgagacttcatttaacaattcaacaaaaggaaaaccaaacatgagttaaattgtgagatatacattagtttcattttagttttgtcaaattcattttatttttgttttgtagtgaaagtgagagtggattgtttgtgcggtcacaacttaattatgatttgtaagatattgagaagaatattgattgagtttttagttcataggatgaaatatggtgttgattgtttgcatgaagtttctgaatacttaagtgtgttttttgaaaggaaaaagtgcaattggatttgaagttggattcaag

SEQ ID NO: 28405 - DNA, 693 bp, Medicago truncatula
  Intron number 1 from transcript Medtr3g123170.2 (locus Med tr3g123170) derived from phytozome v7.0 (chr-ID MtChr3; po s 30827085 to 30827777 reverse strand)
aggtactgatttgatgttaaaacacttcacattgtttttttgtagtgtgggtttgtgcgtggcagagaaaagcgtttttttttaattggagttaatcgtagttgatttgggtttttgggtgtttttaggcattgatttgggattagggtttaccattttatgatgattagggtttaccattttttgcagtgcttttttgctgttgtcgttttaagcagcgagttttcttacttttccatgacttatgcatcagaaaatcgatgtcacatgatgtttggagcgaagattatagttttactgtcgggttcagttgtcttttttttttttttggttgcttgcattgaatccaaattttaattgagattggaatgtgctttactttcaagttgctggccatttgaacaatgtagtctgattgctatttttaagttgaatgtgcttagagttcagacttttgctgttgaagtttaaggttaccataaagtttgaacttatggtttcatttaccgagtaaagatttttagatttgagtaccaaatatttgatagcttaccattgtgtaagatatgtaaaagggagcttaattttgattttgttgttgctgttaattgttgtgtttggttgatttggttgttgattagctttttttggggtgcaggagttagaaaacccaaaacttgggcaatcggacga

SEQ ID NO: 28406 - DNA, 670 bp, Medicago truncatula
  Intron number 1 from transcript Medtr2g071060.1 (locus Med tr2g071060) derived from phytozome v7.0 (chr-ID MtChr2; po s 16190891 to 16191560 reverse strand)
catcaagaagcaaccccaaaagcttagagatccaggtagttttaccatcccttgtgtgataggaaaagaaaccgttgacaaggccttgtgtgacttaggagctagtgtaagtttgttgcctttatccctcttcaaaaggatgggaataagagagcttaaaccgaccgagatgatcttaaaactagcagaccgttctactatccccctagttggctacatcgaggacatacccgttaaaatagaagggatatatatcccgactgattttgtagtggtcgacatagaagaggaccttgatgtcccgataatcttaggacgacccttcctagctactgcaggtgctataatagatgttcagagtggaaggatagtttttcaagcaagtgatgcaatgattgggttcgagctggaaaatgttatgaaaggtcccgctctttattcttgtaacatgattgaagtacataatgtgaaagaacgctttctagcgtcaactacacaatatgacctctttgatcctttctaaggacactttcctaacgtcaagctaatgacaataaacgagcgcttcgtgggaggcaacccacgcatttaactgcttttgtttttgttttttgtttcttttaattattttgtaggttattgtccgagaaaaattcaagaaaacagaaaa

SEQ ID NO: 28407 - DNA, 966 bp, Medicago truncatula
  Intron number 1 from transcript Medtr3g093710.1 (locus Med tr3g093710) derived from phytozome v7.0 (chr-ID MtChr3; po s 22322650 to 22323615)
actaatagaataccagttttaaggtgtacattgatgcctagacctgagaccaggaaactatgatatatactatataggtttggaaaatgtgatgcatcccacttaagccttgcttcccagcttccacttttgcttagctcattgttacctttacagactaccagaaatagtagggtagggtccaacgttatccttaaacaacatacttaattgacttagtcggttactccgtcattaaaatagtcatctttttttttacgttaaaaaaaaaaaagtaacctttttatatcaacaagattatcattttgtgttcttaagcaataccatttttttatttaatcttttaataaattaatattatatacattactcttaataacttattattttttaaaatatagaccattttataaaattactatctcatataataattaattttaacatgtatcaaaaatatttagatggccgtaatttaaaaacgggaccgggggtagtttttaaaagtcaatgtaaaaatattatgaattaatttcgtatgaacttttttcctcaagagtttcatttcggtctctatataagcataggacatcctcttgtgtttaccacattacaacattacaagagcattgcattcatatttaatttgatttctaaattcatatttaatttgatttctaaaagcattgcattccactagttacacttctatttctataatttccacatcccattccttgtcatcattggatgccaattccacagaattataattttataacctcatttcttctactgtttttcagcttaaaaaagggccgcatgggtaggccatcaatgccatttatatactcaacaatttcattccaaaatttataaatatatcaacttatgactaacttgtttttttatgatgatgcatgcattgcagggattacacagtgtccctcaaaattggctggcaat

SEQ ID NO: 28408 - DNA, 744 bp, Medicago truncatula
  Intron number 1 from transcript Medtr2g085820.1 (locus Med tr2g085820) derived from phytozome v7.0 (chr-ID MtChr2; po s 19519583 to 19520326 reverse strand)
tgcttgatcctcaagtggaatacttcaaagataaggtgatttattgagatgatgggactgaaatgaagcagaaggatctgaatgttgtgttggggacaaaaagtgtaataataattcttgatgataaaaaaaaaggtgagtgcactgctagtttctgattggttttttctgaattatctaattggaatggttcgtgatagttaatctatgaggatgaaaatctcaaaacatttttctttttacctatatgaattaacaaactaaacacaattgtataatatgaatcaaagaacgctataatcatatgttgcgggagatagatattcaagcactcttagttcctacaaacatcaaatgcaaatgtaaaactaatttattacagcttcataatcattggaagcgtcattgcaaagtaaattgatttggaaccgagatattaatgcacctcttttcaacactcattttcctgtttaataaaattgatgtaggtcctaccacttttggaaggtgtctcacgttaagtagtggaacctacatgagttttatcgaataagagcgcaagtgctaaaataaagtgttgctagcattcttcgttggttagagcaagtaatgaaccattcctctaaagtttattctctaaatacccagctcatagtttcaaatgtgctaaagatctatccacttaattaatgattcagaagtcactaccttttattgaaaatgttgctaacaaatgttgtaggt

SEQ ID NO: 28409 - DNA, 844 bp, Medicago truncatula
  Intron number 3 from transcript Medtr3g136980.2 (locus Med tr3g136980) derived from phytozome v7.0 (chr-ID MtChr3; po s 34658037 to 34658880)
gggtacgtcaatcgttttacttttctcatcttctgctatttgcctttcccaacttaaacccaatttttctactaaatatcattaatttttggtaaaaaattgaataaaaattcaaaggaactgtttttaatcacctcttatagtttttattgggaaaaaacccaaatcccacgtgggatgagatagttaagactcaccttatggacctgttctgtaaggatgagttaggctccaaatttcaacaagtttcaattacgaacttgagcttgtaattttcacctctcttaagcttgggtacaactttggttgattttcattgtagcacggatatggaaacggacaccgacacgcagagaccgctaataatttgagaaaatcacataatttagtgtaattatatgtgtcagtgtcggacacgcctaacctgaggaacgtccatgcttcatagttaatttttgcctctaataacttatcacgcaagtcgaacatttgttgtaattgactgtagtttgtaacagaataaccaaaatcagaattcagaactttgacctgttcttttatcgtgcaaacgtgaaagactacgaggaaattcatattttcaatgtgttaattggtctgagaaatctccaacaaactatcataccaaaatattcaacagacgaggatacctacagattatgctattaaatctgtgtttatgatcaaatcaagttttttatcatcaatgtcgtcttcatttagaccaagctggtagactgattattatttatagttattagttaatagttgtgttaatcatgattgtggttaaacctgctttgcaacagagcagaggttgtcttgg

SEQ ID NO: 28410 - DNA, 1036 bp, Medicago truncatula
  Intron number 5 from transcript Medtr3g136980.2 (locus Med tr3g136980) derived from phytozome v7.0 (chr-ID MtChr3; po s 34659463 to 34660498)
gggcgtccaaaacaagttggggaacccaaactaaggtagataaatataaggtttctgcatgaagtttcaagtattgaattgtaaaatgaacagattaacattactagggcaagtacagtattgcatgatttttccatttgatcatttatgcccttgcatgatgtatggtatggagtgttggacggttaagaatcaacatgaaaatcaagtaagtgtagcggagataaggatgttgcgttggattggatgagtggtaagactagacgagataggattgggaatgacaccattagagagagagttcaggtagcacctatagtagaaaagatggtagaaaataggcttaggtggtttgggcatgtagagagaagaccaatagatgttgtaatacaaacagtagatcagatggaggggagtctgattagaagatgtagaggaagacctagaaactattaggaaagatttaacggttaatgagttgggtccaaatatggttttggatataatattatggcgtaatttgatccatgtagccgaccctacttagtgggataaggcttggttgttgttgttgtatcatttatgcccttgcctgtacatttttttccgtactgtctgtgcttattctcttttactaggtttctgcaatatacattgtacaattatcgaacagaacatttctccttttttcattgcttagaccataaaaatcttttgcaaaaaatgcatgagtgataaggtgcaacaacagtctcataacaagtagagaaattaattgagaggtggagggagttaaacttggtttatagcttagcaatagcattcagttcaaatttcgaagttatcccaccctcctgtcctaattaacatctcctaatttcccatgattctatttttggaaaatcattcaaaaagttatagtaataaataagttcacagttttgatgtttttttgttttcataattgggaccagaaggcgtactttttaagatcttttgtcaagttctaattttcagttttatgttcctagttgga

SEQ ID NO: 28411 - DNA, 845 bp, Medicago truncatula
  Intron number 2 from transcript Medtr2g018200.1 (locus Med tr2g018200) derived from phytozome v7.0 (chr-ID MtChr2; po s 4737364 to 4738208)
gctccaaaggtatactcttacttcacattactataatgtctcgtagcctcctcaagtatagcttctcatgccgcttgttttttgttttctttacacaaaaggttgggatgaacaaaaagagagcttgccgtactcctggctgattatttgtttgttgcagtattgaggatttgtctctctactttctagtaaggaacaccctcatgtacaccaaaacaatggtacttgactttacttcttacaactgcacaatgcagagattaatgctcctttttcctgccaagtgctgagtgatcaaactgataagccaatgtaaacacacgaattagccaacaaaagatatgtaaacaggtcatgtagagcagagattcatgagcattgatatgtaaacattcatttaacgcacaaaccacaaaagaaaatgtggaaatgaattgttgatataattccaaaacctgttttatgtaatgttagccattcataatctgtgtgctttttactttctcagcacacatgtatctttttgtgcatcatacttatgcatggtcgttatttttgccacatcactagtcaatttgagatattcaacacaatgattcttggtcctcataatatccatcaaccataccttttttttttcttctgaaattcgtaactttcatgaatgtaacattttgaattccttattgcactatttccaccctggtattatattgtgatatgtataaatctcaaactagccagaagagttcctttacatataatgcaaaatatatgtgaaattgttctgtaaaataatgcaggagttagcaaagttgctcaggtccgccactttttcataggcc

SEQ ID NO: 28412 - DNA, 759 bp, Medicago truncatula
  Intron number 1 from transcript Medtr1g100570.1 (locus Med tr1g100570) derived from phytozome v7.0 (chr-ID MtChr1; po s 20935096 to 20935854 reverse strand)
ctcaacataaagtggctgaggagactccggagaaggtatcccattcccgaagattaccctattgttggtttcggaatttatttttattactttttatttgatgaattgtttcaagagatgttgtagtgttgtttgggttgtaatactgtgaagtgtagcaaaaaatgctactcgatcgtattgctaggatggacacattcaggttcgaacttagggcctgtttggattggcttatttgagattatctacgggcataagtttcgagagaatgtttgtttgggagaacttttgaaaacaacttatgacatttttcataagctttttccagcttattttcataagttctccaagataacttaaaatggcttatagcgtatagcatatacataaacgacttaactttgttttatcatttgctataaaaatagcttatgtaagcttatacataagtgcttgtcatgataagaacttgtgcaataagctgcaaataagttgtttatccaaacaggcccttaacatttgtttcaggcttctgcaataaggtctttattttctgagccatatggagttattaccctacacctaaatatttattaattactaccttggttttatgctccccgttgctttgatgtgatcttgttggaggatgatttttcttgatgtgatcttgttggaggcctttattattcatcatttctttattgaagtttgtgttgattattgtaggaatcaactgcaaaagcaattgaagagaag

SEQ ID NO: 28413 - DNA, 828 bp, Medicago truncatula
  Intron number 1 from transcript Medtr1g028560.1 (locus Med tr1g028560) derived from phytozome v7.0 (chr-ID MtChr1; po s 6998287 to 6999114 reverse strand)
agttgtgggtatttttgaggaattttatgtattgttttttgtatttagtctggttcatcattgtaacctaaacttggtaattttatgttgatatgagaatgatcttattctattattgaattgacgtggcctgtcattctatgtaaaaatagcatatatttggattctctgatttaatttcattactttctaattccaaagttgcaatatctaaacttgtttatgagctcactattcttctgctactgcatttcaaactatttatttccttataaacaatcatgtttctccaatacattttctcccttaattctctgtgccctatcgaaaatgaacttaaatatatgtgttttgagttccaaaacacattactttttttgtcatagtttgaatctgaaccgtagctttccgtttatgaattgattagtcgaagcctattttgttgcttttacaatgattttgaggtatcaatacactagcaagttctgctatattagttttcaaatttatattacatttccaactcatttctgcagcatgtacttgtggctaataatagtactagcactttgaaatgtggtttctgtatgatatgtggtattcaaatgtattttaccagtcattgtgataagttctgttatattagtatgtttgctgctgttttttgtacacagtatgtgttggtgttgcataatctagtttttgcttgatgtctgcagcacccaatgttactttggatagcagattttttatttttgtttatggttgttaaattaatctgttgttgatttagggttcttcagcatccatcttccagacaagacaaga

SEQ ID NO: 28414 - DNA, 1052 bp, Medicago truncatula
  Intron number 2 from transcript Medtr3g122770.1 (locus Med tr3g122770) derived from phytozome v7.0 (chr-ID MtChr3; po s 30622310 to 30623361)
ttcactcggaaggccaagctgaacgtattatcattgtagagtattttattttttttatttttatgcagcacaagttacattgacttaattaacaaatatatttactctaaacgagatctttaacagccattttaaaaatattatatatttgagtatttttctttaacaaattatacatattttttatccaaaaaaaatcaaatattacttcttacaaaatgaaagcgacttttacatctctttatcttgaaaactttctaacgctaaactgtaccttctctttttttacagaaaaaaaaaacatttattaatttttcttttgcaacataattaaatattagatacttacttcattgaggaaccacttaacttcataatgttaattcaatttgggtcttacataggaattcaagtaacacaattttacggagcatctaaaatggctgtatttaagagggttgcataggagacgtttcttattttatccatccataagagaaatatgagatgataaagtgaattgctcgttgaagtaaaaatatgtttcatgataaaaaatatgaaagtgttggtgttgtttttgtttcttacaaaaaatatgggttgtccaagagttacatattttttgtataacgagaacaaaattaatacccactttcttattaatttagtttaaatcattgtgggtctgcactttgaaaattaagccaatacaaagtggtgagacatgcatttatatcttctaataaaagagtgaatacgagagagaatgttgttagcattcctcctaaaacaaaatatgacggggttgtacatatatgatataacattacgaggaccacttgatagtagtatatagggcaaataccatttgtgggctgcacgcaatgatgtcatttggaatgatgcccatcatacttgaacaagcattggaaggacaacaatggatgcatgacaacaatggcaagagattcataaacagccctcaccaccggttgtgcaacacgtgcagaatagagtctaaggcaacaactcagtttgagagaaaccgt

SEQ ID NO: 28415 - DNA, 568 bp, Medicago truncatula
  Intron number 1 from transcript Medtr2g005140.2 (locus Med tr2g005140) derived from phytozome v7.0 (chr-ID MtChr2; po s 107127 to 107694)
gatcaacattttctccactgtaagctctcttttcctttattaattaattaattaattaattaataattattgcgttgcgttttctctatttaattttattttattcattcagatttatctatcgatttcccctaccctaatcaaacgtgttatttactcgcatttcctcttctattctataatcatcatcatctattaagattagattcgatttcaactcccatcaaacccttcttaaccctatatttggaattcattttgttcaatgtgtgcacgttcgtttatccatacatgctttctctttattattgtttttgctacttactcatcatcatttataattattattcatcttcaatttcatacactaagaatcagaatcagtagttagtaggtatacatacattcaacttaatgctaaatcttactagtattaaacttactctctttttcacccataatcccatgctcactttctgtattgccattgtacttcgtctgtgtagccattttgttcaatgagttttgtttcacttttctcattttatttttgttcttttgtttttag

SEQ ID NO: 28416 - DNA, 776 bp, Medicago truncatula
  Intron number 1 from transcript Medtr2g077040.1 (locus Med tr2g077040) derived from phytozome v7.0 (chr-ID MtChr2; po s 17600233 to 17601008 reverse strand)
tattgcttggtttacgtgcttgttagtgtaagtattcattttcaacctgtctgaatttctgttcttgctttgtttatgatctctgttcttaatgcttatattccatttatgaattttcagtaaaactgcggttttagaatagtagctttaagcttatcatttaatggtttgatgccattttacaattaccttattagtcattctagaatataaagtggtacatgaagaatactatcagcctttgactttttgtctcaaaatggaaatacattatataaattttatgtagaggcaagttttaagcaataaaattgatgcaaaaatttatgaaaataagactctgccattcaaaatttgggagagtaatggatggtgttaagttgttaattagtgtcatctgtagcaaagttagcttcaggtggttattttgatgttaatgtcattgagttctaattttattcagttgcaacgattttaatttatttctgcgaaaaatgcatgttttttttctttttccggaaagggcttcaggtttattctcagttatttccatttaggggttgatttacttattttggcattttataatttgtatagtcttgtaattatcctaatttgagttcaaaatatcgtgatagatttttatttatagattatagatatgtctgctttagtttaatacagcaacaaataattttgctaagaatacattgcttctcacagttcaattgaatgcttcaggttactgctggggttgctgtccaatacttgggtta

SEQ ID NO: 28417 - DNA, 386 bp, Medicago truncatula
  Intron number 1 from transcript Medtr1g068140.1 (locus Med tr1g068140) derived from phytozome v7.0 (chr-ID MtChr1; po s 13502391 to 13502776 reverse strand)
gctctgttctgcctgctctaataggattcatctaggtaagactattctaacaggatatctgtgggggtaatgttgatattgatgtatgaacaaatctgttttacatttcttttcctgtattttacatttattttctctctattttagtttaggatagctgtggggtaaattggggcattttgatactcggattgttatatgcagaatctatgttatcatctaatcaaactttatagtaatttattttggtgaccaaggcaataggtttgcggtttctttttactactatataattttctttaggatatcttgcatttaatatgtctatttatatatatattttttccattatttgtttatacaacagacccaggatttggcatttc

SEQ ID NO: 28418 - DNA, 1042 bp, Medicago truncatula
  Intron number 1 from transcript Medtr3g103280.1 (locus Med tr3g103280) derived from phytozome v7.0 (chr-ID MtChr3; po s 25377985 to 25379026)
ttttgcatacatcagctgctacaggacaagttgaggtgagaccgtatatttgaataaaccgtcaatttagtccataaattattgttataatttagttcctaacatatatgaaaataataagcagagcttaaattatatgaagtccgtctatttagtcgttaaactttatgaaaatccgttaattttagcccctgatatcttaatagtaggactatattgacgaattttatatactttaaggacggcctattatatttaaactcttcagggactaaattagagagatcgtgatactttttggttaaatcgtgatactttttattataagtcctgtttgtttaatactagcaaggtttttaaatcatggtttatataaggttgtgatgtcgtcgattctggttgcattgatgtcgtagatgcataaaaaccttgatgttgcaattgtggttattgaaatcatgaatgaatatcagactcaaatttaaatcaatacaatcaatatcaattattctttgcattctcaatataaggtttaacagtaaatcatgttcccatatggacttgggtattatgaagtgtctaagtcttgcatcaagtagtatgagatatttagtggagtatttatgtcctatattaagtagtatgtaatgtttggtggagtacttaattttagtgacttggttttcctcccttgatagctatattttatgggatagttctccaagtactttagatacttgttatgttccttcaagatgagtgtgaaatatgggaacatgatttacttacatatatcaaagaataccaaccatattttggtcaatttgtccagcatattgcctttttaaggctaatgcttgtttacatagcagtacaaagaatccaattaatcaagattaatgatgatatttttaatcctttagaagtttaacatgtttaaaattggatatatgcatcctacattttcactgtactttattttgatatatatgatggtaatgatgcaggtggtgagaaagttacttgaatcatttgatattat

SEQ ID NO: 28419 - DNA, 974 bp, Medicago truncatula
  Intron number 2 from transcript Medtr3g150110.1 (locus Med tr3g150110) derived from phytozome v7.0 (chr-ID MtChr3; po s 39481256 to 39482229 reverse strand)
aaagtgcatcttcagctacttgtatctcaccaattgttgccttcttttttattgtttcatggatcttgatcaattaaatattggtgtgagattattttctaagatatatatagccagacagaggccgtacttctatctttttttattcctgttccgtacatcattatgaatttgaatttttgtttgatctattcaaactcattcttgtggtattaattactaatctagtattgttttttctgcttaaatattgaatgattactggttactggatttttcttttttttacttctttggttcaatctatgtgggatcttcttattttgagatcagggtaaagtcctaattattgtgaaagaatcgaagaatttacggtggcaaaattaaaatacccatattcactttgtaaactctctttatgctcacgatgctttaatttataaatagatttccataaaaatcaatttacaaagatttttttttgacaaaataaatttacaaaggttgttctgctgacgaaattaaaaaaataatgaaaagttatttataattttctttttagtgtaaaaactttgtcacacttagtttggtttgatctgcatgttaagggaactgaagaattataactaagtccatgtgtattttacgagcagagttgaatccaaaagattaattcattagataaaagaatcttataatttaattaccacatcaaacttctttaattaactatacgacataacactgttatcatgagtttaaagttctttggccatgatttttacaatatttaatgtgtagctttggatccgtcgtggttttcaaaataaaactaaatgaagtttatgatgtgtgcattatattattttgtccatatctgtgattggtaatgggatgtgggatgcagtttattgatctagccatctaatctaatttctttaaacagaatttcatagattttagcgttgcctgct

SEQ ID NO: 28420 - DNA, 510 bp, Medicago truncatula
  Intron number 1 from transcript Medtr3g114230.1 (locus Med tr3g114230) derived from phytozome v7.0 (chr-ID MtChr3; po s 28848075 to 28848584 reverse strand)
cagatcgctgcctcttcccccgtctttgtcttcaggttattttatttctatccaatcatagtaacatgtttttgttgatcaaaatactagttaaggagatgtcaatgttttttttaggtaatagtagaatatttctctatatagtgtgtttgacttgactgtgcatagaagtttagacatatgtcttttgatctatggtcaagttcgttttaggttttgcgatgacacaaattgattttaactgaattgattatagctaagaaagaattgaatataaaacgaaaatgagttgaaaaatatattctataagacaaaaactacatattctagcttcaagttagaatgaggtaaaattagttctacaacatgtattgtattttattggttgtcaaggtagtttggtgtttttcacatgtaaccatcttttttttttttttaaccttgacaataccatctgtaatgtatgttgtgacagtaagacttattgtggttactgcaaaagggtcaagg

SEQ ID NO: 28421 - DNA, 1035 bp, Medicago truncatula
  Intron number 1 from transcript Medtr1g008590.1 (locus Med tr1g008590) derived from phytozome v7.0 (chr-ID MtChr1; po s 822681 to 823715)
ggcgaacggagattaccactaatctaggatttcaagttcagtccgtggatgatttgaaaactgagctttgaattgatgtaacactagtctagaaacactttaaagatataggtgatactcataagtgtgatcatatagtacgcatatacaaaatgaactgaattttgtattactaattttaatcggtccgatattatttaaatgtgatttccctattcgaatagtaaaaacaacatgtattagcctagtgactgagctgaactgaaataatatttaaaccataatctgctcaatggagttcaacacctgaaacaattccatttgaccattatatctaagcgcagccatcaataatatccttatatctaagttaaattggatcttaatgaaatatgttcattcttagatcaacttcatgttatgttgataacaaataatgagcaccttgatttgaagaagagaacaacatgttatgttcattctaagaatatcaataatgagaatatgatgtgtgtatcttggtgcataataattttttatgcatgctcttcttttaaagtctggtgtcttatgcaataacttgctatctctgatcattttatatttcaaatggatgactatttatttttagtacatttgacaacaccacgtttaaaactggtttttctgatgatcattttatgttgttttataggaaggttttctgttatggcattttatttgtatatacatagatttatttcctctttatttggcaactgtttttcatatttttttgttacttggacagatttcatttccttaggcattaggatagcaactaatagaatttatggacattagaattatgctagcaacacactcttcctaacacacttttattggctgaaatttaatttggttccaccaaatttacgtggtgtttgcatgatttagtggaatcgatttgaatttcaatgaatagaagagtacgttgctagcatcctcaaattgtatcaaggcagcactataccagacagagttccgaccagttcc

SEQ ID NO: 28422 - DNA, 926 bp, Medicago truncatula
  Intron number 1 from transcript Medtr3g159780.1 (locus Med tr3g159780) derived from phytozome v7.0 (chr-ID MtChr3; po s 41919057 to 41919982)
aaagaacaaggttgagtttaatagaaaaatattaatgttaattgaatatataaggaacaaaacaaataaaaaatacataaaaacaaatttaaatgctaaaataaagatgtaacaaacacaaattttcaattttttctttgggtttgaccatcctatgaaatatattgcatatgttaaagatactaagagaaaactttttattgaaaaccacaattattttttaaaaaattatatattaatataaaacacacaaatttcaatatatacatactactttaatcttccgtaagccaatttttaacctaattttaacctagatttaatgatgacttttacgttattacccccgtgttcaattaaacctgtttaatttagagataaactttaaaaatcgttccttctattcctcctattcctataacatctttatatataaaagttaactcgtaagctaatttttaacataattttaaatcttccaaatcactttcacgtatcaattctccttctcactataaatgtgtaccatacagaattgaataaaacacattctaatttatccctttaatcatttgttcagagaatttatcccttcaattattcattcaaagaatatcaaatggtaatattgaaaaatattgttgtcgtatcactgcttaacgggtatatctgatgctatggtctgatttttgcgtatgttttcatgcttaaagatgttttgtaacactttttatttttactgtattgatgcaacaggtcctttggttaataatccagattcatataatggagtgtttgctgctccatctttttgcttcattttgctccatctttttggactttctttttttacggcatctgtctcttattttcttaatcttgattttacaatttttcagattatccattgttgcagttttactacg

SEQ ID NO: 28423 - DNA, 534 bp, Medicago truncatula
  Intron number 1 from transcript Medtr4g005380.1 (locus Med tr4g005380) derived from phytozome v7.0 (chr-ID MtChr4; po s 208972 to 209505 reverse strand)
ctattgtgttaagtaattaagtaatatcaaacaatcgaaggagaaaactgaagaaactgatcgtgtgttctctccggtttcaggatttttgtcaattcttttcaaaccacagctttccgactggttacacaatttggttttgtgatcgcaatctggtatgttctcgtttcattcctttgttttttatgccttctattggttttaaccattcccaatactagtttctggtttgtttatattatgtgtgattttaccttttgtactaaattcgtgatttcaggtctccagtctgttcttgttatgtttcatgttgattccatttaattagttagtcctcgtgttttctatttcttgtttttgaatttgattttagtttccttgtgattcaaaattttcattaggaaaggacttttcaattcttagtcacaatcagtggcgtatcaagaatcctggatcaggggctgcagactttttaacgtaattcttaattattagttattgtactggtgttgcagtttgcttgagtcgctcgta

SEQ ID NO: 28424 - DNA, 656 bp, Medicago truncatula
  Intron number 1 from transcript Medtr2g037540.1 (locus Med tr2g037540) derived from phytozome v7.0 (chr-ID MtChr2; po s 10303299 to 10303954)
tcactagggccagggtgaaagaatagtatatgaagaaaaatgtttcatgtaattcttcaaaaaaaaaaagaagaaaaatatagttttttgatgtaaaaaaaattagggaattgtttttctaacttttgattttgctccccttaattcagcgtgagttaactcacattcgacattttgcaacgtgacttaactcacgctgacacttttaagatcggttcaatcaatttttaagccgactcaaccgatcttaaaagtgaaatgttgatcctaagtttactcacgttgaattaagggaatgagtaaaatcaaaagtgagaataacaattttcaaaaattacgcaagttaagtttcatagattatcatggtaaagaaagtctcaaagtttagagaacgtttacgaatcgagatacttattgtccaccaacaaattagaactcaagtctttgtgatccgaggtgaatccttatcaactgaatcaacctacattgtcaagatttttgaatatatataatccttaaccttggtggaatataaaagaacaatatatatataattgagtgattgaatgagtgaattaatacattaaatattgaccaaataaagttttatatagttattgcaaagttattactagtgtggggtggtgttgcagtgt

SEQ ID NO: 28425 - DNA, 394 bp, Medicago truncatula
  Intron number 1 from transcript Medtr3g142660.4 (locus Med tr3g142660) derived from phytozome v7.0 (chr-ID MtChr3; po s 36631620 to 36632013)
cttcctcttctcttctcatcatttcattttcacttgtaagtaaaaaaactaacctacatctcttctccttagtttcttctctttttcatttcaacttttcctataacctcgttattttccttttcttaatcccagcaataataataatctgaattttccttctcaatttctcattttcatcaccttttggttcttccagttgtaagtaacaatgcattgtcttacttatcaaataatttctatcttgaattttgaattgatgattgtcattgtctctcaaatgcacgcatgcatgcatgcattatattcttaaatttagctatcataataaaatgtggtacactaactaaggaactaattgctaattaattaacctttgatcagtgaaaagaag

SEQ ID NO: 28426 - DNA, 731 bp, Medicago truncatula
  Intron number 1 from transcript Medtr1g009000.3 (locus Med tr1g009000) derived from phytozome v7.0 (chr-ID MtChr1; po s 1015494 to 1016224)
ggattttaccaggttataatcatccaatcctaccgagttttcagttattatttcttgcttttttgtttttaattctcattaaccagtgattaatttaatctgttttatgtatatgaataataatgttctttcgtaagcgactccgtataacttatgaaaataagctgaaaaatcttatgccattaattaaaaattcaattaagctaatacaaataggtcataagacaaaagaaatcaaaatcacgtttttaattattttaaagaattgttggaagattttaagaactaaaattagtagtgaaaaatgacaatcattattgttattttttaataaaaatggattgacaattgcagtgacttggaagtggattttggttctcaagagaatgcttctattgtatatgctgccttagctgttgataaggaggtgaaatgtcttaacatttgagctttatgaatttttggcattgtttttctttaaaaaaaattatttaggtacaaaatttggacgtggtttcttaggtgtttaactacatgtaaatttgaatgcttaaagttacataaatggttaatcacgtcccaaatttgccgttaatgaagttacattaatggtttaattgcattgaccactttaaaagttgttacaaaacttgtccaatttttagttcttcacataacacaattgttttctatgtcttctacagttgcaacctaacaaagtaaaacgaatc

SEQ ID NO: 28427 - DNA, 833 bp, Medicago truncatula
  Intron number 1 from transcript Medtr3g016130.1 (locus Med tr3g016130) derived from phytozome v7.0 (chr-ID MtChr3; po s 3055612 to 3056444 reverse strand)
tgcccttcttaaagtctggtctgtgttctctcttggtttgttctagtaatgaactagtggattgtcaaaaaaaaaaaaaaatagctatgtattgcccacattttcattacttgatcctccaagtgaaaagggtatttgatttgttttcagttattttgtatcatcagccgcaagtcatcccatcttattctgaaggacactgacactgatttgtttttgagacacaaatctttatatagttgcattttaaagtattatatgcctagaagaaatattaaaaggatttaaattgtttatgtaaatatctatagttagctaagttgttatattttgtgttatagtagtttggtccaatggggctgtgaataggaaagaaatacatacatggatgagaacatagtaacttatagaattaaaacaaatttgtaccgttgttatggttttggactgccccgattacacgttaatcgggctgatcaactaaataaatggtcaaggaaagtgtgacaactaggaaatgttgatgttgatcagaccggaaactctattccaagtagcatgtagaggtatgacgtatcaaaagctgataaaagctatcctcagggagaattggataaccacaacatcaaaaagagggtataaaatggagaccttttacataccttttgtggttgattgtttggcttgagagctaaaataccttggtgctaaggtccccatctcaagaaacttggagttttgtgacatgaacgcttgattctgttttaattttcttacggtttatgctaaaactgtttttaataagtcttggtctacatcttgtgcagtgcaga

SEQ ID NO: 28428 - DNA, 741 bp, Medicago truncatula
  Intron number 2 from transcript Medtr3g114390.1 (locus Med tr3g114390) derived from phytozome v7.0 (chr-ID MtChr3; po s 28939468 to 28940208 reverse strand)
ttgagttgcaaggtagcttattatgcataactattatcagcattgatagtagtgctgccttcttttgtctttactctttagatgcctttgtatttttagatttttatagtttacactgcatgcgttgtccattgacgagtgattgctgtaatatccaatgccctgccctgtctcagacacacctttcatttactccttaaactcctagcagttgctgtgtgaatatgcaccctgaaacttgaattttttttattagaaatttgtatttttcccacagtctgtcacgttctggttccggagtattttttggtcaggtaagacatgaaaagagattgggatgcccgattacttgactttttctcttggtttgctatttacttgtgagaatgtcttattagctttatactattttttttaataaaatccctttaataaaatatgataagattacgggtggcacatcttattttggtttaaattgattttcttttatacatatcagtatggtactataagtattgaattaaaatttgcttttgtttattaatcatgtttacactatattttgtttcactgtttttgctgctttgtttagtcgttttgtttgtatgacatggattttaaaatagttgagaaagaaagagtgtcttcagagatgttaattgttgtcttgagttttgattaaaaatttatcaaccattggcagatcacagttctcatattcggccagactcttcttct

SEQ ID NO: 28429 - DNA, 872 bp, Medicago truncatula
  Intron number 1 from transcript Medtr3g067940.1 (locus Med tr3g067940) derived from phytozome v7.0 (chr-ID MtChr3; po s 15688092 to 15688963 reverse strand)
ggtcattttgcccttggccaagggtgagttctcttggacttttcctcccttttaggggtgatgcttcaattttcttagccgcaatgtactctttgttgttgacttcagccaaattcacgttgttgagttatagtttagcccatattgtggacctcttctttgagatacgttacaaattacttacacaagtaccttggcttgcttaccaactcgctaaacaaatttttttatcgcaatacacagaataacaaacatattttacaaactaagatataaagaagataataaattcaaactcgaataaccacataaaatatttaatctaataatctcgatatggttagtttagttaggatttatggatactcaatgtggtaattaatttgtatgggagtaatatcttttatacttttagaaagttgactacacaacttccaaaatagttctatgtccattggtttcttccttcgttatttcatcgggtgtatttgcgagatgataatacaaatcctaaggaattataaacaatttaatcgatatacaaaaagtaaaatgggtcttcgggacggcctctattgggagtagagtgggtacaccacatgtatttgccacaatttattttgatttcattataagtgcaatgtttaaaggcaagttataagctttttttccgttacaaaaataagtacattagatatatcagcctctcatatgtctatttcgttcttttttggcttctctctcttctttcttcctagtaccgtcattttcttgtggttgcttcccctccatggatggtccataatttttgggcggtttagaagatgacccattcagactcgactcctagaggattgtagttgtgttggccc

SEQ ID NO: 28430 - DNA, 792 bp, Medicago truncatula
  Intron number 1 from transcript AC235678_9.1 (locus AC2356 78_9) derived from phytozome v7.0 (chr-ID AC235678; pos 29 420 to 30211)
gtgtagtgtggaagggtaattcattaaatattgttaaacactaatggtgtaacaaccatcaacacaaaaaaaaggctttgcaattacactctcccgaatttctaacacatcagaattgggagagtgtgaatattgcattgcggggaattgagggtagcggtccgaattacctttaacttttactactttatttttattttgtatgttgcatctttctttatgtatttgtcactgattttctttaattttcattttacttttgattatgtttttatgttatgattatgatggaatcatgggatgtaagagatgcatacgaggttgctggtttggtacttgatgcttctggcatgcatcacttacactcattaatgtactatgttttgttatgagtttgactctactatataaaaggaaatgactttgtttttttttctttatcttcttctcttgaatcttcattctgttgttctaatatgctttctatttgctttttccttcgatggagtgaaacaaagtaggcaatgataagataccaaatgtccaaaagaaattaatattaaaaaaagaaagaatgagaaaagaagtaaagcaacagaaaaagcagagtatgtctttgatgaaagaaaagctgcacaatttggtttttaatctctcttttacatcttttttacaatgcacaaaagattaatgatatttttttttgttgatgtcaaactagttcactaaaattagcatcgacataatcaattctcagatcttaagagaagtacgctccaaggtcacaaatca

SEQ ID NO: 28431 - DNA, 356 bp, Medicago truncatula
  Intron number 3 from transcript Medtr3g162710.2 (locus Med tr3g162710) derived from phytozome v7.0 (chr-ID MtChr3; po s 42544857 to 42545212 reverse strand)
caggtaaaatgcatatagaatttggggattttgttttgtttggcttctgtttatcaaggtttaatcacatggaacaagatgtagacttttagggtatgtttggaaggatgatttttgagaggagaacttgtttttcttttctaaattaatgaagttattatttatatatttctaaaaatgaatttagtgtggttgaaatgttatatgatcatctattatgttgttatgttagaatatagactttagccctctaaagcttccctttccaaagccctggatttgagcataccctgaagtgattgattgccttacctaatgttgtcttttgcatcaggattttgagttcaaggagttaa

SEQ ID NO: 28432 - DNA, 669 bp, Medicago truncatula
  Intron number 3 from transcript Medtr2g029240.1 (locus Med tr2g029240) derived from phytozome v7.0 (chr-ID MtChr2; po s 7749639 to 7750307)
aacttaattctgatattctaaaaattcaaagtaagtgtgatttcaccgtgaagagtgattctctaatttcaatttgcatttgtgaattgagtttagaatattgattttgtatgaatatgatacctattaatcttatctattgactttgaagattaatgaatgacacttgacacggacgcattgatattggtattaatgagaaaattaaaaatgaatgtaatcagatttttcagtgttgtgttgttcgtcgacatacactgcggataccacatttttgatcagaaatgtccgtgtttcagagcttgtcattatttaatctgtagttatttgaatgaatttatttgagttgttttcttattgatgcttttaaagttttatattaattggccgcttgtagaatgatttttgattcgtagtttcaaatggaaatttattattaaaatgcttgatattaacaattcaagtgtttggagtctaaaaatagaaatagatataaatgcttgaaactatttaagaatttctactctggatgctttactttgattttaaatccgctaaggaattagggattttattaagtttaaaagtgatgtcactaaggtattaagatttctcttgtttcaatgaaactcattagttcgtttttattgattgcagtggataaggaga

SEQ ID NO: 28433 - DNA, 906 bp, Medicago truncatula
  Intron number 1 from transcript Medtr1g126620.1 (locus Med tr1g126620) derived from phytozome v7.0 (chr-ID MtChr1; po s 28267665 to 28268570)
actctgtcattggcactttcgcttttggcttcgttagtctctttcaatcaaaagtttttttttttttttttttctttctacccaccccatttgagtttttctttaaacctcgtatttgatgattatatttttattttattttgggttgcttagtttcatgaatgggaaagaaaatcagggatttttgctgaattgctgaattttttaattttttttttttttttatgctgatttctattttcttactgttttattagtctttgaaactaagaaaacgttttcctttaattcattgcaactaaaatttagtttttttttttttttgttgggtttgattttctttattctctcattgtccttgttgagttttaccttcctgaaaaagaaactaggaagaagagttttttagtacaaaattaagcatttaatggttttaatatgggcctgattggataaactacttatttgcagcttattatgtataagctatttttatagcaaaagataaaataatattaaattgtttttgtatatgcttatgaaaataagttgaaaaaagcttttgtcataagcttttcacaattctcccaaatagtttcacaaaacttaggtagataagctcaatccaaacagcccctattattattatgaagatgcagagcatttgtaatgttttcatgttatcttgtgggtaaaatacattttttcagtgtcaaatgcaagttctgattgattttttatttatttgacttctgttatgtgttgtgtatttattgattgttattttggcatgaaaatttggcttcaaaacagaaaccaagttgtatagatactgtatgtcttgttaactgaatgttgttttttaaggacaaattttgatggtactctattaacctgtagttaggt

SEQ ID NO: 28434 - DNA, 235 bp, Medicago truncatula
  Intron number 2 from transcript Medtr3g163350.1 (locus Med tr3g163350) derived from phytozome v7.0 (chr-ID MtChr3; po s 42924956 to 42925190)
ctacttaacacaggcagtagtagtagtaagtaactagtaagtacctttcaaattcccaaggatgatgatgcaacctatttcattccatactaccattcatatatttttcttccttcttctacttctagtgatactgatgatgggggtttcttctttctatggttcttaattaattaattattcctttcccattcattttaaaattactagtatttgattgattgttttgttgcag

SEQ ID NO: 28435 - DNA, 857 bp, Medicago truncatula
  Intron number 1 from transcript Medtr1g099400.1 (locus Med tr1g099400) derived from phytozome v7.0 (chr-ID MtChr1; po s 20301524 to 20302380)
cctggtttggccgtcgaggtaaatacaaatttatttgtgtcatgttgcatttgatttgctatcatgttgcgtgcatctggtttatagtactgtcaaacttattgaatttattttaaagataacttagtctaatgtacttagcattgatggaaagttgatttttagattatttgattttagaagttataatttattctcccttccgattaggctccaatgatttctttcaaattctagagttcataattagtataataacatcttgctcaaaaataaaagtataataacatcttctatgcaaccagctaatgactttctggacgtaaattctaatcccaaactttcattgtaactcgagccaaatatttattttgttaacagctaagttattggtattcaagtgtaattaccaaatattgtgaagcctatggttcttttcaatttcctttggacaaaacaacaatgaattagtttttttctttaggattggtgcctttaaaacacattttaagataccaaagatataaactatctattgaatactttgtcaatttatttctcaaaattgaaatttagaattagtgtgtatatataatatagatattatgaagatgaaaaaacagaatcaaattgaaacgaaccgtatacataaaatatgtatacaatgagacagaaatatgtttgttgttttgctaattgattttttagagtagtatttttatatttttaatatattttctatttctttacaacaaaaaaaaaatagtttgtttttagaaaatattatttttgtgttacttttcttatatgaaatgcctgaatttaattttaggcttctggtggataccttggtggag

SEQ ID NO: 28436 - DNA, 641 bp, Medicago truncatula
  Intron number 2 from transcript Medtr2g022000.1 (locus Med tr2g022000) derived from phytozome v7.0 (chr-ID MtChr2; po s 5775183 to 5775823)
gggaaagagataaagggtagggttgtgtgtggaaagtaatagatgttcttatttagattttcaaatgatatggaccattgattcaatctaacaatgaaatttttatgcttcactggtgaggatcttaattgaactctcacccttgaatccacctatcaaaacaataagatgtatgttaaaaatttaaccaagttccttagttttgcttttatgtcaaaatcaaatttgttggtgtcagtgtaactattaagtttgttcgcccaacacatggcagaagtggaacatagacgttgtaatttatagttttttagattaatagtgtttttcacctctgtaatgtcattttcggtttgatttgcaccctcgtaaattttttcggtaagatactcatcttcgtagtggcgttgacacaagcttctgccgagcagtattaattccagaatcatatgcatcgacaattgcattaggaagcgagtctttatgtttttattttgagcacttttttactacttgttttcatacgtgagttagtatatgatctctaattcatatttaatgtttactctgtttatgcttcttgcttgctcttgtatatttgttattttcggattggtgaccctttcagtggatttgtgggctat

SEQ ID NO: 28437 - DNA, 991 bp, Medicago truncatula
  Intron number 3 from transcript Medtr2g022000.1 (locus Med tr2g022000) derived from phytozome v7.0 (chr-ID MtChr2; po s 5775853 to 5776843)
ggttcctaagatacttccatcgaaggtggtcagattaggcaagtgtgccaaatcgtttattaagtaataacgtgtaagtatggtatcgtatctacatggattatcatttcgtccaaaccattcacgttacttatttggttaacaaaatatagataaagagttgaacaaactacaacgtgtgttaatatttaggattttttttttcgttgaagcaaaatgtggtaattttttgaagtcatgtattttagaggataactcaaattctttaatgtagaattttagacaataattggagaatttttataaagtatttcttatatgcatgcattgttgttatacttctatcttaagttacactaaaaatagaaattactaacatgtgttgttagcttctaaagtattaagttcaaccttcattgcaatgaatataaaatagacattacaagttaaggaaattacaatgtgtgttaatatttaggttttttttttctttgaagctaaatgtggtaattttatgaagtgatgtattttagaggataactccaattctttaatgtagaattttagataataaatttggaatatttttataaagtattttttgtatgcatacgttgctgttatacttttatcttaagttacactaaaaataaaaaggtttaattgcacttttcccccttgtagtttgccaattgtgcgattttgcatcctatagttttaaacgagcgattttgccccctatagttttccctctttctgattttatggtccccatgacattttgtgctaaactccgattaacttttcactccaccgacctcttgctacgatttggtctggttgacaatggaattggagagttgaagacattttgtcagagttacttaagataagactggaaatatcagtctgacatgctgataaggttttaatgacaaatttgctaaattagccaggtcactgattggaaagtcgagtcacaacgatcttg

SEQ ID NO: 28438 - DNA, 880 bp, Medicago truncatula
  Intron number 1 from transcript Medtr2g042660.3 (locus Med tr2g042660) derived from phytozome v7.0 (chr-ID MtChr2; po s 12014014 to 12014893 reverse strand)
cttcttcgcagaaatcgccacaagatccatctcaggtagtttttgcaattcacttcaatttcactttcgttacgcaattttcatgcctaattgttcgtttaattgattaaataaccaattcacgatacccattttgatgcaattgaactcaagctagggtttattatgattattgtattattatgtttgtttcaaattcgtatttttaaaaaataaatttacagatacgagctcgtagaacaccaatttaagcgaaatagaaaaaatttcaagatgggtctcattcagccattttatgtgttaacaaactaatttagcatttttgtgtgttaagaaccaaatttagctcaaaattgtgtttaaatgattgtatttattataagtaaggttttaaattgagttagtggcaacggttgcagtttgtgatatttgatattaaagaggaacgtggtcaaaagcactcaatgcagcctcattcgtcataggcgtgccacgtgtccgacactgacacccgacactgacaccaccaacacacgtgattacattaaattttgccattttattaaattattactggcgtcaacgtgtaagtgtcgcgtctagtgtttgtgtgtgtgtgtcaatgcttcataattcgtagttgcattgcagtctcggcaacatcggaaacatacatatcatggcgcaaattgcatccatggatctttgttttataccatttttacacattttgtgcttgctttgtgaatatgtgaatgggcatgtgctcagagttgtttttgatgttgttctgaattcatgtgttaaatggtggtgattatttcttctgtgtattgtagtttcaggtcccgactttttccaatttgccggcctatccggc

SEQ ID NO: 28439 - DNA, 1006 bp, Medicago truncatula
  Intron number 1 from transcript Medtr1g121550.1 (locus Med tr1g121550) derived from phytozome v7.0 (chr-ID MtChr1; po s 26520587 to 26521592 reverse strand)
tacaattggcgtgtgtctcttgcaatctccgaaaggtatctatctatctttcttcactgttttcattttttgtttttatttataatttcgtttttttattttcttttacctcattcattgattctctgtttctacgttgaagcaatttggatccatattttcttcatttgggtgattaattttccccaatcctctttctttatgtgataatttggatccatgttattgttgaaaagtttcgattttttcatatgttttgaatttaataggtgaatttatgaactgggtatgcttaatttgttgttgattagaaaggggttgaatgtagaaaatgtattgggagtttttccttgagttgactttcatggatgcaaaaattcttctatgttagaacttctagtggtgtgaattaatgcaatttgggaactgagaatgctcaattgtctgtttagttgtgacaaaaattgattctttataatcggtcatgattaaaactgattgagctgaaggtaaagtgatttaacaataaatttgagtctaaacatcaattctagaattaaaaattccaaattctagcttcatgttagaatcaattttagagacaaaatcaattatgcttgagaatcaattttaaaatcagttttgcagttctagaaacaattttggctcatctaaaagtggcacaaaacataggctagatttgatgttactaatgaatatattaaatgctatagccttgttgatttgattcaatgacaaatctttcctcatcacttgttaatgactgggaaggaaggaggggtaggattcaaggttgaagtttggactgaaaagttagatttttattttaatattgctttattatatcataatggttcattattagccattaggaattgaatcctgatgtgaactttacatgtttgtgtgcctgtcaattccatgatgagtttctttcttattataataaccctttgtgcaggtctgttagatttgaagcagaaga

SEQ ID NO: 28440 - DNA, 788 bp, Medicago truncatula
  Intron number 3 from transcript Medtr2g104600.3 (locus Med tr2g104600) derived from phytozome v7.0 (chr-ID MtChr2; po s 24709387 to 24710174)
tattctcgagtattgcctttcttcgtctgttagtttttaaatcggttttgtatggtatcggtaactattggcgttcctttggttgattatagttgcagtaattattgcaactcttacagttgctgttatgcttcttggagaccaatggggtttcctcaagtgatatggctttctattttctagttgactttagtgacactgaaaaaagggcttagtgatttatgaaatgcttttttcttttccggctcctgattttgaaggataactggccttgtatagtggcccctaaagataggacaacaccgaaatcaaaattccaaattgggtgttagcctatctttaggtaccactctacaaggcctgttatccttcatgataggctaacacccaatttgatatagccaattttgtagagtagcattccagacactatgcgtttgttatttcatatatgtggccccgttccatgaaatcttgctctgctaatttggtttgattctttttaattgctgtacaagtgaaatgcttctcaaaagaaaggcaacgtgatattcatattttcacatttcttgttttttggtccaacattctttagttagcttgtttgtgttgtatggaaattggctttcctgactaccatctattttataattttaccatattgactgatatattttggatcattgtttttgtggcgcatttggcaaatggaaatgcttggaggggtatgactttgtcatgaattcttacttttatcgtgcaggtgtcagaggagctcccagtgcccc

SEQ ID NO: 28441 - DNA, 657 bp, Medicago truncatula
  Intron number 8 from transcript Medtr2g104600.3 (locus Med tr2g104600) derived from phytozome v7.0 (chr-ID MtChr2; po s 24711507 to 24712163)
gaattgcttgaactcagatctgttttgtcctaaaggtataatcttaactatactgatttttgaagttatttaaaatgagaattgtacatgttctgattggtttgttttttgaatggcaatttttagtatgttcattgttatgttagtatttttcttgtcacgactgatgccgtgtctgcattgttctgatcttggattctttgtaatatctaccttgtttgtattttgaaccttgaacctttaactcctcaacacctttaatcccttagctcaaaccagttgagctacccaaccccccttacatgttctgattataaactagtcggaacaattttttgtaatccaatgaccattatatttctttgtagattttgtgtgtttttctttgcttgcttttttctattttgtctgttgtctgcatagacctaccaacaaacatgcatgttgtctcgattttccgttttctgttaaataaaatattcaatcatgtttctgtatgaaacttgaaagcatgccagctatttatctggatttgaaagccttttgttggtcacttggtctcttattgcattagttctaattctaattatgccattactgtgtgctgatggatttttctatcatatcaggtagaaatagagtttcccattactggat

SEQ ID NO: 28442 - DNA, 915 bp, Medicago truncatula
  Intron number 3 from transcript Medtr2g029090.1 (locus Med tr2g029090) derived from phytozome v7.0 (chr-ID MtChr2; po s 7662516 to 7663430 reverse strand)
ttaactctgattatatttatccttacagaaatcaggtatttttggaatgtaaatgtatttgtttagctgaattttcggaaatttaggtgacttttattgtttaacttcattcatatcttcacttgattgaaccttggcacttgtgaaattaacttttgtttttgttcgaggatatttgaaatagatttgacttgttgcggtaatgtatatgtatattttatttacgagtgtggacccgttgactcccgaagtaactttgatatttgatatttgtctggtaaataatcattcattatatacaatgaatttcaccaattcaactgtcaaattaaaagttcttattgagtagatcaactggacaattttttattaaatgttataactatttgatacttcattatgtaatttcaaatgaacatttaatgagcttctaaaaaacacaagtgaatattgatggttagactacattgctacgaaatgagcttctaaaaaacacaagtaaatgttgatggttagactacattgctacgaatttcgaattgatataaaactttatgtgtttgatcattaatatattatgacaataatcaactgctggattagtgaatgaaattcattacttataatgagttattaagcggagtaactcatcttgaagataattttggagtcaactgatccccactttttctttatattctgacttttgataattaataaacgcaagcgagacgcttatgagattttacatgtttttaaatttggctcatgcttgtcaagattttatcacgttcaacggttattgctctctcttattcttgatgtgtttgtgtttaaatcttggccttgcaaaatgatcaccacatgttgacatttaataataaagataatgatttctttcagggtggttttgac

SEQ ID NO: 28443 - DNA, 996 bp, Medicago truncatula
  Intron number 2 from transcript Medtr1g121770.1 (locus Med tr1g121770) derived from phytozome v7.0 (chr-ID MtChr1; po s 26620988 to 26621983 reverse strand)
tgttcagttagaactatttctattttgtaagcagctagactgctgatttgatttagtaatatcgactttatttttgttttttaagtgctaattttatgttgctggggcatttatccgcatgattatttctcaccatcatagcacataaacgtacgtgtggtgtttatgtggtgatcacattgcgcttagaatggattatttgttatacttgttctctgatttttatttttgtttttgctgcttggaatgtttcgatttcgtttgtcagggatgaagtgaatatttttagttcaagaatttgtttagtctgtagtatatcatgtctgttgattgattgtgttttattagtcagaaaaattcatatgaattaaaaaaaaagtaagcttcaagccatgtaacttaacatctatactaacacataccaactattttatgagctatagcaacaaaatatagacatgctgctgagtgaaaaacaaaataagttgattgggtctgtgttggtataaatgtatcttgtttttagttttttgccgctgctacagtttgcgagtgttactaacgagattccttattccccactgcaaaaccaaaatcactgccttaatacctttgctcagttttctgcttcaaattagaatattctgctccaatataaatagttgaggtattttacaatgcttgagaaatgactatgttgcctcttgctagagaaacccaattgaagaaagtgcaaaagttcgagaaaaaaattagtcatagttttaagacttgtttatgagtgacagcgagcaacaaaagtttcttcatgatagagtggctatccattaacctggtgccatggtctcctaaactttctacattacttattttacactgttgttttaacgaaggtgcgactcttgttttatttaacactgttaatttatgaaaataattggttacataaagcatttgccaggtccttcaattgtgacactctagctctgccaccgc

SEQ ID NO: 28444 - DNA, 981 bp, Medicago truncatula
  Intron number 2 from transcript Medtr3g016320.1 (locus Med tr3g016320) derived from phytozome v7.0 (chr-ID MtChr3; po s 3137723 to 3138703 reverse strand)
gtgggttcggcggtgaagcaaggtgaagagagaacgatgaaaagtgtgacattttttttaagcataaaatgaaatataagtgtgacatttttttgagagatatataagtgtgacatgtaatcaaaaattgaaataatgtattaatatattaattaaaaatagtgttaagtgggttcattgtgtgtttttccctcacagtatagaaaatagtgttacgttagtaacatttctttaaaaatgttcctaaaaatggttaaacagtaacaattattttctttgttgcacgcttgtgttgctaaatgtcaagtgtgtagtagtgttctgccgatgacatttaataccctatcctcatttctatgtttccaatatgattgttattcttctcatgcacatattattctactctctttcccatgctcatgtatacatgtgttatataggatcttcccgaatcagtcttataggatctttccaccacttcttcttcccaaggtacctccaaccattcaatttccacattttttgtttttccaacatactaatttaattaaggatacaaacccgattgagagcaattttctcacacattaatcctttcaattcctttgtctgctgcaaactttcttctgaataagaatgacactaattctccagttcacattaatcctttcttttctcttcaatgcgttgtatgcctcacttcactttcatctttggaagtttgcatctgttatgaaaatgaaaataatgttttgtcttcttccatgtatcaggtcaacgacctctcctctttaccatcttgatccaacaagtttttattacatgattttattcttattttgtttgcatccttcaactactacgtttgttctaacctcttgcaattttcacagtttttcagttgagtaaataactataaacattggttgttcatctttatttattgcagaattgttgacaagttttaggttattttccttc

SEQ ID NO: 28445 - DNA, 814 bp, Medicago truncatula
  Intron number 1 from transcript Medtr2g129690.1 (locus Med tr2g129690) derived from phytozome v7.0 (chr-ID MtChr2; po s 31407112 to 31407925 reverse strand)
gacagctgaaattggtatgattgaattttatgttttgaatgatagacactaaattctgttttgtatcctataataatggacaccatgattgcagaaaaatgagttcctccatcctcatttctcaaaatctgacaccttgtaaagccagttccatttattgcaagcaacctaatccaattaaaagttaccttctcttgcacagttacacccattcttgccattggaaatcaaataaagatgtcttccaaatacagttcctaatcggttataacttgcaataacttgaaagaaaaacaaaagtatgaatctgtgaaaagaatgatccaagtatacaaacagtatttgatatctaggcgttcctcgcttaccctccttatcttggtatcaagaaattagattagctttttccataaggaatagaactagaggatcagcctcttcctctttttattctttgttcacttcccaattttatctttagtcagtgacctgtttatctcaaatcaaatcagaattgaacgacattcactgttcagtgtaatatgaaaacaaaaattgaaattggttgcatgctgctgccatcttgaaatcggttacatactgatggatgcttaatatattctttggagatggatgtttggatgtaaatttatattgcaccttgttgtatatttgttctttttcttccctcctttgtttgcgtgtgtatgtgggaatgtacatgctaacatagaaaagaagatatttgatttctggtttaagaacacgacacttaatcttatcaactggctatgattgcagaaagtatttgatc

SEQ ID NO: 28446 - DNA, 634 bp, Medicago truncatula
  Intron number 3 from transcript Medtr2g132740.1 (locus Med tr2g132740) derived from phytozome v7.0 (chr-ID MtChr2; po s 32204217 to 32204850 reverse strand)
ctgctaaatatcaagttagtttgttatttaattttggtctcatttcatgaatttatttatttattactttattaattttatttttttgaagtagttgtaatagcaagttaatgatacttctagattaaaccatgattttagtcttaatgtgttactcttctgtaacaaattataattcattttgaaatgttcatatgattaaaaataaataaacgatcaatttagtctttaaattaactagaccatgatcaaattgatggatgagaattagttagttgattttaaaatgaaaaaaagtaaatttagtagattaccaatcaataatattatgaagaaagataaattaaaaattgaaaaataaaattaaaatagtataaatgatatagaaacattgtttggttatgaaggatgatttgggataaattattttcctcaaataacttataagaaggattccactattagcacagcttataattagcactggttatgaaacatctttgaatatatcaacttataacaaaacactacttgcattcattttttttaatgtaacaatactgacatttttggttaattatgttcatttttatctgcagggcaaagaaagtttgattaggattttctcccaaaa

SEQ ID NO: 28447 - DNA, 545 bp, Medicago truncatula
  Intron number 2 from transcript Medtr2g049790.1 (locus Med tr2g049790) derived from phytozome v7.0 (chr-ID MtChr2; po s 13679988 to 13680532)
aaacctagctctatttcagctactcgtaagcatcagtctccaatcacaccaaaatcctcaacatatatttacaaattaactgcttatattatacactttgtttctatatgcacatatatactacataatgataaaaaaaaaaaaaaaaaaaaaaaaaagtactattatctacagagttaagaacacaataatgctcacggccaagaataaagtaatgtttaaatatatagaattaaggttctgtattgaactatttaatttttcaaaaagataaaagaaaataacatttacaaataatacttgaaatattttgctcattatgtcatactaacatatgccctaaggactcgtgtgctaaagaaatcaaaagtaaaactatcaaagaccaaattttaaagatagatttcttaacatgtgcacatgacatacgttagcgtttcccttatctatattaatattgcaccctcttgaagccaaatcagtgtgaaatgatgattaactttcttttttatgtttttgttttttttattatttcaacagatcat

SEQ ID NO: 28448 - DNA, 735 bp, Medicago truncatula
  Intron number 1 from transcript Medtr3g006240.1 (locus Med tr3g006240) derived from phytozome v7.0 (chr-ID MtChr3; po s 699611 to 700345 reverse strand)
ccctagaaatacatcgtgtgactgttgctagaaaggttttcttcctcaccatttaaatcatgtagttcttgatttaaatcaaatagcggctcttcatttaaatcaaacaatggttcttcatttaaatcaaacagaaaagcattgagatccgcaacgaaattttgttctacattaatataaatttgataaattagtatctaactcttgtatataaatttgataaatgagtatctaactcttatatatactgaaattataagtgtttttgaaaaaaacggtgggatacaaattttaatttaactttggtggtaaacattttaagattagaatataactaagggagggaagtttttcaattgagtttaaaaaaaattgataactgaagcattatgccatttagataagtggagttgaaaaagaattaattgttattggtattaccattattttttattgcttttttgtattgccatatttttttattgactttaattagttttggtattgagagtaattatgagatggggtaaataaataaaatggaggaaatcaaacacaagggtataataggaactttgtgtcaaactagtttgtccttggttactgcaatttctccaaaacgacatgtattttgaaacgaaatgagtatcgttttacatttacaactttttgtttggtgttttgaaattccttaacctcacttaaattgttataatttttaggctgaaagctctg
